United States Patent Application Publication US 2007/0161031 A1 - sequence listing, part 25

SEQ ID NO: 31364 - DNA, 2300 bp, Homo sapien
aggaaggacaaacaaatgggaaggcattcagttaataaatgaagtcttttcaatgctacctgctgtcagcctttgaaaagagtaatttgccatcatggaatatcaagaatgacagtgttctaaattaatcgacagtgttcagcagtggtcactactccagtaaatgaatgaaacttttgcactgtttttttctggtttatcatagtgatcttttacccacaaaattttctgactcaacagaaaccctccttgtgattttactgtagtgtaaatagtaatatataatatgtataattatagtaactttaatcatgttgattaatagcaatttaaaagcccatttctcaatatgttagcttcatatcttttaaaaattgtgaatctcttaaaatattttttggtttgtatttcatggtactatagttgttctgactcatgaatttgaagatgccgctgccctgtagggcctaggctgtatatttttaaatgttagtatatggatgtttcctttcccaaaggcttgacatccttgagccttttaacaacgttgagaggaaagattagcattttccctcttttaaagccgtttttatggctaaggccatctccagatacattttcatgtattagaattatgaaatgaaaggatgaaaaatatattaatatacgtggttctgccagaaatgagagtgatttgaccaaagtttggaaagagttttcttgcagggaatactgtttttcttctctttttccttacggtaaaaaaccctatcttgtacatagcatgtgcaatataaaatatattattatatatatatatatatgtaaatttttagaggccaggcacggtggctcacgcctgtcatcccagcactttgggaggccgaggcaggtggatcacctgaggtcaggagtttgagaccagcctggccaaaatggcgaaacctcatctctactaaaaatacaaaaaaattagccgggcatgatggtgtgggcctgtaatcccagctacttggaaggctgaggcaggagaatcgcttgaacccgggaggcagaggttgcagtgagtggagatggtgccactataatccagcctgagcgacacagtgagactctgtctcaaaaaaaattttttttagtgcgtcaactagaacacttagctcgtttctttaattctattctaaaaattcacatttctttctagtaatcagtaaatcaggccatgagacacatttggttccttttccagatgtccaagtataaaggtagaggaatagtggttagggaactcagaaaatggggcatcccagaggtcacagtgagccgagatcgcgccactgcactccagcctgggcggcggagcaagaccctgtctcaaaaaaaaaaaagacagtggagcctcctagaccttacatttccccttattgccttaggcaaaatctaaaataataaccatttattttaccagtgggaaaatggggacacagagatgttaactagttgcccaaggtcaatagagttgagagacagcaggattcaaacatggcttcagaatccgtatgtgtagtcgctgcatcgtgtgcctcagtggctcaagcttttagccacagtttagtttacaccatcagctgaaaggcataggccgttcctgcggtcccttaatagtcagcaccatcagctgaaaggcatacgccgttcctgcggtcccttaatattcaagtttggttctgaaaaaaattattttggcttttccctccatgatcctcaaagtctacaccacaccactaaatgtactatcaacctctgcttttagtatgattctcctttttttatttgtatttcaagttcatatgttcaaggaacatttgcgtctctgctatatgctagtcattgttctaagcaatgggactacaaagatggccacatttattgaatatccaatcttgttccaaaaataacttgagactagtcttcaaaaaaagtttttcttgaagtggaaccaagatctctaagacactgtccccccgaccctagaaaccacgacctgatggagatactttataaaaaattacaacatgagaaatgcctgctaacagagatatttcacaaagaactttacttttgagcagagtgtaccaggtggtaagttggggaatgacggagaagaagaatgttgtgtgaagttagcagcagggcgcgtgtggtttggtgtggctgaagaaaggggcacattttcttggagtatagagtagaagtcagagaagataatgttgaaaaatgtacacaaaggcctctttctt

SEQ ID NO: 31365 - DNA, 2300 bp, Homo sapien
tttacctaaagaagaggctcacagagtgcatgtgtcttgagtttggtagagcagtaataactcagttgacttcttcatagacctgcactccatgatgtcggaggctctttcgcctctgggactgctccactccgcacaaagaggcgatagtcacagctcccgtaatcatttaattttctcttaatgaaatggtatagaaataactgaaacatcattcaagacgcccataaactaatctcagtgtttctttcccattttaggtaactgcacttttgtgagattataaatataccacggagggtaacgaagctacagaagaatggaagagtatgtttaaaattccaatgttttttgtatacatgtatttaaattatgccttctgttaaatttctgtgtataccttatctattgctgcgtaacagattaccccagaacttagtgacttaaaatataaacatttattctttcccacagtttctgtgggtcccaaggttaggagcaggttagctggatggtgctggcttgaggtctctcctgaacttgaagttggccaggggtggcaatgatctgaacacttgatgggggctgcagtatccacttccaaggtggttcattgacagagctggcaagttggtgcaggctgccggcaagaggccttagttccttaccttcatggatgtgtccacagtgctgctgaagtgtcctcataccaaggcagctgtcttccctcacagtgagagatttgagagagtgaggcagaagctgcaatgtcttttatcacctagccttgcaagtcacactccgtcatccccaccgtaaccttctggttacataggctagtcctgctcggtgtggtgtagactacacagaggcgttaacactagaaagtgagaatcatttgggccaccttggaggctggataccacattctgtttttcactcatcatgagacacttttggttagcatccaaagatactcctagggaaaaaaaagttaattttggctcaaattcaaattgatcagaatagccaaattgcatgaactacatacctttattaaacagtaggccaggcgcggtggctcacgcctgtaatcccagcactttgggaggctgagttgggcagatcacctgaggtcaggagttcaaggccagtctgaccaacatggagaaacccaatctctactaaaaacacaaactggccgggcgcggtggctcacacctgtaatcccagcactttgggaggccgaggtgggcggatcacgaggtcaggagatcgagaccatcctggctaacacggtgaaaccacgtctctactaaaaatacaaaaaattagccaggtgtgttggtggacgcctgtagtcccagctacttgggaggctgaggcaggagaatggtgtgaacccaggaggcagagcttgcagtgagccaagatcgcgctactgcactccagcctgggcaacatagtgagactctgtctcaaaaaaaataaaataaaataaaataaaataaaaacacaaacttagccaggtgtggtagcacatgcctgtaatcccagctactcgggagggtgaggcaggagaatcgcttgaacctgggaggcagaggttgcggtgagctgagatagcaccattgcactccagcctgggcaacaagagcgaaactccatctgaaaaaaagaaaaaaaaaaaaagagtaagttgtttgcctttggttggtcaaaatggaagatacttagcagaatcacacgccaaatcctccttttttttcatctaggttctattatacgacgatgtgaatatcacaggagcccagcacgttgctgcctgtgcttttgagttaaagtaatgtttaaatattggttgctgacttattttttctttattctttccttagagacagcctggaagactcaaaccttcctccaaaagtttggcattctgagatgacggtgtcagtgacaggcgaaccacctagtaccgtagaagaagaaggaatacctaaagaaacagacatagaaatcatcccagaaatcccggaaactctagagccactgtcccttccagatgtgctgaggatctcggcagttctggaggacaccacagaccagctctctattctgaactacatcatgcccgttcagtacgaagggagacagagcatctgcgtggtatagacccactcaccatgagttaattttgctttattttttatttctccctcatttatagtacctatcccattaaatgtacttatttttctttctttctctctctctctttccttctttgtttcttttct

SEQ ID NO: 31366 - DNA, 2300 bp, Homo sapien
cacaccaacacccctggctgatttttgtatttttagtagagacagggtttcactatgttggccaggctggtctcaaactcctgacctcaagtgatccacccacctcagcctcccaaagtgctgggatgacaggcgtgagccactgcgcccggcccatactttgttttaaaaagtattcttatcatgctctactaatggtcatcacctgcagtttgaaaaatgccttaactgacacttgtccaagtgatcctttcgctgactcgtcaggccagatcaggcttctgggcactcatgccactactttcccgcagagctgtgttcacaatttgttacgttagtgtcagtttccccccactagacaactgttccatgaaagcagcaacatgacaacgatgctcacagttgtatcaggtgctaagtctcagtgctcaataagtatttgtggaacgaataatacacgagcaaacgaatgaaactcacacttaatgtgttattcctcccaggaggacttccatatagaactttgacaaatcaatatctaatagtgaaatttctagcacatttctttctgggacagggaacactgggtggggtagtaggctacaaggtacaagttctatcctgttgtatttaagagaggatctgattttaaaagtgacttatatacatctatttcatacaacttcggagtcatactttactctctctcattcctcatccaccagcaaatcttgccagaatttaaatatattcagaattccagtactcaatatcctctgtttacacaccatcacctctcatcatagtcactacaggaacctataattatcttcctgctgatacccttgcctcccttcactttcaacacagtgactttgtcaatatagaagtcagatagagtcacccttctgttcaggacccttaaatagttcccatctcaaagcaggggaagcctcttttacatacttcccatctcaaagtggggaaagcctcttttacagtggcctctctgcttaattttcttcacagaaattatcatcttctaacgtgtcatctatttttacttgctcattgtgttgctccgcctcgtaggatataagctccacgagggcatagatttgtttactgccgtgtcatcttacacaaaccttggtacagggtagtcattcattaaactatgtgttaaataaatgaatgaatccataggataacccaaataaatatgcaataattcggaaatgtgaatctctggcgtccactaatccacctctacaagtatctacggaggacctactaggtgcggacacgaggcagctaaacgagttctcctaaaagggcgataaagcctcctgcaggcagtcctcctcatacctcggatccaaaaagaagaatggaggtaagaacttaagtcatttcattcattttttttttcttttgtagaggttgggggaggtggtctcactatgttgcccaggctggtctcgaactcctggcctcaagcgatcctcccgcctcggcttcccaaagagctgggtttacaggcgtgagccactgtgcccagtctcatttcttgaaagagataaataagtagaggggagaaaagaagtatagaaaaagaaaaaagagaaggaagaggtcctgctgccttcgtgctcccggcctttctcttccatgctagattaggatcccagaatttccgttctgtctattgctgtgtgtatcgagagaaaagcaccccactgttggcaaatcaatcttacagtcaatcattctttaggcagcgggaacatcctccactcagggttcgcctttccacctacggcgtccggggacgcaggaagtaaactaagttgtttctatggcaacgcacagctttggcggatttagctggctaccattttgccttcccttgttcccaagtagtacattttgcagcctaccaagatgaaaggacttaggaaaataattgtaagagtgctattgaatgtggcttatttcagtgcgaagccgatttccgaggattgtttttctggcgtttggagaagatgcctaaattgagggcggagtcgaaagatgtttaatcccacaaggccacgcggcggggcctcgtccttctcttaccgccatcttggctcctgtggaggtgagtgaagggtctgctgctgaaatttgggggcaaataaccggagtaggtttgttcctgtgccttggcgagtcgccggtgcgtatcggagtctctgccagccattgatttctacgggtttcaagaagagggagaacaggatggaggagatgttggg

SEQ ID NO: 31367 - DNA, 2300 bp, Homo sapien
acaagtgcaaaaggtacctaaatccaacaccaccctcagaagtaacgtccttctaaaactccccattaagttccttaatgacgcaaaatagaagccacagcaataccaatccagcctggccaacatggggaaacccattctctagtaaaaatacaaaaattagccgggcgtggtggcacacccctgtaagcccagctactcaggaggctgaggcaggagaatcgcttgagccaggaggcagaggctgcagcgagccaagatcgcgctactgccctccaacctgggcaacagagactcttgtcacaaaaacaaaaaaacaataccaagtacttcagctaaatcttttgtttattatttcaataggataatgaggccaggcgcggtggctcaagcctgtaatctcagcactttgggaggccgaggtgggcggatcacctaaggtcaggagtttgggaccagcctggccaacatggcaataccctgtctctactaataatacaaaaactagccgggcgtggtggccggcgcctgtaatcccagctactcgggaggctgagacaggacacttgcttgaacccgggaggcggaggtttcggtgagggagaccaagtcactgcattccagcctcggcaacagagcaagactccgttatataaaaaagaaaatgaggcagatctcaaaaacccaaaacctaccagtgtcataaacttacttctttgctttatatacataagcgcatctcttgcccaaatagaattctgtttcatctcgggcgtaaacaccttcaattttaagaagagctgtgtgctccctttggttccggagaccccgcttatagccagcaaaaatggccttggaccacagcctaagacacaaaagatacacaacatgaaacataagcttcaaaaaaccaatctgacttgtaatcacccccacccaaaagttactcagagcaaacatctaagttttttcttgccaattttaagctcgcatttacgttcacgtctaacacacaaaaataaagaactatatttaaaacgcgtaccttccagacatagttccttttagaagtcccgttcccagcaggccttaaaacaaacaaaaagattagtttaaaaccaagccacacaagtttcccacctcgtcccctctcgtttaagcccctaaagcaaattccttttggatgggagtttcatgtaggagttcggggacaacaatgccagaacatccatatgaaacgcagggtccggcaagacattcaaacctcagagaacagctggtatctaagcaaacttcagaatgaagacaaaactaagggacaggagtcacaaaaatgactctcagaaaagcctgagaaaatgcatgccgttatcagtaggcaacactcaggaaaagaaatgaagccttaaagagaaacacacacgtaagacttttatgcaatggctgggggagaaaagctgaggaaagagactggtcagacaagccaaggaaggtatggactgggaggaaacggatgaaggaagcactgcctcatggacaactgcacacgaacaaaaacatcgtttcactccgttcaggcccaggaatttaactgggataacccgggcagccgttctccgggtgtcaggggaccaaacaccatcagcccaacatctcctccatcctgttctccctcttcttgaaacccgtagaaatcaatggctggcagagactccgatacgcaccggcgactcgccaaggcacaggaacaaacctactccggttatttgcccccaaatttcagcagcagacccttcactcacctccacaggagccaagatggcggtaagagaaggacgaggccccgccgcgtggccttgtgggattaaacatctttcgactccgccctcaatttaggcatcttctccaaacgccagaaaaacaatcctcggaaatcggcttcgcactgaaataagccacattcaatagcactcttacaattattttcctaagtcctttcatcttggtaggctgcaaaatgtactacttgggaacaagggaaggcaaaatggtagccagctaaatccgccaaagctgtgcgttgccatagaaacaacttagtttacttcctgcgtccccggacgccgtaggtggaaaggcgaaccctgagtggaggatgttcccgctgcctaaagaatgattgactgtaagattgatttgccaacagtggggtgcttttctctcgatacacacagcaatagacagaacggaaattctgggatcctaatctagcatggaagagaaaggccgggagcacgaag

SEQ ID NO: 31368 - DNA, 2300 bp, Homo sapien
ttctgttgcccagcctgtagtgcagtggtgtgatcatagctcactgcacctttgaacttctaggctcagacaatcccctgcccacaacctccagagaatctggtgcatgccaggcacgtccagccaattaaaatgttttttcggggtcccaggctggtctcgattcctggcctcaagtgatccccctgccttgttctcctaaagtactgggattacagatatgagccaccagctcagattatttcaaatcccaatggcatcccagcataaacaagggaaaattaggtgggcttttcagtctcaaatggagaattctaacatgtttctggctttgggggctggatggataatggtgcatttacaaagttggggaatcaggagatggttttgtgggaggagctaaagttgaatttgaggaagctgtaagatgttaacctgtggacatatccatgaagacagatgggtatttcaggtctgggttaggcatatggagaagtggatggtattctgagtggaacagacacacggtaagtggtaggcatctgagcaaagcgggggaaaacaaacggttgagactttaactcgagtaacttacatgtgcaatggcaaatgagactcaaaagcaaatacatgctcttccttactgagatgatgcagcatttgtaaataataaatgtatgtttttatgtttttctcctcccatatggaaattaagtcaaaagtactcaagtcaccgttgccaaaggaggagtcctgtggtttacaggaaagggcttgcgtggctggtaacttgtccactacaccattgaaacagctttgcctcctggctgggcgcggtggctcacgcctgtaatcccaacactttgggaggcggaggcgggcggatcacctgaggtcatgaggttgagaccagcctggccaacgtggtgaaactacgtctctactaaaaacataaaaattggccgggcgtggtggcgggtgcctgtaatcccggctactcgggaggctgaggcaggggaatagcttgatcccgggaggcagaggttgcattgagccgagattgtgtcactgcactccagcctgggcgacgagtgaaactccgtctcaaaaaaaaaagaaacagcctttcctcagcataacactattgttacagccaggagcttaggatgactggttccattctttattcacaatagcaatttatttgtggtattgtagtggaaagggcacgtttcctaagttacaaatgtggtttggaatcccaccttccactagttgtgggatgatacacacatttagtgagtatttacttgtaaaatggtaatacttaaaacaccaccccatcctcgtagctgaatctccacccatagtttgtaacttgaggttttccttctttcctactccttcatttcccagtatagtagcttacctattcaattcccgttgaatgacttccagctcagtgagttcgtaattttacttcttagtgtcatgagccactgggatttgtcccaatttcccattttgtatagttcctcacggctcagtttcgaaggcaaggtttccttaatggccaggatcccccttatctcaggtgcagtggcaattcttggctggaaactaaaagatggagttgagtaaaacagtaaacggtgtatcatagatttttataggaaatggcgttagttaagtaatgggcctaaagttggtgactcaggataagtaaatgaaagtattccactcaccttttcatacagaggactacactgaaagattttgcagagggttgtatgtacgtctaaacacctggcacctagtaggtgcatgtcactttggtaaatgaaagaactgaaaaactgcctcaagacacccacatacggccaacgcccgctagcctttcttcctcccacagccccactcacgtgggcctccaaacagcatttattggccggcttcgcgccacgagacgcgatggacgtgatcgccgccctcatcttctgcggcgaacttctagcgggtgacgctgtccaatcggaaagcgcctttccgccggctgggccctccgtctacccccagcggcgaggggcggggccggcgcgggcgcagaggcgtcacgcactccatggtaacgacgctcggcccgaagatggcggccgaatggggcggaggagtgggttactcgggctcaggcccgggccggagccggtggcgctggagcgggtctgtgtgggtccgaagcgttttactcctgttgggcgggctccgggccagcgccacatctactcccgtctccttgggca

SEQ ID NO: 31369 - DNA, 2300 bp, Homo sapien
tgtgggaacgttctatgttgtgatgggttgtatgctttatgtggatgtgcatggatacatttgtggcatttcaatatatgtaaattttaccaaaaaacttcaaaagaacagtaactcaagtagggggctgcggaatggctgaaagtatatgaaacaagaatggcggaaccttaaagctaggtgttaaagctaggtgatgggtccatgcgggttcattaaattattctgatgttgtttgtaccggcgtaataaaaggtaaaaacaaaacttacaggctttagttgagaaccagttaaaaagtaaaactgttttgtagctccccaacaccaccaaaaccaaaaaagttatgtaatttcctgtagcattgaacagaggtatagtcattagcgtaactacagtgaacactgtagctcctggctatactccgtgtccaggttaaaacaaggagaatagtgaggacgacagggtatttatatactctatgaggaactagcgaaacgtattagggaccaggactctttctcttattttaatccaaattaaaagagagaagtgcagggttttgtgggaaattttttttaaagaattcagcgaaaatgcagcatgataaaagctgcaaaaaagctataaactccgaagttaatattttggctcacttggttatgaagagtatgcatgtaacattttgggaaattaccataaaaatgagtgtctttagatttctgggctgaattgaacatgtgtaggtgtatcagcatgcagccctgccccaggtactctccctttctcaaagaatatggattatcgtggacccacctctgacctaaatactgtgaaggaatcaaagtatgaaacacaaaccttatcccacggaaccttataatctaactgcaaaggcaagatacgcctaaaaaataagccattatcccatagcagtacttggttaaatgccaggagggagtacagacacgatgtactttttaatgaaaagaatattgcgctgtggtggtttcagcaggctgccttgaggttagggaatttgaaatgagacaaagaatttaagcagagagaaaaatgggatgggaggcgggcaggcacttccagagcagaggaaccgggtaaagcaaacaaagtgacgacataacgtgaaaagaaacctgaattttgtctccagtgagcccccaacgtcccaccaacgcctctatctggctctccgttcaatgtcttcccgaaacttcaggtcagcggttcctaaagtggtccccggacaagcatatctcaccaaccagctgggaacgtaaactgtcaactctggggactcatcccagacctactgagtcactaagtgggggactgagggcggcaatccgtgttgtaccatgtgcgtcgggtgactgtgatgcacgctcaagtttgaaaaccactcctcgagggctactgctaagcacaaccctccgcacagaagtgatactgttctgagcgcctaacagccaacttgcagggtgtagggagctgagagcgggtcccaggcctgtaagagtcaggctctgccccaatttcgctttctcatccaggacaccttctcccagtcactatctcctacgcctgctccttctgggtgactttaccctgagagggcccgctcccgcccatgtcgccctacctcagtgtcagaggggacgtggtgccggcagggaggggaactgcccaaggagacgggagtagatgtggcgctggcccggagcccgcccaacaggagtaaaacgcttcggacccacacagacccgctccagcgccaccggctccggcccgggcctgagcccgagtaacccactcctccgccccattcggccgccatcttcgggccgagcgtcgttaccatggagtgcgtgacgcctctgcgcccgcgccggccccgcccctcgccgctgggggtagacggagggcccagccggcggaaaggcgctttccgattggacagcgtcacccgctagaagttcgccgcagaagatgagggcggcgatcacgtccatcgcgtctcgtggcgcgaagccggccaataaatgctgtttggaggcccacgtgagtggggctgtgggaggaagaaaggctagcgggcgttggccgtatgtgggtgtcttgaggcagtttttcagttctttcatttaccaaagtgacatgcacctactaggtgccaggtgtttagacgtacatacaaccctctgcaaaatctttcagtgtagtcctctgtatgaaaaggtgagtggaatactttcatttacttatcctgagtcaccaac

SEQ ID NO: 31370 - DNA, 2300 bp, Homo sapien
gttgcttccaagtctttgctattgtgaatagtgctgcaataaacatacgtgtgcatgtgtctttatagcagcatgatttatagtcctttgggtatatacccagtaatgggatggctgggtcaaatggtatttctagttctagatccctgaggaatcgccacactgacttccacaagggttgaactagtttacagtcccaccaacagtgtaaaagtgttcctattactccacatcctctccagcacctgttgtttcctgactttttaatgatcgccattctaactggtgtgagatggtatctcattgtggttttgatttgcatttctctgatggccagtgatggtaagcatgttttcatgtgttttttggctgcataaatgtcttcttttgagaagtgtctgttcatgtccttcgcccactttttgatggggttgttttttttttcttgtaaatttgtttgagttcattgtagattctgaatattagccctttgtccgatgagtaggttgcgaaaattttcttccattttgtaggttgcctgttcactctgatggtagtttcttttgctgtgcagaagctctttagtttaattaatcccatttgtcaattttggcttttgttgccattgcttttggtgttttagacatgaagtccttgcccataaatgaggtattgaagtgtccaactactactataaaactgcggggttatccttttgatcttgttaattttttcagctttactgaggtttaatagagaaataaaaattgcacatattcaaggtggacagtgtgatatgtttatatatgcacattctgaaatgattaccaaaatgaagtcaattaacatgttaattacctcacataatagttaccttttcgtgtgcatgcatgggataagaaaacttaactccatccccagtgactgcagagtggccattccagctgctccaggctccggcagaggaagagcggggcgggtggcaccaccaggggggcccacaggcctggcgcgcacgcgttctggagcccacccagaccatgctccgccgcctgggcgcccaagctgcagtcgccctctgtgtgcaggcaacaactgcctggtaactcccgagcctgctcgcgctcccagcatcgcagaaccagggccaggtgtcccgagggctgcggccaagccaggcattctgcccggcggcggctgcacaggggcgagaactgagaaccagccgctcaaccccatcggggtgaatgccgagtgcccatgccagcggcctcgaactccctgcggtggaggagtggggcgggaggtacgtcctggggaccctcagttgggcgcgctggcgatcccggggccgcccaggccatgcccctccagcccgcctgggcacccaagctgcagccgccttctgtgtgcaggcagcagcctccaggcaacccccgagcccgcccgcactcccaacatctcagaaccggagccagatgtaccagtggctgcggccgagccaggcagtcggccctggggcggctgcacaggggcgggaacccgccctcagccccattcccggtggctgcagagggcccctggctagcggtccggagctccggcagaggaggagccgagcgggggcagggcctggcaggctctcaggccaggtgcactcgcgatccagaggccgcccaggccatgctccgccgcctgagggcccaagctccaggcgccctctgcctgctcgcagcagccgcctggcagctcccaagctcgctggagctcccagcctcgcagaaccggagccagatgccgcggctgcagccaagccaggcggtctgcccggcggcggctgcaccggggcgggaactgccccacagccccatccctggtggctgcggagggcccctgccagcggccccgatctctcttcggaggaggagcggggcgggggtcacggccaggcgggccctcaggccgggcgggttgcgcgcctgcgactacgggacgtcccgggcgagcccaggagaacccgcaagccagcggcgcctgcgcccgagccgcagccgccccctgccggcagcgcgggcttgggagcggcttccggagtccgcgcgggcgctgagctgcaggcgcgcgcctaacggcttcgcgggctgagaggtcagaggctgcgagtgtcgctgctgaaggctgtggtggacccggccgggtcgcggattctgagctacatctcgggtttggggttagggttagtggaaaggccacgaggagccgcgggggctcaggagccggtggtgggcgtctgaggagaa

SEQ ID NO: 31371 - DNA, 2300 bp, Homo sapien
agtcccagctacttgggaggctgaggtgggaggatcacttgagcccagggaggctgagaccgcagtgagtcatgatcaggcctctgcactccagcctgggtgacagagtgagaccctgtctcaaaacaacaaaaaagtagcagctaacatcaactgaccttttaccaggtgcctattgataccatagtttaatttcttataactgtttcttatttcacttaccaactctgtcttcagttactcccagatttttactgtgtgtgtacagatgaccttttgcttagattgaattgtctccccagaagtaagattactgtgagtcatggtgaatggacattctccttacccttgatgtaaattgacagggttttgggtgcctcccagctataatcttagcactttgggaggctaagagaggaggattgcttgaggccaagagttggaggaggcagtatggcagtatggtgagaccctgtctccattattttaaaaaattgacaggctttaccctggaaggcttatacacaatttaaccacccctcatagtataagaaagtgcccatttcactgcacctttgccagcacagggtattataatttagtaagccattttttgtttgattattttaaatagacaaaagacctcatattactttacttgtcacatttcaacatctttcctcagcttattagctctatttcttttctgtctgtaaatggttgttgtggttttgttctttgagacagggtcttgctctgtcatccggctggactgtagtggcataatcatgcctcactgcagccttgacctcccaggctcaaacttcagcattccgagtagctgggactacaagtgtgcaccaccacccccagctaacttttttcttcttttggatagagacagggtctcactgtgtcgtccagagcggtctctagctcctggccttaagcaatcctcctgcattagcttctgtaatggctggaatttcaggcatgagccaccatgcctggcctgggctagtcccatattctctagagttatctttactctgtgctagccaatctctcattatgctgttcacctgttataatgaataattctctgtattaaattttaccactttaaacttttgagtggtttatgcttcctgattggactctgactaatatgttaggaagggtcccaggaggtaaacccacacagatgggatttgggcataggtttggtttcccagggggcagtgctgagctctttgccagtgggaaatgggatgctggtgatttccagtaggtgacctcacagtgactcaagctaccacttactgttgattgtgacgaaatgccagctgaggcacatgccttgggagctaagtggttgctgcccttgaccactgtgaagactggtgtgggaagggtcgctttggatgcacttgagcaggggtccccaacccctgagccatggagccgcaaggagccacacagcaggaggtgagcggtgtcgagtgagggagtgagggaagcttcgtctgtatttacagccactcccctttgctcacattcccgcctgagctccaccttctcagatgagcagcagcattagatgctcataggagaacgcaccctgttgtgaaccgtgcatgtgagggatcgaggttgcgctgtccttatgagagtctaatacctattgatctgtcactttctcccatcacgctcaggtgggaccatccagttgcaggaaaacaagcttgacacgcccactaattctacattatggtgagttctataattattttattatatattacagtgtaataatggaaataaagtgcctaataaatgcaaatgtgcttacatcttttggcccagctcctacctcccggcagcctctccaggcccagaactttctccagtcagcctctacagaccaagctcatgactcacaatggcctatttaggcccataccctacgtcacggcagcctccgcagatgaggctactgcctcacaacagcctccacaggcacagctccatcgttacaatggcctctttagacccagctcctgcctcccagccttctctccaggccctgaactttctcaagtcgacctcaccaggcccagctcatgcttctttgcagcctctccaggcccagctcctgcatcttggtggcccctccaggcccagcctctgcctcccgtcagcctctacagtcccaacgtctgcctcacagcagattcttcacgcccagcatctacctcactgtggaccccccaagccaagctcccaacctttcagcagct

SEQ ID NO: 31372 - DNA, 2300 bp, Homo sapien
tataatgaataattctctgtattaaattttaccactttaaacttttgagtggtttatgcttcctgattggactctgactaatatgttaggaagggtcccaggaggtaaacccacacagatgggatttgggcataggtttggtttcccagggggcagtgctgagctctttgccagtgggaaatgggatgctggtgatttccagtaggtgacctcacagtgactcaagctaccacttactgttgattgtgacgaaatgccagctgaggcacatgccttgggagctaagtggttgctgcccttgaccactgtgaagactggtgtgggaagggtcgctttggatgcacttgagcaggggtccccaacccctgagccatggagccgcaaggagccacacagcaggaggtgagcggtgtcgagtgagggagtgagggaagcttcgtctgtatttacagccactcccctttgctcacattcccgcctgagctccaccttctcagatgagcagcagcattagatgctcataggagaacgcaccctgttgtgaaccgtgcatgtgagggatcgaggttgcgctgtccttatgagagtctaatacctattgatctgtcactttctcccatcacgctcaggtgggaccatccagttgcaggaaaacaagcttgacacgcccactaattctacattatggtgagttctataattattttattatatattacagtgtaataatggaaataaagtgcctaataaatgcaaatgtgcttacatcttttggcccagctcctacctcccggcagcctctccaggcccagaactttctccagtcagcctctacagaccaagctcatgactcacaatggcctatttaggcccataccctacgtcacggcagcctccgcagatgaggctactgcctcacaacagcctccacaggcacagctccatcgttacaatggcctctttagacccagctcctgcctcccagccttctctccaggccctgaactttctcaagtcgacctcaccaggcccagctcatgcttctttgcagcctctccaggcccagctcctgcatcttggtggcccctccaggcccagcctctgcctcccgtcagcctctacagtcccaacgtctgcctcacagcagattcttcacgcccagcatctacctcactgtggaccccccaagccaagctcccaacctttcagcagcttctacacacccagctcccgcctgccagtggcctcttcaggcccatggggctcattcctgacaacggcctttccaggcccagtttttcccttccggcggcctctccgggcccagaacctcctcaagtcagcctctccagacccacttgcaccctccgggcgttctctccgggcccagctcttcttcctggttgggtctccaggcccgattcctgcctctcaacaacctctttggactcagtgcctacccatctcctggcggccttggtcggcccacagcttcctcaagccaagctccccaggcccaggtcaggcctcacggtggcctctccaggatgagctcctgccctccgatggcatctccaggccccaaatggtctccggtcggtgggctcctccacgccaaggttgggcctcccggcgactgccgcaggcccaagttgtcctgaagtcgggctctcccggccctgcctcccagcaagtaagcaagctcttttggctcaactcctgcccagctcccaaccgcctttgtaggccccgaactttctccagccaagctctgagggcccacctcctgcctcctggtggcctgtacagttctagcactggttggagaacagcctctgcaggccccgccttgcctcccaggggcctctccaggccaagctcttgcacccacggcggcctcccggggcaagtccctgcctgcctcccagcagcccgcgtgcgcccagctcctccctcacggtggcctgttgatgccaactcatgcctctggaccctgcacagagcgtgacgctgcctcacactggctactccacgctgagagaggtcagtgtgagcccttgcctcacaccggctcctcccacgcttgagagaggtcagcgtgagccccttgcctcacaccggcccctcccacgctgagagaggtcagtgtgagcccttgcctcacaccggcccctcccacgcggacagaggtcagcgtgagccccttgcctcacaccggcccctcccacgctgagagaggtcagtgtgagcccttgcctcaccccggcccctcccacgtggacagaggtcagcgtgagccc

SEQ ID NO: 31373 - DNA, 2300 bp, Homo sapien
agggcttttttttaacatgacaccatataattatcacagctaaaactttaataataattctttaataaccaaatattattttaatttccccaattgtctcataaatgttataattgattttttcgaaatagtatctaaataaggtccactggttgtatttggtttcttaagtatcttttaatcttaggttctccctttttggttgttttttttccaacctcctagcactttatttgtagaagaagatggctgtttgtcttgtacagtttcctatattctggatttgctgattgtctccctgtattgtcttttaaacttgtttctctgaattctaaatcttctctgaagtgataattaaatatagtggtctgaaagatgcaagtttttttgtctttatttttccacccagtattatgcatataatatgatacctggctgtgtgtctctttgtgatgttaaggagctatcagccttatccatccatgataaagttcttcagaagtttaccaaagaagatttcaagattaaattttaaattggatgctgcaagattttatgaaaaagttaaaaggaaagctaaaaagagaaataagagagcaaactatatatgtatgctttatatgtgtcagtgtgcaaggaattgtgcaagactatatgagagatgtatgtacatcaaagatgatatttgatagaagatatgcaaaactttgtatgtgagacagaaggaaacagtcctaaaggaaagacactctcaaaacttcattccctaacaaagcgaattgtagctttgaaccatgtctctttaattagagttgctgttgatatgaataatcaaaggtcttgatcatgctattattggctttgatgcaataaatagaatggtaatatttttgtgagatgggaggttgtatagtaaaacacttgtgttccgaggctgaacagtttgctgaggcgctgtaagattattgtgaagggcataaatacttagtaactttgccccctaccccaatttagaatttctgtaagagaaagaaaagtagtgttaaaggaagaaaaaaagctatgctcgactgggttgtagtgattggattatgcaatattgatttactgtcataaattgtgcacaaccagattttgctgactgttgtaagttgagcttataacgtgtcagaaatccaaatctgttttatttctaatatgtgagtagaatttaaattaattcaacagcaatggcctctgtgttcttttcagtaatgagaagtatcatttacatcaccactctgttctttggataaataaattttttaaaaaataaggattgtaatagccagtgatccaaggccactaaccctaagtggttcttattgcccgtcctctatctcccatggctctcatttcaggaaacaactacttggtactaagttctttccttttactattcattttgcatttcagctgtttccttccatttccatgtgtttaatccacctttcccaggctatagtatcacctatatttgatttattctaggcttcagcttccctatttctattttcttattcttcttatttctttactattcagacagaaatgtgtattgtagatatagaattaatgcataccccaaaaggtacccaagaagcttgccattttctcttctagcacaaggcttgagtgccatgctaggcttttgggtttttgctacgatgaggcttaaatccactctctgcttctactctgaaatattcctgagctgttatgttaaccttagaagacacagctacattggaagttaagtccactgactgtaatatacttgatgggcacttagttgttcaattattcagtattgttcaatattcaataaaaacatgggaccaaattttgagaagttagatgaatagctggaatctgatgatgaggatggattgataaaagaacaagtagatggaagaagttggaaggaaagtaggtttgtaggtgaaggcagcaaaaatcagttaattttcagtaaaatagtgtaacttagttgcacttaaatattacacatctacaccagaaagatacattctattcacctcttcattattatttatcacagggattatgatcaagaacagtttgctgataaccaaataccactgttggtaatagggactaaactggaccagattcatgaaacaaagcgccatgaagttttaactaggactgctttcctggctgaggatttcaatccagaagaaattaatttggtatgtattttcactaatgcatgcttgtattattatcgggtaaagaca

SEQ ID NO: 31374 - DNA, 2300 bp, Homo sapien
gagacggagtctcgctctgtcgcccaggctggagtgcagtggcgcgatctcggttcactgcaagctccgcctccctggttcacaccattctcctgcctcagcctcccgagtagctaggactacaggcgcccgccaccacgcccagctaatttttttttgtatttttagtagcgacggggtttcaccgtgtaagccaggatggtcttgatcgcctgacctcgtgatccgcccgcctcggcctcccaaagtgctgggattacaggcgtgagccaccgcgcccggccaaactgccaaatgtgggtataaatgtgactcaaagctggcctgagctggtgctttctgcctatgaggtggccctgctctacaggagcagtcacggttgtgacaccaccaaagctgtaacactgcctcttcaataaaattgttttcttctacctccgggttgcccttgaattctttcctgggcaaagccaagttccctggttgcctaagccccactttggggctcgcctgccctgcatcagttcgtactcgctggactcattcctttatccttttattctttttacatgctctccttcctagatcagtgtctaatctatacaggttttggaaactttatgtagtctttagaattttataaactgctcttgcttttcatattgtattattttcttagtatttcaaaacacctttgaacaagtcagaatttcctttttttttctcctttaaaatcgagtctgagtaactcgtcttgtgttcattttttctacattctctcagcctgaatcctcatgagtccattttgctctatattcatctggacattagactactttgaaatattaccatttctgcctattctttctgtactgcctgattgtcagctcccgaaaggcaaacaccccatcttccattttgtctggatttcccccactgagcctagaagattgacttaacactgactagtgtgctgtgtgcttcacgcggtgggtgcttaataaatattttaaaacagtattaaaatgttgaataaatttgacagcagtgctgcttctcatcatttcaaatgccaacactttctaggtcccttttctagcaaccatttcccaacatacctacgcgcccccagacgtttcagccaagctggggctctcttttgatccatccttctttgcccgagttatggaaatattgtttacattttttcccctgaggagaaggggaacccaaagaccctgctgtgaaacttgaagttgtttttctccttggtaactggggagaaggaaggacagtagggacagagaaggttttgtttctgattacttcagttttcgccccagatcgtcttttacaataagatacatgcccctatgagtattttcatacctgtaaggatgtttttaattctttgcatctgaagagtgctaaggattttaggcaagaggttttagtattttaactaagatgttttctcatgagctttattcagtatctcattttcttcctgaccttctatagtcagtcaggcaacatttctcttataacatcatttttcctattaatcattatttcgtacctgtgaaaaataagcttacacttaatgttgtatgaatctagcatggtaaagtacagaaaagcttattctcttcttcttgggtagggaattctgttttgcaaagcactttgtgatctatttgttagcttatttaatcctcacaacaactttgctaggtggacaggagtcattatctccaggataaggaaaaggaaactcagagactttaagtgacttatccaaggtgacacagcacggttagacccacaatgaaaacccggacttctgactccacagccagtcccacacagctcaactttacataataagccctggttatgtcagtagagacaaggctgctaggaagaagcagcgcggtgacagatgagtaggtggggagcggcggtggggcagggcgcactgcgagaagagcacttcgcgcatgcgcatatcaccgaacgaacgcgccgtgttcgggaaggtaggagaaagaggcggagctccttgttaacgacatccccaacctctgctaacgcgcaggcgcacttcctgaagctgaaggtcagcatagacaaagggcctcagaatcgcgcaggcgcaattgtgccctggttcgccaagatgtcgttcccaaagtataagccgtcgagcctgcgcactctgcctgagaccctcgacccagccgaatacaacatatctccggaaacccggcgggcgcaagccgagcggttggccataagag

SEQ ID NO: 31375 - DNA, 2300 bp, Homo sapien
aaaaaaaaaaaaaaagcagtactggccctcacaattttacaaactatttttttttaagtgctaccaaagtcatcttcatctgcattcatttgttgtgggtttgggagtggaagaaccagtacaggagacaaaagtttaactcttgatgagggaaatatgtttccaaggttcttcagagaactcttcatcacctcctgttccaatgtttgttagttaattaactaataaaacactttatgtcatacgatcgtagtccctttcattagagggtctgaaagcaagctgttgcttaatcaagggcccagtcacagttgagttcagggatgctgaactcagtgatgcttcccagcccaagcaggaacaaagcaaatctgcccaataatttggaacatacagggaagtttgtgtattcccttgaaaacaggattgccatcactgacctagactcctgctgacagggcaggagacgcaacacaggtgttgaacactggggtggaaagaactcaggaagggaagggaggtggccatcctgcttcccctcgctgagaaccctctctctctgctccatgggctggacagggctgtcagggtgtaatgttagatccactgagcagtcctggcctgggagggagagacggcaccagtggatatttgactgggaacaaaggtggggacagtgccaacagtgactgtgcaggcccctggctgaggcaaatccctggggaacacattccactctgtgaccagcaaccctgtttcccttctccccttccagctcacttcccctccattatctccatccacatccattcccatactgaggccctgttctgtgccaggaactcatctaggagctaggggctcggggccagacgataaaaacaatcgttttcagaaccctacagtcatccctgaggggcagagtcctaaggacacagaacagggtcatcctcaaaaggcacagagcctgtgttaaagaagatgagactgtggtccagagatgagccatgggagtgaaactgctgctataggggctagataggggaaaacgcttcctctcaccccccacagcagtggacagacattgctgggagcgaggtgtcagctcaatctaagaactcccagagtcagagctgtccaaaaacaaaatgagttacacgggggtgtggcgggcttctagcccctggggttgttggagaaacaggctgaatagccaccttatgggcctgcttgacaaggtcccttccaggaccagtggtctgtgaatccgcaggggctggtccaccggaggggccagttctgggtggctcagtctgctgtgctctaacctgtggtgaggacgataaaaaggcctgatcaagaaagagtcatggaaaagagcctggtgatgagcgagctgcggactggacttgggagagggagggaagggagtgtacagggaccataacaaataccacacacgaggtggctttaagcaatggaaatgggctctccgttctgcaggcttgaagtccacatcaacctgcggcagagttggttccctctgtggggggaacctgtcgcggcctctgcgggcccaggaggtccttggctgggagatgtgtccctgccgccctcccgtctcctgcgctctctgcctagacgggttgtgcgacggcgggggtcgctgcccgtctgtccgtcggcttctccagcggtaaaaggaggtgaggcgattccaatgcagacattctatgatttcataataggcctctaaggaccactccaatgctggcagtccatgcttttataataggcagttcggctgtttacacgggcgaaatggaaagaggagatacccgttttcttcaagtcagctaacctctctgcggagtgacgtcacctcgagtctcagtctgctgatctaaaaaataaaaataacactacggcctcacaaggtggtgggacgagggtgctcgagagacgcgcgggtccgggaagcagcaagcccgggcgctctcccgcaggttctcagagacagctcccgcctcccagcgccgcgcgggggcggggcgagcagcccgggcgggacggagggggcggggcgaggaggtcggctttgttctcgccccgccctctccccgcctcctccctagatatcgcgagagggcgggtccgcttggcttcggcgtcgcgtcgctcctgcgctggagctctaggccggcgtctctccgcgagccgcgggtcaagtgccagtggctaagggtgcgcgagtagccgccacccgttcggcgttggctctggcgtcggggtcgttgtgt

SEQ ID NO: 31376 - DNA, 2300 bp, Homo sapien
tgtcttccaagaaaaaacctgagacccttcaagtctcaggtcttacttagcacatataccaggtcttacacaggacacatggttacaactgactgaaatctgggctgggtgtaggagctcacacctgtaatcccagcccttcaggaggctgaggcaggcagattgcctgagcccaggagttcgagaccagcccgggcaacatgacaaaaccccatctctacaaaaaatagtcaggcatggtggcatgcacctgtagtctcagctacttgggaggctgagatgagaggattgcttgaggttgagactgcagtgaagcatgatcatgccaccgcactccagcctaggcaacagagcaagatcttgtcgcaaaagaaagcaaaaacacaacataacacaacaacaacaacaacaacaacaacagcaaaaaagccaacttcttgaaatctggaaaggacacctggactgccctgagcatttgattgttgttggctctagcagtggatgcatccttcaacctctggcactctgcagggctcagactgttctgttctgtttgttacctgtggagtgcctgccagaccctgctctagctgctttaggtccatttaccctcatagacccccagtcttgttattcatatttcatatttgggaaatggaaacttagaaacttgccaagtccacagcatgagatcctgcctccggtgtctgctggattccagaaagtgccaggggccaacttagatgacaccatgttctctgcacaatcttaggaatgctcctagtctgatgtccccattgcaaaatttacattatcttttaacaaaacgtctttccaaggaggggcatttaaaataactgaggttcttcttgctaaggacgttcctgacacaagagataatttagcatttccttttcattaaaaagtttgaaatcctgtaatttgtgataatgtggatgaacctagaggatgttaagtgaaataagccacacacagatagacaaataccacgtgatctcactcttatgtggaatttttttttaaataagttgcttagccgggcatgatggcacacacctgtaatcctagctactcaggaggctgaggtgggaggatggcttgaactcagaaggtggaggtagcagtgagctgagactgtgccagtgcactccggtctgggtgacagaatgaaacccaatttaaaaaaaaaaaaaaagttgctatcttagaaaaagacagtagagcagtggttaccagagactggggaggaaagagaggaggtgagaatgggcagcagttgatcaacgggtacaaagttaccatgagataggagaaacaagtgctggtgctctgctccaagtagggtgacggtagttaataatgaattctgtatatataaatagctagaagagagggttttcaatatcattattatttcaaaagaaatgataaatgtttcagaggatggatatgtaattaccctgatttgatcattgcacaatgtatacatgtagcaaaacatcacattgtgtcccataaatatatacaattattatgtgaattaaataaaaaaaaattttaaagtcttatctaaatgaaatttctaaccagattctgaatccatgataccactgaaaccagcacacatgatcgcagtaaaacctcattatacttcctccactatcaccaataccctttattctctggaacatgaaacattctgttgtgctcatatcatgcaaattatcactagtaggagagcagagagtggaaatgttccaggtataaagacccacaagataaagaagctcagagtcgttagaaacaggagcagatgtacagggtttgcctgactcacactcaaggttgcataagcaagatttcaaaattaatcctattctggagacctcaacccaatgtacaatgttcctgactggaaaagaagaactatatttttctgattttttttttcaaatctttaccattagttgccctgtatctccgccttcactttctgcaggaaactttatttcctacttctgcatgccaagtttctacctctagatctgtttggttcagttgctgagaagcctgacataccaggactgcctgagacaagccacaagctggtgagttgtaggcattttttccattactttctgattcataggctcaacgcacctcaaagctggaaatgccgggtctgggtacaccctggggaactgcaaagcctgcacacttgggggaaatgatcaagatgagaggcaggggtggggatggcatgtgcaccaggagatgtt

SEQ ID NO: 31377 - DNA, 2300 bp, Homo sapien
aaagtgaataattaacattctccccatcctgttgacgatgctctgaaaatatggtccagaaatggtgtgagcaaggagacagcaaagcaatgcttggaacataggtgcagtgactagacatggggcagctgtttaaagacaaaaaggccccaaaaaggagggatggcacgaaacaccctccaatatgggcatggagtctagagtgacaaagtgatcaaaagttcatttcctatggggtgtccgaatgtacttaataataaaaagagaacaagagccatgcaaactgagagggacaaagtagaaagagtagcagacaccaagcaactaagtcacagcatgataagctgctagcttgttgtcattattgtatccagaacaacatttcatttaaatgctgaagaatttcccatgggtccccactttcttgtgaatccttgggctgaacccccctgtcctgagtggttactagaacacacctctggaccagaaacacaaaagtggagtaacacacactgcaaagctgtgcttccttgtttcagcctgtgaatcctcaccttgtttcccatctagcctatatttttcaaactaacttggccatagaatcatgtagtatttagggtggaagctgccccaggtctagcacgtcatttaacagatgaggaaatggaagcttgggcagtggaagtatcttgccgaggtcacacagcaagtcagcagcacagcgtgtgtgactccgagcctgctccgctagcccacattgccctctgggggtgagtatgtcttcacatcctccaataccctaatgacagacaaacagaacatggcaaagcctcagctctgcatggtgaaagtaagaaccagcaattgccacaaacagaaatacagtgttggtccggcagcctccgggggttctgcacaagtggattaccagtgaatacaaggctatctatctttcgaaaaaccaacgttgtatttatgctattttctataaaattttatattaatttatttgttacctatttttgaactctttcaaaagcacactttatatttccctgcttaaacagtcccccgagggtgggtgcccaaaaggctctacacttgttatcattccctctccaccacaggcatattgagtaagtttgtatttgggtttttttaaaacctccactctacagttaagaaaactaaggcacagagcttcaataatttggtcagagccaagtagcagtaatgaagctggaggttaaacccagcagcatgactgcagttcttaatcaatgccttttgaattgcacatatgggatgaactagaacattttctcgatgattcgctgtccttgttatgattatgttactgagctctgttgtagcacagacatatgtccctatatggggcggggttgggggtgtcttgatcgctgggctatttctatactgttctggcttttcccaagcagtcatttctttctattctccaagcaccagcaattagctttaccttttcagcttctagtttgctgaaactaatctgctatagacagagactccggtgaaccaattttattaggatttgatcaaataaactctctctgacaaaggactgctgaaagagtaactaagagtttgatgtttactgagtgcatagtatgtgctagatgctggccgtggatgcctcatagaatcctcccaacaactcatgaaatgactactgtcattcagcccaatacccagacgagaaagctgagggtaagacaggtttcaagcttggcagtctgactacagaggccactggcttagcccctgggttagtctgcctctgtaggattgggggcacgtaattttgctgtttggggtctcatttgccttcttagagatcacaagccaaagctttttattctagagccaaggtcacggaagcccagagggcatcttgtggctcgggagtagctctctgctgtcttctcagctctgctgacaatacttgagattttcagatgtcaccaaccaccaagagagcttgatatgactgtatatagtatagtcataaagaacctgaacttgaccatatacttatgtcatgtggaaaatttctcatagcttcagatagattatatctggagtgaagaatcctgccacctatgtatctggcatagtgtgagtcctcataaatgcttactggtttgaagggcaacaaaatagtgaacagagtgaaaatccccactaagatcctgggtccagaaaaagatgggaaacctgtttagctcacccgtgagcccatagttaaaactctttagaca

SEQ ID NO: 31378 - DNA, 2300 bp, Homo sapien
agaacatggcaaagcctcagctctgcatggtgaaagtaagaaccagcaattgccacaaacagaaatacagtgttggtccggcagcctccgggggttctgcacaagtggattaccagtgaatacaaggctatctatctttcgaaaaaccaacgttgtatttatgctattttctataaaattttatattaatttatttgttacctatttttgaactctttcaaaagcacactttatatttccctgcttaaacagtcccccgagggtgggtgcccaaaaggctctacacttgttatcattccctctccaccacaggcatattgagtaagtttgtatttgggtttttttaaaacctccactctacagttaagaaaactaaggcacagagcttcaataatttggtcagagccaagtagcagtaatgaagctggaggttaaacccagcagcatgactgcagttcttaatcaatgccttttgaattgcacatatgggatgaactagaacattttctcgatgattcgctgtccttgttatgattatgttactgagctctgttgtagcacagacatatgtccctatatggggcggggttgggggtgtcttgatcgctgggctatttctatactgttctggcttttcccaagcagtcatttctttctattctccaagcaccagcaattagctttaccttttcagcttctagtttgctgaaactaatctgctatagacagagactccggtgaaccaattttattaggatttgatcaaataaactctctctgacaaaggactgctgaaagagtaactaagagtttgatgtttactgagtgcatagtatgtgctagatgctggccgtggatgcctcatagaatcctcccaacaactcatgaaatgactactgtcattcagcccaatacccagacgagaaagctgagggtaagacaggtttcaagcttggcagtctgactacagaggccactggcttagcccctgggttagtctgcctctgtaggattgggggcacgtaattttgctgtttggggtctcatttgccttcttagagatcacaagccaaagctttttattctagagccaaggtcacggaagcccagagggcatcttgtggctcgggagtagctctctgctgtcttctcagctctgctgacaatacttgagattttcagatgtcaccaaccaccaagagagcttgatatgactgtatatagtatagtcataaagaacctgaacttgaccatatacttatgtcatgtggaaaatttctcatagcttcagatagattatatctggagtgaagaatcctgccacctatgtatctggcatagtgtgagtcctcataaatgcttactggtttgaagggcaacaaaatagtgaacagagtgaaaatccccactaagatcctgggtccagaaaaagatgggaaacctgtttagctcacccgtgagcccatagttaaaactctttagacaacaggttttttccgtttacagagaacaataatattgggtggtgagcatctgtgtgggggttggggtgggataggggatacggggagagtggagaaaaagggggcacagggttaatgtgaagtccaggatccccctctacatttaaagttggtttaagttggctttaattaatagcaactcttaagataatcagaattttcttaaccttttagccttactgttgaaaagccctgtgatcttgtacaaatcatttgcttcttggatagtaatttcttttactaaaatgtgggcttttgactagatgaatgtaaatgttcttctagctctgatatcctttattctttatattttctaacagattctgtgtagtgggatgagcagagaacaaaaacaaaataatccagtgagaaaagcccgtaaataaactttcagaccagagatctattctctagcttattttaagctcaacttaaaaggaagaactgttctctgattcttttcgccttcaatacacttaatgatttaactccaccctccttcaaaagaaacagcatttcctacttttatactgtctatatgattgatttgcacagctcatctggccagaagagctgagacatccgttcccctacaagaaactctccccggtaagtaacctctcagctgcttggcctgttagttagcttctgagatgagtaaaagactttacaggaaacccatagaagacatttggcaaacaccaagtgctcatacaattatcttaaaatataatctttaagataaggaaagggtcacagtttggaatgagtttcaga

SEQ ID NO: 31379 - DNA, 2300 bp, Homo sapien
caacaaaccccccaaaccacctgtgatctcacacagagggacagacatggttaaagtctggctaattctccattccagtatttctctgcacatctgcagatatgcatgcaacaataatgaagtgttgcagtatgtcgtttttaagcccttttcactaaacagcgtataatgggcattcttccacatgaatatttactcttggaaagcattaatttttttttttttaagagacagattcttgatctgtcacccaggctggagtgcagtggtgcgaccacatctcactgcagcctggaactcttgggctcaagtgatcctcccatctcagcttcccaagtagctggggctacaggcatacgccaccacacctgcataattattattattattattgtagcgacagggtctcgctttgttgcccaggctcgtctcgaactcctgggctcaagcaatcttcctgcttcggcctcccaaagtgctgggattacgggtgtgagccacagcactcggacgaaaacattttttaaacatgcttccaggatatcttttatgtgaatatggctcagtttagtcatgcccccattcctctttgtcccttactttgctattatcaataaccctgtggtgagcattcttgagtagaaatctttgtccacttctctatttttaatatagttgtaaaaatattactgggtcaaagaggaagtttcatactactgatgagtccatgatcctgtgttgtagcctggacttgttcattctggtggtgggccaatatgacgacttcagcttatgtgttggacaacttctgtgtagcgcttggagtggagtgctaatgagttcagattagatgaggccagctgttcccatctgtgtcctcagtcagtgagactgctccaggaaggtgtccccaaagtgccagggacacagaaaaggttttgctcagaggacagaggattagtgcaacctgtgcctggtctttccagttgaattgacagcccagaaagtaggcagggctgggagagaattagtggtgcacacggtgtttcctctggctgctcagtttgaatagtccatctctttctgctgtttcactggtcacctgacagaaaaccattctctcagagagctatatagacaggcaggacgggatgcagcctcactgtggtgctggagatctgctctgtctttgcagaaaggagaagctgatgccatgagtttggatggaggatatgtgtacactgcaggcaaatgtggtttggtgcctgtcctggcagagaactacagtaagtggagttagcatcctctggtatattccctctgggtcatgggagtggggctatgagtaatcccattcggtgaatgcaggtgaaacattatgatgaacagatacattcaaaagggagaatcagggaaagaagaaatgaaaggggccgtgttacccacaaagcctattgtgttgagaattaacaagggacaggttggttttatcttcttaattttccagaagatctcagtgaattataacatacaaacagaaaagtgcacataaatgtacaactcatggcacttcacacactgtacagtccatgctctcgggcccagaacaaacactgcaagtttcagaagccccttatgtcctcctgtcccccgcccccttactcctgcaagggaagcctctctcctggcttctaaggtcgcagatctaagtttgcctatgttttaaacttcatgttaaaggaattacacagcatgtgtttttttatgtctggtttctcttgctcatcgttatgcttttcatccacctaagtgtgtagttgtagactgttcagtctcgtcgctgtgtgagtctactgtgattattcatcatttgagtgtggatgggcatttgagtagtttccagttggtggctgtggtgaataatgcagctgtgaatctctgtgccatgtcttttgttgaacatatagacgcatttctcctgcatggaactgctgggacggtctctttggatttgattctgcatcattgagatttaagagtttgtggcttctcactacatctgaatggataatgatgtctggcttgtctttattctttcagaatcccaacaaagcagtgaccctgatcctaactgtgtggatagacctgtggaaggtgagttggcattagccactttcagggtcaaggataagttcttgttgctggaagaggaagtggcaggaactgtaaaaaaaacagaaagaattgcagccctagaagctatagggcttctaggagcaataattttaagggtgcaaata

SEQ ID NO: 31380 - DNA, 2300 bp, Homo sapien
ggtagctgatagggacctcaaaaggagtactaaaaacccagaaaacttcgtaactgggtccttgagccacttgctcaagcccatacccaccctatttcttaccttaataaatttccgcttttgatgcttcctccctctgttttgttcctttgttactttgtgcattttgttcaattctttgttgccaaggacctggacaactcacactcacggccttcgttctgggaacagaagtgcagttagatgtggatgcatgtgattggtgcttaaactcacagtgccccacaccaaaggagaaaaacacatagttacagcctgtgtgtccaaattaggtccagattaggtccaaggacaaatagcaaaacaagaagattgcctttaatcttttccctccacttctaaactctggaggacaaggctgtgaagagatctgaagacatggtgttctctgcttgtgtggccccaacattctttgtttgctgtctgatatttgaaaggaagaggaacctttgatagaggaggcagtcggacgctggttaggcagatagagagagggcctggggagaggaaaaacacgtgtgggaccgcacctgcaccacctctgtagctagcaggaagaaatgtggttaagaacttcctcttatgccaggatgttgctccaaagggactgtcccaacttagcacaggcgcaataaatcaacccaaatgtccttaacttgacccagctcattataaggtcattaacatgacattagcattgtggttttggctctcctcgtgtaagtttcgcttaggcactcatgggtaataaccaaaatggagtcactgtggccaatcccaggcatgcgcagatgcaacacccttagtgaggaactttacccctcccatttgggcagaacccacagaagacatacttgttcttgccacataaaagacccagacctcagcctcatttctggcaacctgctttcaggtcccctcttgcttctgagagctttccttttgcttaataaatcctactctgccttgctcactctctggtatccgtgtgcttcattctttttggtcgtggcacaagagtcccgacctggctgaaccgaggagaccaccacacctccaccaaacagcaactgggaaaccgtggtcttcacgtggatactctcagcttgcagcccctgctctctctaggggcactgtcccacccacccttgagcctgaggagaaaagttggtagagaggctggtcccttacttccagcagaaaagaggtgttcaggccctcacttccctaagggaagagagccctcatggctgcgctcaatgtggcagccacctgccatatgtagctactgggtacctggaatgtgactggtttgaagtaaaatgtgctgcaaacataaaatacacagtgagtttagaagaattagatcagaaatacataaaatacacagtgagtttagaagaattagatcagaaatatactttatttctaattatatatcaatcacatattaaaacaatattttgatacaatgagttaaaaattattacaaacaacttcactctttaaatattatttttgacgtggctaataaaaacgcaaaattcacaaattaatattttattttttaaaggattgcttccctcttaaaatctcaggtgtcctactcaaaagactagcggccagaagggttatgaaatctaaaatattaaaataattgtcattatatcacttccgtttgtgaaaaagtgtgtgtgcatgcatgtgtgcatgcgtgtgtgtgcgcgcgtgtgtgtgcgcgcgtgtgtgcacgtctgtgtgtaagtgtattttacaagtggacataaccttacacacaacaaggttaaaaaaaacacccctgggctgcgtcaggccaagccgggagagaaagccccgcctgaaagggcctggaggccccagcctgtcactcttgccacatcagtggagtgtatggttgcaaattctgttactcaaggcccgagggcggggattggagtaatatccaatcagagtgtcggaatgagaactgcccaatcaggcccgcagccagagaggaggggttggcttccgggatctggcgcggcgttttcctctggctcctgcgagggcttggtttagggcttcagctctctgcgttctcggctccgggaggcctcggtgattcagccacagcctctgcctcccgttgctctgtgacctgagggtattggacaatttgtagctaagactcccggataccctgaagtcgggaaatggtgagtgtgcggggcagggcgtcc

SEQ ID NO: 31381 - DNA, 2300 bp, Homo sapien
tcgcctacctcagagttagctgatcagggacaggggatatcacatccagatccaggatctgcagctccatcagggcagttccattttctgtttgcaccccagaaagtcagcctgagtctcctgcctggatcactatgggggcatcagcccagggtcactggggacactctcagcagcatcagtgagtatttgagacatttgaggatgtcctgtgcagactgggtcagtgtttcatatggacattagaaaaagagatgaaatagtcgtggtccctaccatcaaggaacttgcattctagagcacattaataaatgatggaattcagcgtcatgtattcagtacaaagatgaaaactgtacaggagacttaagcttcgtttgggttacttcccttttattgttttgtgagttttgataccaccacctgcatggctgtttatggacagaagagaagtcattatttgtattgtttttgccttgctaagaataaatatttaacttcaaatataattggtctggaaaaacaaaagggttttggttaaattccttgttattgtatgttatagatggggaagtggcaaaatagataaaaattacacaaactctgggaatcaaatttcttttgggcaggcttagaaaagacaaaactgaaactacttagtggcctagagagcagaagcctagggcccattttctgtcccaactttgcccagatcccccctctactgaaccttgtccaggtctgaccccacactgaaatacctcacagaactgcttagagaagatcagagtttggagtagctattcctactgcctctccagagctggtgctcccaatttcctgaaacacaaaagctgataaatggagaaaggcaatgtactttgaatttaatgtacttaaattattttatgtaaaattaaaaccagtatttctagagacatcccatccagcaacctgttctccatctttgcagtttcagtggatttttcacaagtctcaaagtaactataaacacaaaaataaaaaattcccgaattgtacttaaaactttcttctgtgtctctcccatttatctacattgagctattattctatatattttttaaaaatcaatgataggaaaacagaagaaaaaatagaaatgctgggccctgcatttaaatcctgggaagtatcacacactttgtacccacctcccaggatgctgtgagaattaacacacataatgtgagcttcccagcacagtgctctgtgacatactcctgagcacatagtacatgctccacaaatatcgcattaatgcatgtggatgtgctgtttttcaaatgcagacttactcagacattgccaccatctccagcctctgtaacctttaaagggcttgcagataatgccacgtttcaggatgttgattgctggtcttgtcttcggatgaaaagtatttgtgttgtgataagggtgttggggtaagggactctgcgtgctgtgtctgctttctctagctgagtggtactataacgggtctaggaggagcatgagcattaatgggagacttggctataaaaagctgattaatggacccttttcaaacctgcagaattttgttacttacagtgaggcctagaataccaaatttatgtgcacattgaagcttgagaggcaatgtttagctaagtgactctcagcccagtcttccagtaggatcacatggcagtttgaagagaaacagtcacctgttccctccccacagatcctgttaagtttcttgtgtgacattacagtgaggccagggtcaagcatgagggcttccagttactttaatgagacgtgagttcaccctttgttcaaggaggtcacaggacctgctttgcttggttttggtagggacagatcagtgtagcccatatttccattgcagcaacaaaaattgctggcatgccctcctttttcttcagaattatacaatactttagataacattactgtgttaaaagttattttatcagataattccagtcagccccataagtcacaactagttctctgatttcacttatagtcaaattaagaactctgtcacatgataaatatgtgttttcaggaactcgtaacattcagggatgtggccatagaattctcccctgaagagtggaaatgtctggaccctgcccagcagaatttgtatagagatgtgatgttggagaactacaggaacctggtctccctgggtgaggataacttcaatacataattcctaatacttcctcagagtttcattttctttctttgcagaatgtctc

SEQ ID NO: 31382 - DNA, 2300 bp, Homo sapien
tttgatgctaaagaatatttcattgtatgtataagccacatctttttaaatcattcatctattgaagggtgtttgagttttttcactttttggcttttgtaagtgatatagtttggatctgggtccccattcaaatctcatgtcaagttgcagtccctagtgttggaggtgggcctggtgggaggtgatgggatcgtagggttggcctctcacgaatggtttagcagcagcccctttggtactgtctttgccatagtgagtgacttcttctgagatctcatttttcaaaagcatgtggcaccttccctctcgtgctctcttgttcctgctcccaccatgtgagatgactctctgtcccttttctttctgccatgactggaagcttttcaaggcctcccctaaagcagaagctgctatgcttgccgtacagcctgcagaaccataagccaattaaacctctttttaaaataaattaccaagtctcaggaattttcttatagcactgcaagaataaactaatacagtgaatatggatgtgcaaatacttctttcaggtatacattgcatactttaaatagatgctcagaagtggaattactgggtcatacagtaactttatttttaatttttggaggaacctccatacatttttcaggtggctgcatcacgtttttcccaccaacagtgtacaagggtttcaatttctctacattgttgacaatatatattattttttgtttgcttgatattggccatcttaatacacagtaatacctcattgtggtttttctattacatatttctaaagattagaattttttttcaataattgtgtatttcatctttggagaaacattttcatctcttgtctattagtcatgtaactttttgttttttttttggagttgttctggatgttatcttctgtcaaatatatgtatattttggcttttctgctgcttaggtgggactcttactaaaactttaatgtggagagataaatttaatgtagtcctacttttctgtgcttttgaattttttgctcatgtgtttgatgttacatgcaagaaaacattgctgggatcaatgtcataatcttcctatattttcttctaaagattgtataattataattcttacgtttaaatatttaactcattcaagacagtttttgtatatggttcaggggaaggatccaacctcagttttttcatatggatatacagttttccaacaccatctattgaagagactgtctttctcttattgtgtggttatagcaaccttgttgaagatcatttgaacatatacacagtggtttgtttttgagttctgtgttctgttccatcatctatttgtcttcttgcaagtaccacactgtttttatttagctttgttatctgttctaaaaacaggaaacgttgtgcatgtaactttgttcttgttttctaagaatgtttgggctatcagtggtcctttgaaattccatgtaaaagttaagaattgtaaaaaatactttttcacaaagtattatttttattttcattaggcttacgttgaatttgaatatcactgtgtagtatggtcatttaacaatatcaaatcaactgacacagataagaatatgttcaagagtgtgttgagtttcacaggtttttggatttggcaattttgcttctgcttttgatttcccgttttattacaggtggtatgaaaggatgtgttgtataattcagtgttgtatgatgagaactacgctcaatactttgatgaccaaataatctgtacaacaaacctccatgacagaagtttgccagtataagaaacctgcacatatactctgatcttaaagtttaaaaaaaaagggtgggggggttgttttgcattctaacaggttgtccatgaaacaacagttactcattttcttctccacttaaccccgacacagtttagtcttctttctgtttctatgagtttaactactttaggtatcttacataagtggaattatatcgtttctgtccttttgtgcctgggcttcttccacataaataaagccttaaaaatgtatccttattgtggatttaacaaaattttctgcttttaagaagctgagtaatatttaattatttatatatttgaaattgtctttattcatttatttattaagaaaagttcttttcacttacttgcttttgtagataatgctaccgtgaatatggatgtgtaaattactcttcatttgataatatatgcaagggactatttgtgttctttattctgtttcactggtattttaa

SEQ ID NO: 31383 - DNA, 2300 bp, Homo sapien
tagacctggctgaactgaggagaccaccacatctctacaaaacagcaactgggagaccgtggtcttcacgtggacactctcagcttgcagcccctgctctctctaggggttctgtcccacccacccttgatcctgaggagaaaagttggtagagaggctgttccctcacttccagcagaaaagacgtgttcaggccctcaattccctgaggtcagaaccctcatgtctgcactcaatgtggcagccacctgccatatgtagctactgggtacctggaatgtggatggtttgaagtaaaatgtgctgcaaacaaaaaatgcacagtgagtttagaataattataccagaaatatactttacttctttttttttttttttttttttgagacggagtcttgctctgtcgctcaggttggagtgcagtggtgcaatctcggctcactgcaagctctgcctctcgggttcacgccattctcctgcctcagcctcctgagtagctgggactacaggtacccgccaccacgcctgggtaatttttttgtatttttaatagagacgggctttcaccatgttagccaggatggtctccatctcctgacctcgtgatccacccacctcagcctcccaaagtgctgggattacaggcgtgagccacagcgcctggcaaaatataggtattcctaattatgtgtctggagttggttccttccggtgggtttgtggtcttgctgaccaagaatgaagccacggacctttgtggtgagtgttacagcttttaaagatagcacgaacccaaagagtgagcagtagcaaggtttattttgaagagggaaataacaaagcttccacagcatcgaaggggaccccagttggttgccactgctggctggggtggtcagctttaattccacctcccatttccccttaattgtgccctcccgtgttccgtttttgtcctatcacagtgcccttttttcaatcctccctgcaattggctacttttaggatcctgctgattggtgcattttacagagtgctgattggtgcattttacaatccccttgctagctacagagcactgattggtgcgtttttacagagtgctgattggtacattttacaatcctcttgtaagacaggaaagttctccaagtccccagtttacccaggaagtccagctggcttcacctctcaattatatattgatcacatattaaaacaataatattttggatatagtaggctaaaattatcacaaacaatctcacttgtttttattattttcgatgtggctaataaaaaattgaaaattcactaatagctaacattttattttttagaggattacttccttcttaaaatctcacgtgtcctactcaaaagaccagaggccagaaaggttataaaacattaaaataattgtcattatattgtttccgtttgtgaacaagtttgtgtatgcacgcgtgcatgtgtacgtgtgtgtgcatgtgcgtgcatgcatgcgtgtgtgtataatttatattataaatggacctaaccttacataccacaaggttaaaaaaatgaccactgggctgtaccaagccaagcacagagataacaccccagcctgggccgggcgtggtggctcacgcctttaatcccagcattttgggagacataggcgaacagataccctgaggtcaggagttcaagaccagcctggccaacatggtgaaaccctgtctctgctaaaaatacagaaattggccgggtgtggtggtgggcacctgtaatcccagctacttgggaggctgaggagaatcgcttaaacccgggaggcagaggttgcagagagccgagttcgcgccactgcactccagcctgggcgagaagagccagactcaaaaaacaaacacaaaaaacctgcctcaaagtaccaggaggccagagcctgtcactctcgcctcattcagtgctgtgtatggttgcaacttctgtcactcaaggcctgaggcgggagacttacagctctatccaattagagcgctggattgacaactgccgaatgaggcgcgcagcagagaggagggtgcggcatccgggatctggcgcggcttttgcttgtagctccagccagagctcggttagggcctcatcgctctgctcccgctccttagggaagcctcggtgattctgccacagcctcagcctctgtggctctgtgacctgccggtattggatgattcgtatctaagactctgggacactcctgaagtcgggaaatggtgagtgtgcagggcagggcgtcccaaggc

SEQ ID NO: 31384 - DNA, 2300 bp, Homo sapien
tttcacaggtctctctgagtccctgagtgtgtacaactggccatggactgtggctgtgagggctagaactgagtcacaggactgcttcagggaacatagctgaggccgagatctgtaggcctgcctccaggtccatggctgggtgtgtctccttgcaggtctcttgataggaaggaccacttgtgtactgtagctgagaggagtttgagacaggttgcagaactgcttcagcatccttagtaagaccaagcttagtgtgccatgttttatctgcagccatgtctatgggctcttgagttggccacctgggtgaggccctgctttttccaaatatccctacttgatctttggctccactgaggtttcacaaccctagccaaaggcaagcacctttctacttgtgttttctgtgagtttactacttaagatatcttacctaagtggaatcatacactgtcactttattagtatcttatttcacttaaaataatggctttaagatttatccttattgtagcatctgacaagatattttcatttgaagctaaggaatatttcattgtatgtataagccacatctttttaaatcattcatctattgaagggtgtttgagttttttcactttttggcttttgtaagtgatatagtttggatctgggtccccattcaaatctcatgtcaagttgcagtccctagtgttggaggtgggcctggtgggaggtgatgggatggtagggttggcttctcatgaatggttaacaccatcccctttggtactgtctttggcatagtgagtttgttctcctgagatctcattttttaaaagcatgtggcacctctcctttcactgtctcttgctcctgctcccactatgtgaggtgactcactctttgtttgctttctaccataattggaagctttttgaggcctctctagaaacagaagctgctatgcttcctgtacagcctgcagaaccacgagccaattaaacctttttctaaaaaaaaaaattacctagtctcaggtatttatagcaatgcaagaataaactaatacagtgaatattgctgcagtaaacatggatgtgcaaatatttctgtcagatatactttgcatattttgaataggatgctcagaagtagaattagtgggtcatagaataacttcattttttttttggaggaacccctatacattttttaggggctgcatcactttcttcccaccagcagtgcacaagggtttcaattcatctacattgttgacatttgttattttttgtttgcttgatattggccattccaattaatacacgataatacctcattgtggttttgctttacatttttctaaagattaaaaattttttcaataattgtttgctgtgtgtatttattctttggagaaacattttcacctcctgttcatttgttaatcatattacttactctttgttgactttttggagtttattctgggtgttaacttctgtcaaatgtatactttttacttttttttttcttactcgggactgactaaatgtttattttaatgttcagagataaatttaatgtagtccatttttctgtgtttttaaatttgttactcatgtagttgatgctatatgcaagaaaacattgccaagaccaatgtcataatctttcttcctgtattttcttccaaaaattgtagagttatgcttcttacatttaaatatttaatttattcaagatagtttttgtatatggttcaggattttaaatttttatgagtacacagtagctttttgtatctatgggttacatgagatattttgatgtaggcatgaaatgcataaaaatcatatcagggtaaatgggtattcattacctcaagtgtttattctttgttttacagacaacctaactacattcttttagttatttaaaaatgtacaattaaattgcttttgactatagtcactctgtgtactagcaactgctacatcttactctttctaattatttttctacccattaatcttccccacttcccccagtcccctgctacactttccagcctctggtaacaatccttctgctctctgtctctatgaattagtttaattttagctccagcaaatgtgtgagaacatgcaacgtttgccttcatgtgcttggcttatttttcttaacataatgacctctagttccatccatgttgttgaagatgatgggatcttgttcttttttatgattgaaaagtactctgttatgtatgtgcaccacatttactttgtccattcatgtaagggacactt

SEQ ID NO: 31385 - DNA, 2300 bp, Homo sapien
aatgtaactctttagccccttgaaggaccaggaaacctggctgagtagtgtggtctatggaggtgcatgggcttcagagacaacgttgatcctgagtccaagccagctgcttagtagatgtgggagagttttatacttacctgcaagaaaagacaaaacaaaattgattgcaaaaacagaaattaaaaaaatttttcttattgtattcatattcttggaaatggcttttatagtggttcccatcaacagacagattctgtttcccaaaccttgaatcttccttatttgcacaggccgaagctgtgcatatgacagtgtgccagtttggggcccaggctcaaaaggtcttaaatgcttctgttatctttttcagaatttttccatgtccatgaaaacaagcccattttagctttctgtaggataaaatagcatgctgagaaaagccaaagtgcgccagtttacagacagctcactcccagaagcagagccacctaattcaccagcagctgaccactcacacctgaaggagccaaactgagcccagaagaatggcccagctaagcccagcctaaatttctaaccagctcaacccccgagagagaaggcagtcgaggctggttaggaaaatagggacggagggtctcgggagaggaaaagcacctgtgggactgcacctgccccgcccctgtagctagtgggaagaaatgtggttaagaacttcctcttatgccaggatgttgctcagatgggactatcccagcttagacataggcaaaataaatcaacctaaatttccttgtcttcacccagctcattgtaaagtcattaacatggtattagcattgtggttttagcttctcccctgtaagtttcccttaggcactcatgggtaataaccaaaatggagtcactgtggtcaaccccaggcatgcgcagatgcaacacccttggtggggaacttgacccgtcccatttgggtagaacccacagaagacttcctcgttcttgccacataaaagacccagaactcagccccatttctggcaacctgctttcaggtcccctcttgctgctgagagctttccttttgcttaataaatcctactctgctttctcactctctggtgtccatgtgcctcatttttccaggtcatgggacgagagcctgaacctggctgaactgaggagaccaccacaccagcaccaaagagcaactaggagaccgtgatattcacgtggacactctcagcttgcagcctctgctctctctaggggcactgtcccacccacccttgagcctgagaagaaaagttggtagagaggttgttccctcacttccaacagaaaagaggtgtccaggccctcaattccctgaggttagagccctcatggctgcactcaatgtggtggccacctgccatatgtagctactgagtacctggaatgtggctggtttgaagtaatatgtgctgcaaacaaaaaatgcacagtgagtttagaagaattagaccagaaatatactttatttctaattatatattgatcatgtattaaaacaataatattttggatacaataggttacaattatcataaacaatttcacttgtttatttttattagtttggatgtggccaatgaaaaattgtaaattcacaaatagccaacattttattttttagagacttgcttctctcttcaaatctcaggtgtcctactcaaaagaccagaggccagaaaggttatgagatctaaaattttaaaataattgtgattatattgtttccgtttgtgaacaagtgtgtctgtgtgtgcgtgcgcgtgcgtgcacaatttataaacggacgtaacctcacacaacagaagtttaaaaatgaacccccaacagagccaggcctagcacagaaagccctgcctgaaagtacctggagacacgagtctgtcagtcttgcctcattaagtgtatggtcgaatttctgtcactcgaattctgtcactcaaagcttgagggcgtagagctagtagttgtatccaatgagggcgctggactgagaactgcccaatcaggcaaaggagggggcggcatccgggatctggcgccgcttttgcgtcaggcttctgcctgagctcggttagggcctcaccgacctgcttccacccctcagggaggcctcagtgattcggccacagcctcagcctccgtcgctctgtgacctgcgggtattggatgattcgtagctaagactctacgacatccctgaagccgggaaatggtgagtgtgccgggcagggcgtccggag

SEQ ID NO: 31386 - DNA, 2300 bp, Homo sapien
tgtccaaagataaatatgaaacatttttgaaaatcattcaggactcaggaatgtatgaattataattatactctgatatacttattacaatcataaaatgacctgtagtagaaaaaattgtacatttaaaaataattgaagtgtataattagattgtgggtaatataaaagataaatgctggagaaaccccaactctactaaaaatacaaaattagccaggttgccaggcgcagtggctcacacctgtaatcccagcactttgggaggctgaggcaggcagatcacgaggtcaggagatcgagaccatcctggctaacacggtgaaaccccgtctctactaaaaatacaaaaaattagccaggcgaggtggcaggcgcctgtagtcccagctacttgggaggctgaggcaggagaatggtgtgaaccctggggggcggagtctgcagtgagccaagatcacgccactgcactccagcctgggtgacagcgagactccgtctggggggggggggggggaattagccaggcatggtggcacatgcctgtgatcccagctactcaggagactgatttaggagaattgcttgaacctgggaggtggaggttgcagtgagccaagatcgcaccattgcactctggcctgggcaacaagaacgaaactctgtcccaagaaaaagaaaaagaaaaaaaaaagataaatgcttaagataatgaataactcatttactctgtcatttatatattgtatgcctgtatcaaaataacccatatataccataaatatatacatagttatgtacccacaaaaactttttaaaaatttaaataagaataaaaatgcaacatgggaacaatattcagtttacttgctgtttaaagccattggaaaaatagactagaaatgtcattcagctatgttatcagatagtacattgttagcatctcttacctacacccttgagtaaggtggaataggtgaaagttggtggcataacacatcattcaaggcacaataatttctacacattaataattttatttaaaaaattaaggccaggcgcgatggctcacgcgtggaatcccagcactttgagaaactgaggcgggtagatcaccaggtcaggagctcaagaccagcctggtcaatatgctgaaaccctgtctctactaaaaatacaaaatgtggccaggcctggtggtgtgtgtctgtaatcccagctactcaggaggctgaggcaagagaatcacttgaacctgggaggcggaggttgcagtgagccaagattgtgccactgcactccaggctgggcaatagattgagactccgtctcaaaaaaaaaaaattaagttcacacatgatcttaaaagacaattttaaaatttacagcattttattattaaataaatgtacaattggtaaaacaatttactactaaaattcagattgtttctcacaataatgcaaaatgttactctgaacacctacttcatgcatcactctaagtcaaccacaaaaatcctctctgcttagattttcctcaggcatctttcatttgttttttctctttcatgtaaaagttcatgaatactgcccacctaatggaatttctcatatctctggtgcagcaataattcatcacatgctttcacataaatgagaaaactgaaatactataattttggatttgaattatttgcttttcaaaaaatctatactttttttcaagtaaaaaaatatactttgaacgaaatctcttcaaaaatctacttcttttcaacttatatacgcagaacctttttttttttttttgaggtggagtcttgctctgttgcccaggctggagtgcagtggcacgatctcggctcactgcaagctccgcctcccaggttcaagccattctcctgcctcagcctcctgagtacctgggactacaggcgcccgccaccacgcccagctaattttttgtatttttagtagagatggggtttcaccatgttggccaggatagtctcgatctcctgacctcgtgatccgcccgcctcggcctcccaaagtgctgggattacaggcgtgagccaccgtgcccggccaacaaagaaagtttctaacaggttgaactttggatttttttacacttaatactccgatttcttgtaaggtgttagttccttagttctttctccagtaaatcctctgatgtttacataggcttaattttagcctaaatatttctccacatttattgcatctacaaattctcttctaatataaactctctagtgtttcttaacctgcagt

SEQ ID NO: 31387 - DNA, 2300 bp, Homo sapien
taccaggactgggccccagccaaggatttgacatcaccttatttgcctactatagggatgaactaggtggtcaagtggccgtattatttcactgtattaatacaaatacaccttccagccctgggaagcagcatacaattgccaagagacgttagaatgctgctggaggattccagggtctcacagtctggattttagagtcctgaattttagacttttcaaggacatgtgctcctctggggttcaggcataatagactatatttaccgatggtgactgtgtgcatgacgccataacatgttacactattaactcacttaagggactccatgaggcaggtactgctatcttcactttacagaggacactgagcacaggcaagtaacttccccatggtcacacagctggaaatagcagagcagctgggatgtgcacccagagtctgtgtacttagccacagtgcaatcctgcataactacaaaacaaacttatgtgtgtgagcatctatccgcccaagcagacaagtgtcaaactacgcgaatgctgtccaagcactgcgtgagcatacacttctctgaaagcgttctgctcatcaacagggccagccagtgacttttctgatcgcttaatgcacctatccagtctcttcacaggcggctcctggggtctgccgggggtgctggcgtcgggttggccctggcgctgtccccagcccccactccccaggccctgcagcgccatgaggtcggactcctgggcgtgtcctgggttctgacccacccgcgacgccagctgcccgcgcccggagcggatgggcctggcccggctccaccccgcggggctccgcggctcaacgggtcgcccaggggcgcgggcccggcttcgtcctcgacggtgtccgccccggccctggctaggccgacggcagccgggtccgggtggggctcgggctcggggcgcgcccctcccatctctccagggtccgcgtcctcgctgccgccaggtcccgccgagatccccggtggccccggctccagcggctgcagcgtcgccatcgccgggcagaccccggccgacctcaaagcgaccgcgcggtggggccggcggggactggggctgcgcagcgcggcctggggtgggggcggcggggcccccaggagctcctgggaaccgagggtcctggggcggtcccgccccgcacagctccgggtgagcttggggagggagacacactctcagcccacctcgccccgcccgacagcgctccgagtcctgagtcccctcacccccattctacagacacgaaggtgaagccaaagacgggacgctcacttcctgagaatttgctgcctgctgcgtggacaccaccgacctattgtttacagcggtcagggacccgccccccagacccccaggaccgcgcttccgggggaggagggtgtcctcagcaacggtgacccgcaccaaagccctcctcaccggggtcaccgccacagccggtgcgaggcccgcagggcgctggggatgcgcgaccgactcccgtgaacctgctcctcgcgcgtcagggagagctgtgcacccaactaggctctgtgaggacggactgaggtcggcctgcaggctgcggccccgaaggcaggatttgtggagagatgattcgcgagccttggaggaaggatgggctgtgcgtgcgtgggtgcgtgcgtgtgtgtgtgtgtgtgtctgtgacttttgtatgtttatgtgagactgcgtacgtgcgcgcgtctgtgtgtgcgcgcgcgcgtatatgtctgtgtgtgtgcgtgcgtgtataatttctaaatggacgtcaccttacacatcacaaggttaaaaaatgacccctgggctgtgccaggccaagcacgaagagaaagccccgcctgaaactgcctggaggccccccggctgtcactctcgccacattccgtggagtatgtggttgcaacttctgtcactcaaggtctgatggcggggagattggagccgtatccaatcagcgcactggagtgaaaactgcccaatcaggcacgcagccagagaggaggcggtggcttccgggatgtggcgcgggtctttgcgtctggctactaccagaccgcgggttaggggcttcatctctctgcgttctcagttgtgggaggccttggtgattcggccacagctcagcctccgtcgctctgtgacctgcgggtattggatgattggtagctaagactcccgaatacttcagaagtggggaaatggtgagtgtgcggggcagggcgtcccaaggctga

SEQ ID NO: 31388 - DNA, 2300 bp, Homo sapien
agtagtatcaaggagaagggttttctggaaggaatgaaagacttgaaacttattgcataatccatactggcttggtcaataccatgagttggattgactgcaagaagggtgactgaagcagaattcagtggtatcattttggatgaatggtccaggagttaaaatatttaaagggcccagagaatctcatttggtattgggaatatttcatgaaagtaaaaaaaagtttgagaagtatcaataatggtgctgtttgtgttgcattgtgctcagtcaaatacacccacatggattctggaatttatggtagcatagatgtatagaggaatcaggtcaataagggtaacgggagaacaaggggcttaaaacggtgggggtgggcttaagaaaatctttaaaggctgctttagcttgtgttagaaatagcacgttagtagggggaagctttggtatagtgaggtctcggtggtagttgaagctatattgggactaagaggttggccattcttgtactatgaccaagtaggacattcctaccctgaatgaagaggaattcatgcatagctaacaggttgaggcataggaagaattggtagactttagtagttgtggagctgcctatagagtgctaaaaaaaggttgttgacaattagtgcatatgaaggtgattttagccagaagtatgagtaatgaccatagagcattaggttgcatagttccacagaaagtagattaggaccaaagtgagatgcttgctgattaagagatactgtgaacacaatgagtattagagagagagatcaatactcagattatgactttgaggtttaaatctaggaggggcatagcaaacacttccctgtagagggtgatggtttacagtaaaaaaaaatattagtaagtctgcaaagagtattatgacttgtaatataaaggccaaaatattactaacaattgctgatgaactaaggcagtcaaaagtaaaataactaaataattaggctaaaaaaattcatattagataaagctagctttttttttttgagacggagtctggctctgtcacccagcctggagagcagtgacgccatctcaactaacaagaagctccgtctcctgggttcacgccattctcctgcctcagcctcccgagtagctgggactacaggcgccccccaccacgcccggctaatttttgtattttgaatagagacggggtttcaccgtgttagccaggatggtctcgatctccggacctcgtgatccacccgccccggcctcccaaagtgctaggattacaggcgtgagccactgcgcccggccaacattttattcatttatttgtttattttttgagacggagtctcactctgtcgcccaggctggagtgcagtggcgcgatctcagctcactgcaacctccaccccccaggttcaagcgattctcctgtctcagcttcatgagtagctgggattacaggcgcccaccaccatgcctggctaatttttatattttttagtagagacggggtttcaccatcttggccaggctggtcttgaactcctcaccccgtgatccccccacctcggcctcccaaagctttgggattactggcgtgagcaaccgtgctcagcctaacattttattttttagaggtttgctttcctcttcaaatctcaggtgtcctactcaaaacaccacaggccagaaaggttatgaaatgtaaaatattaaaataattgtcactatattgtttccatttgtgaacaagtgtgtctgtgtgtgtgcgcgcgcgcgtgcacaatttataaattgacgtaacgttacacaccagaaggttaaaatgaaccctgtgcagagccaagcctagcacagagattaagcgccgcctgaaagtgcctggaggtactagtctgtcactcttgcctcattcagtgcattgtatggtcacaatttctgtcattcaaagcctgagggcgtgaagcctggacccatatccaatcagagcgcttgactgagaactgcccaatcaggcgcgcagtctgagaggagggggcggcatccgggatcttcggcggccttggcctgttgcttcagcctgagctcggttagggcctcacttccctgcttccacacctcagggaggcctcggtgattttgccagagcctcagcctccatcgctctgtaacctgcgggtattggatgattcgtagctaagacttcgcgacacccttgaagctgagaaatggtgagtgtgcggggcagggcgtcccaaggctggggaggcctcatcagaacc

SEQ ID NO: 31389 - DNA, 2300 bp, Homo sapien
tcttacctagtgatggggctcaagctgaagacggctatctgtcgatgcagaagcaggcaggcttgccttccttgatgaagcgagtgggaactcccaaaaaaggagttttttaacagcaaataaacctcagaccccccaccgaaaaacgttggaagatcagggatccctggaggaacaaggtcccagatttcagcaatcatcctaccagtttgggcaataaggtgccaagccaataccgaggatcaataggcgaactgctgcaggccgggttaccttcactgaggatctctcagtgcttatcaatgtcaatcgagaaaaatgacaagtcttaatcatttcaggaggcttatttcccaaagttaaggacgcccatgacacagcctccggagatcctgacgacgtgggtccaaggtggtcggggcacagcttggttgtattcattttagggagtcacgagatatcaatcatatgtataataacaggccggacagggcgcggtgtctcacgcctgtaatcccagctctttgggagacagaggcgggcggatcacgaggtcaggagattgagaccatcctggctaacatggtgaaacccgtcactactaaaaaatacaaaaaaaaaaaaaaaatttgacgggcgtggcggcgggcgcctgtagtcccagctacacgggaggctgcggtaggaaaatggcgtgaacccgggaggcggagcttgcagtgagcggagatggtgccactgcactccaggctgggcgacagagcgagactccgtctcaaaaacaaaccaacaaaaaaaaaacaggccgggcgcggtggctcatgcctgtaaatcccagcactctgggaggccgaggcgggcggatcacgaggtcaggagttcaagaacagcctgaccaacatggtgaaaccccgtctcaactaaaaatacaaaaattagccgtgcgtggtggcacgcacctgtaatcccagctactcaggaggctgaggcaggagaattgcttgaacccgggaggcagaggttgcagtgatctgagatcacgccactgcattccagcctgggcgacagagtgagatttcatctgaaaagaaaaagaaaaaaaaaaaaaaaaaaaaaaaaagaaggacattggttctgtccagaaaggcgggggcaacttggaacagggagggggcttccaggtcacaggtaggtgacagacaaatggttgcagtttctgggtttctgataagcctctccaaaggaggctatcaatatgcatttatctcagtgagcagaggaatgactttgaatagaatgggaggcaggtttgtcctgagcagttccgagcttgtcttttcccttagtttagtaattttggggccccaagattttcctttcagaaaaaagaaaatgtggtatatatacacaatggagtactattcagctctaataaaagaatgaaaccctatcatttgccacaacacggataaacctgaggatatcatgtaagcaaaataagacacagaaagacaaatacctcatgatctcactcatgtggcatctttaaaacgaagttaatcattaagatatttaccagttgtctgaggtattgggttgaattttctttttttttttttttttgagacgcagtctcgctctgttgccaggcagaagtgcagtggcgcgatctcggctcactgcaacctccgcctcccaggttcaagcgattctcctgcctcggcctcccgagtagctgggacgacaggcacccgccatcacgccccgctaattttttgtatttttagttgagacggggtttcaccatgttggccaggatagtctcgatctcctgacctcgtgatccgcccgcctcggcctcccaaagtactgggattaaaggcgtgagccactgcaccctgccttccaaattaaaaactttttaaaacctcgtacctcgccgtgggcggcgaccgtcgcggactcgccgggaagacggccccacggagccgggaacaccgcccgctgttcgtatgtccgaggtgacgccccgctgtggcgggctggcggaagtgacgcgctgctgtggcgcgccggcggacgtgacgccactgtcgctgcgacgataaggcctggcgttattgcttagaggcggctacctggagccggaagcgcggctgcagcagggcgaggctccaggtggggtcggttccgcatccagcctagcgtgtccacgatgcggctgggctccgggactttcgctacctgttgcgtagcgatcgaggtgctagggatcgcggtcttccttcggggattcttcc

SEQ ID NO: 31390 - DNA, 2300 bp, Homo sapien
actattttttccccaattgcatacccattgaagtatcaccacatagtcgttgctcaaaagttttgagccaatcaataaaggcttacttttttctttacccacggttcttgggaaatgcactatgtacttcaaagctgctgtcagtaggctggacacctgaaggatatggtggaaacagtggtaattgttgaggccggaacatactgatttgatcattatgtatactggtggataattttggagaagtcacatttaacttatctgagtttgctttcctatctataaagtctagagactgaactagattaactctaaaggctccttctaagattgtaaatgacccagtgacgattaaagaagaaagcaggtcaccaagaatggcatatcttggggtaggttagcctggatgatcttgctctaaatcttttatatttgccatgaagcatgagctttggctacttgacatggggcacaaatgatgggtctcagttccatcccgtgtgaggctccttcaacattctattgccccagccaactgacagcacaaaatttccactttcttaaaattgcaactccaagcgaaagactacagagaccccctctaaatcttcaaaacagccaaaccatgattcataaaacattaaggcaaacttaccttgattcgaggcatagtaactgtaggtggctttgcttcagccacaaaactgtgagatgctcctttttccacaaggtaagttgtgtagggcataaatttcacaccctttgacccaaacacaaaatcatctctcaaggcatctatcagaacaataacaactttactgaagagaggtggtggcagcgtggtccagttagaactggctcctaagtgtttgaaagaaaaaaaaggaaattgaactctaaactttccttagcatcaagcaccttcacaatctagcttctacctacttctccagcacataccctgcgatatctacataacccaacccaaaaggaggcgacttgtacttggtaggtagtgctggggggaaaggacgggggttaacaggagtaatcttagggacccacagtagcaagcagtgaattatcctcagtatggtgaagagtactggggtaggagaatccctacgtaagggtcctggaatgggacatttagggagcttgacctaaaacgcagagctgcagctacgggatggctgggcgtttacatactgcgtttacatggtcagcggctggcgatgtgtgcaagtggtccagaaccagggcgcctttacttgctgtatatggctgggtaggtgaagcctaggaagaggcctaacgcagagaggccttagcccctaggcagggaaaacatcttggaggaatataagagaccaaaacgcgaggggatcggcaggggtcttatctgttgtgtgctagggggcaaaaagggcgcctataacggggagtgacccaaaggctgctcaggaaaggggcgggagctctggacgagtagaagtggagaggctggatcccaggtatggacacagcttactttgtggtgatcaggaaggaaggtcgaagtggggccagtagaggtggttgccacaaagttgtaagaatacagaaaagagacgctggagcggttaaaaaaaatttctgaggtggggaccataatggaagagaccaccggggagcgccgagaagaaatccgagcagcgaggctcagaaaaaaggtcttctaggggatgtggggtcaggggagcggagacgccggggaggggtccgtaccagccgagggttcgggcgctgggggctccgctccgtgttccgctctggcagaggaacgaacgggagccgggaagaatccccgaaggaagaccgcgatccctagcacctcgatcgctacgcaacaggtagcgaaagtcccggagcccagccgcatcgtggacacgctaggctggatgcggaaccgaccccacctggagcctcgccctgctgcagccgcgcttccggctccaggtagccgcctctaagcaataacgccaggccttatcgtcgcagcgacagtggcgtcacgtccgccggcgcgccacagcagcgcgtcacttccgccagcccgccacagcggggcgtcacctcggacatacgaacagcgggcggtgttcccggctccgtggggccgtcttcccggcgagtccgcgacggtcgccgcccacggcgaggtacgaggttttaaaaagtttttaatttggaaggcagggtgcagtggctcacgcctttaatcccagtactttgggaggccgaggcgggcggatcacgag

SEQ ID NO: 31391 - DNA, 2300 bp, Homo sapien
cagcttcatcatcctgctggttactttaacgctgggtactgtcctgtctttaattaactgccctttgcccttagttacctcatgacaacttgggatctatttaacttgcccatttgctcaccttcagttatgcccattaagcccagcagtgatcccacagaaaaatatttttgtcagaagaacccttgctcatttaaattatctgtagaatatattcgatccatagcccagaaacataaaaacaatattagcaaaagtttaatccaatgctaatgttcatttatttattatagacgtggggtcttgctatgttgcccaggtgggtcctgaactcttggcctcaagcagtcttcccgcttcagcctcctcaagtgttgagatgaaaggcatgagctgctgtgtccagcctatttatttatttttaatgacatagattttgttgtgtttcaactcccccaaatcctgtaacctgaataaacccctagattttaagatgactgttgcgttttccccggggagtgaagatccagggaaattaggtgagttgtttatacgtgtgtttccccttcaaaggtggataataatgtcacgaggcatttggataaagtattaaaaagaggagattgggacatattaatcctccactacctggggctggaccacattggccacatttcagggcccaacagccccctgattgggcagaagctgagcgagatggacagcgtgctgatgaagatccacacctcactgcagtcgaaggtgaggctcgccgtcgctcactgtctgctgatgtggtttcacgtggatgttccctagaataaatgcaaccgcctgagttattcagggtgcctgtgtgaatgtccaccatcagtctgctagccaggggccgcatgccacacgggcagcactgtctcagtgtccactgcactgactccgtcttccagcagccctgcagaacagcagctctcactcctacccgtgtatgcattcattcaactaatacctcctgaagaccttttgtgccactctctctgttctgtatcactctctctgttctgtgccactctgttctgtgtcactttctgttctgtgtcactctctgttctgtgtcactctctcttctgtgtcactctctgttctgtgtcactctctctgctctgtgccactgtctctgttctgtgtcactctgtctgttctgtgtctctgtttctgttctatgtcactttttgtccatgcatttgggtgcatcagtgaaacagtcgataatccctcgtgaagctcacgctctagccaggagagatgagaaagatgagtaaataagtatgtgaggaggtgatgggtgctgcagaaactcagagggcaggaggaggggctttcaacagcgtgttgagagaagccttccctgaagacgtgtgcagggtgagcagagacttgaagggagggaggggcagaccatgtggtctgtgcacgagtgttccaggaggaccagcagcgagggtcaggcacagcctgcctggcttgtcccggagcagcaaaggatgtgtggctgcaaccccaggggcagagaagcctggtgggtgcccccacatggctcagagctcttgccttttgctgtgtgttgtgttctcaccagagtcctgtgaaagattccatttgacagatgaggcgaccaaggcacagagtagaatgcgtccagagtctcacagcttggcagtggcaaagacagaaaccagatacaaaccgtctgccatcagagggcagaaatgcagcctgctgtgctccatgagctgtgtacaattctgtgaacttcatttatggcattatttgactgtgaccctgtgatctggctatgagctcataggaaaaaaaaatctaattcattgagaaagagctacaactctataaagtaaagctaaaaccgaaaattgtcttcttaagatgatgtgctctcttcagtctgaacgcagttgaaatgtttttcctttgccttaaaggagagagagacgcctttacccaatttgctggttctttgtggtgaccatggcatgtctgaaacaggaagtcacggggcctcctccaccgaggaggtgaatacacctctgattttaatcagttctgcgtttgaaaggaaacccggtgagaatttaggaatgttaacagttggaaattgtattacatttgttttctatagtctggttttaattttgaaaacctattttttagaagctccataaggttgaagtccccaagcaatgtgagcatgaaaagtaattgggcaaaaggcttttgggatctga

SEQ ID NO: 31392 - DNA, 2300 bp, Homo sapien
gactacagtatggaaaattctggatgtagaacggtagtcacagtcgtataataaacccccaagtccagcttcaccagttactggccaattacagccaatcttctttcatccgtgcccacactcatttcccttctcctttattatttggaagcagacctctaaaaggtacgtgctctttacccccataatcttgatacccttatcacatttaaaaaatagtgttaattccttaatatcactgagtagtgttcatatctctaatatctgtttctctctctttaggtgtttcagcttgtttgaatcaggctacaaataagaccatacactgtgatttgtttatgtgtctcttaagtctctgtaaatctgtaggtccccagccccaaaactctttgctttactacagtttactcgtgcacatttccttcttgagacctacagtcagcgatttctccaggatgccctgcttctttttagtggaaggtggtatttcaagatcactgtctcagagctaccagtgctagctctgagtggttggtcattgtttctagacagaaagaagaaattgttttaagataaaatgatcttgtgtttgtatcgattcaccttcaaaactgtaaaatgacttcttaggtcttacatctgtactttcttcttcctaagtttagaatcttggttgtcagcaactccagatatgatagaattagcatatcacataatgactcattggctttatcccgcaatagacacgcaacagtctcagaataacaatgccagtgctgccactaccagtatgagggtcaaaagcaatttaaggtgggtttgtttttgtctttgtgttttattttttgtgtcagctcaaagcacttaatgtaagaaaatactagaagaaagaagtactggaagaaaacggccacactggagtggaaggttctttctaagcatgacctagaagccgtcattagagagttggccaagacctgattaataaatttgaccaaattaaaaactcgctacaaaaaacttaccacaatcaaagtaaaacctccccagactcacacctgagtatctaaagacacctcacgcaccacctatcctgagtagccgtccctgtggcctcttggcgccctgccggtgtacgttgaattccagggtgtggagctgtttgctgtctttacagatgaaaacacttcgaccaagttgagtttctgctccgaaatcatagtggatggtggcagagcagtggcctaggcccatggtgctgacatcacagccattcttgcaaggagatggtaggatagccactcactgttcaggcttgagctttagccagcaggcagatgtccagcttgtccaagttgattagagcacccggcccagctgaacctgcctcattctgcgctcccctatagaagcacccacagctgcccaggagccgtgaagggtttattttctccatgagcaacagcatgtgtgctcgtagagggcagagcatgggatgctccaaatccagaggggccgggctgtcagcgatcccagcctcacttcattctccggttggctgttgaccttgccaaagtgacagtccctccgtgtctgcgggaccacctgcttcctctgtgttcagcccatgctccgtagcccttactgtatggaattcctcacatgagcctctctcgcagcctgttgcaggctactgaaggaaagacaccgtccctggcatagaatgggttcggtaactatcaacacagcaagcacaggaggtgattcctgtacgattctgtgttgagtggtgtgaagagacggatcatttggctcatgttagttgtagaaggtctaattcaagaatgagtaccatcttacactttctagaagtctgttacttaaaatgttttctttcttctaggtgatatccgacatccaaagcacgtccaacagacggatgtggctgcgacactggcgatagcacttggcttaccgattccaaaagacagtgtagggagcctcctattcccagttgtggaaggaagaccaatgagagagcagttgagatttttacatttgaatacagtgcagcttagtaaactgttgcaagagaatgtgccgtcatatgaaaaaggtcagtcaactcaccgtttcgagctctgtcagagctgtgtgtttccactgagctcgggtttctccgatgtgtttctgtggtatgcagtttgtcacaggagtattttttcatcactactctttgatgatacagattgtgtttctgttttcttagaactttgaactatcaccattggcagcaccct

SEQ ID NO: 31393 - DNA, 2300 bp, Homo sapien
tcccatcagcttgatgctcttcctgcagttttttgcctggcgaattcctgggtaccgtttacatttcagcgtaaacatcagaccttcctggtccagcgcccactcccaatccaaaatcagttcctccccattaccaaaaatccctcattgataccctctacttttccttcctgggaaacttgtaattacagctgtaatgcagtcacagtttgtaattacgcttgtgtgcgtgcgtgcgtgtctgtgagccctactggatccaagccccagcaggcaaggattgcacctgcttgctcgccatgctgtgtctcccctggcacagcgcctggcacagtgcctggcacgtcgtccacgctccatggatatttgtttcgatgcatgcacaggtgcacccccatagctttgtgactctctgataggcggtggggtgtggacacaggcgtccccccatccagggtggtaggtgtagcaatgaaggatgccagccctggaaccagactgcctgagtttcatttgcagcttttacccactggcactgtggcccaggtgcgtgactcaccctctgtgtctcagttgcctcctctggataacagttctgatgctcatccctgcctcatagggtcattagggaggtgaaacgagcgagccgcctagtgttgctggctactggcacttagtgcagagcacctggtgccggcagcagtggggtgggcctgcaggcgtgtgggttcatgcttagggacttggtgcctgcagcagtggggtgggcctgcaggcgtgtgggttcacgctcagggacctggtgccggcagcagtggggtgggcctgcaggcgtgtgggttcatgcttagggacttggtgcctgcagcagtggggtgggcctgcaggcgtgtgggttcacgctcagggacctggtgccggcagcagtggggtgggcctgcaggcgtgtgggttcatgcttagggacttggtgcctgcagcagtcgggtgtgcttgcaggcgtgtgggttcacgctcagggacctggtgccggcagcagtggggcgggcctgcaggcgtatgagttcatgctcagggacttgtgccacagcaccctggacctcagtggcttgagcgcctgtggcagctctttcactgctgtgatagcaggcctggggcatgcagagccacagggtggggcgagcctgccaagaggcacagctgagacccttcttggcatggctcttctggagtaggaagctcatgtcaaataccgagggggtctcaggaaggaagttgttgctttgcagaccagtctaatcacaagtgagtgtggtcccggcagaggctcacgcatcagccagctcgggaaagaaagaacatcagctgtgccgtgagcagcatggcactgtggtttaaaagaggttgccatagcagaggggcagggctccatccagaggcagggcatccatgcgcccagcagagctcacccttgtgagcagagagggctggaagctctctttccaaagaggttgtaaggaagtaacccaggctgcagaacgggggacgttagaggtcgggaagggccagtctgcactggggaagtgggtgtggcagagaagggtcaggccgctgcctgcccagtccccatacagtgctgtaagggttagaaagactctaaaacctgactgttgacataatgcatttcaggattgtttttatattgcacgttgacaagaaggagagagtggaaagagacagaacagggagaaggaagtaagagcgatgagggaggcagagaaggaggccaggcagcacaggggtcagtcactgccatccgcgggtgtatgccaaggaccaaggcctgcatcgccagagggcagatggatgcacattggcagctttcccagctttacagaaggcgttgcagaccccccacccaaaggaatgattgatcttcattaagcgtcagttgtgaaaagtgaaggctttgccgtgtgccatgcataaccgaatactttgagattatgtatataaatgtatgttcacggtgtgtgtgcgcgcctgtaacctttctgtcttcttaatagatcctgggtttgagcagtttaaaatgtcagaaagattgcatgggaactggatcagactgtacttggaggaaaagcattcagaagtcctattcaacctgggctccaaggttctcaggcagtacctggatgctctgaagacgctgagcttgtccctgagtgcacaagtggcccagtacgacatctattcgatgatggtggggactgtcgtggttttggaggtacagatgctca

SEQ ID NO: 31394 - DNA, 2300 bp, Homo sapien
actcagtattgctgcaggtgataaaaaaaaatcatgccatgcattttggggcagttaattaggaatcatcttttcctgagcttgcttttctgtttttactgtgtggacagctgacacgagagcgggagctgggcttatttttaagtgggtttctccaagcccagcagtctgtggatgctgctgtttctctgttccaggttctcaccctgctcctgctcagcgtcccacaggcactgcgcagaaaggctgagctggaagtcccactgtcatctcctgggttttctctgctcttttatttggtgatcctggttctttcggccgttcacgtcattgtgtgcacctcagctgaaagttcgtgctacttctgtggcctctcgtggctggcggcaggtggggtgatggtgctggcctcggcgctgctgtgtgtgattgtgtctgttctgaccaacgtgctcgtgggtggaaacaccccaaggaaggtacgtacggctggttcctgggagtgtgacgtagtccttctgctcaggttgttcttgttatttcaggctgcctttcgtttaccagactctggttgaacacctggtgtgtgccacgtgctggcagtgccctggacagggggcctcagggaaggacgtggagcagccttatcccaggcctctgggtgtcccgacacaggtgttcacatctgtgctgtcaggtcagatgcctcagttcttggaaagctaggttcctgcgactgttaccaaggtgattgtaaagagctggcggtcacagaggaacaagcccccccgctgagggggtgtgtgaatcggacagcctcccagcagaggtgtgggagctgcagctgagggaagaagagacaatcggcctggacactcaggagggtcaaaaggagacttggtcgcaccactcatcctgccacccccagaatgcatcctgcctcatcaggtccagatttctttccaaggcggacgttttctgttggaattcttagtccttggcctcggacaccttcattcgttagctggggagtggtggtgaggcagtgaggaagaggcggatggtcacactcagatccacagagcccaggatcaagggacccactgcagtggcagcaggactgttgggcccccaccccaaccctgcgcagccctcatcccctcttggcttgagccgtcagaggccctgtgctgagtgtctgaccgagacactcacagctttgtcatcagggcacaggcttcctcggagccaggatgatctgtgccacgcttgcacctcgggcccatctgggctcatgctctctctcctgctattgaattagtacctagctgcacgcagtatgtagttaccaaaagaataaacggcaataattgagtcctcatctttacttttgactgctttaagttagtatatttaagagacagtactgtgatgccaactttgtcatttcaacagaattaaccattttagtggaaacgttctggatttctagaatattcctggagaaatttgaggtctggtttggtgggatgtattgttgaggttctttggtttcaagaagcaggcactggcgacgtgcatctgaagacctaagctcttccagagcctggaagcgggagcgtggagggccgggtccaggagcctttgggcaagctctctgggctgcaccactgcccagagggttctgaccattttcagtctttgtcactcaccttgggacttggagtccagtgtgagaacagctggctggccgtgcagtgtccggctcccctgcctgggctgagggcgtctccactcctgcaggctgcgtcccaagaggaaggttcctgccgttggagcagaagggggctgttccagagtaggggcccaggtgctgggtgtgaggaacaatggtgtgtgtccagggcattctctgctgtgagcaaggacttgacatgcagcaagatgtgtgtcgttatcagaccgtctcttacaaagtgcactttccttttcacagaaccccatgcatcccagctcaaggtggtcagagctagaccttcttattctgttggggacggcgggccacgtcttgagcctgggcgccagcagcttcgtggaggaggagcaccagacctggtacttccttgtgaacaccctgtgtctagctctgagccaagaaacctacagaaactactttctgggagatgacggtgagcctccgtgtggcctctgtgtggaacaagggcatgacggggccacagcagcgtggcaggacgggcctggctgtgatgtcctggagcgagacaaaggccacggaagcc

SEQ ID NO: 31395 - DNA, 2300 bp, Homo sapien
tggaggacgcctacgttgatgtaggagaccgcgtggtgcgccgcgaagcccgcgcagtccccgggggcggccaggtccgactcctccggggacaggatggaggcctcgctcggccgctgctgcagccgccgcccccgccggccccgccggccccggcgcgcccgagaggcgggcggctgcgcgcggagcccggagccgccgcggggccgcgccagggcccggcctcccctccgcctgccgcgccgaccgcgccgggcctgcgacgacttgtagttcttgacgagcaggaggctgagcaggcccagcaggcactcaagcgagttgaagacggtggagagcaccaggccgcgctggtagtccttcagctggcggcacttggcggacgtggcgctgtccagggtgctgcgagcgcgcggggcgccgggggccgagcccggcgccgagccgggggccgagcccggggccgagccgggggttgagcccggggccgagccggggctcgaacctggcgcccgcgggggcaggcagtagtgcgagtacttgcgctccaccagggacacggtgtcgccgtcgatcacggcgcccgcgaatgcgctgaggaccccgagcatgaagaccaggacgccgagcagaagcaggttctggctgctcaccggccccggggccccggccgcggcccccgactcgcccggcgtggcctcgggagcgcctgccggcgccgcggggacccccaaacccgggcccggttccgaccccgcgaggggcgcgtcccggggtccgcagcagagcagggcggcgccgagcagtgagaggccggcggccagcagcagcccggagtagaaggcgccggcggcggcccccaggcggaacggctccccgcgcagctccgagcccaacgagaagcacttgaggccgacggcggcggcgctgagcgcgcaggcgagcaggaggcaggaggagagcgcggcgcaggccccgcggacgctccacttcatcctccgcgcccgagccggcccgcaccccgcgcgcccgccgccgcccgccgccgcccccgccgcctgcgcctcctcccggcgccgcgcggccggaccgccggcctcctcctcatcctcccgcgtcctcccgggcccgcgccgccgccgccggagcccgcatcctccgcctcccgccgccgccgccgccgccgccgccgccgcgaccccgcgccgggaaccgatgcggcgcagagaccgcagggcgcgcgccccctccccagcccgcggggcccctcccaggaggctcgttcccccccaaccccccaccccgcccgcggccccgcgcgcctcgccctggcgccgcccttccccgcccccggcagcccccgccacccccgggacgcccctccgcttcctcctcccggagcgggggcccctggccgcgtctctccgccttccctccctatccgcgcccctatccggcgcgggccgctgcggaaacgcagctctccacccccagctggctctcccggaccccctgggccccaccctcagcgctccccaccgctcggcgcccctgcgtctgcgctcccctctctcccctctctatccactgggtctgggccgcacttcccgcccacccgcctgccagcggccgggaagcctgtggaagttatggggatgcagggagagggggagaggggagcttgtgtgctaggggtgagtgggtatgggggagagcctgggtaaggagaaggggaaagggggagcctgggaaaggagggaggaaaggaggagagcccgggtgctggggtgggggggaaaggagcccggggagggagggggaggggccgggagctggggggggtgggaaggagcccggggagggagggggaggggccgggagctgggggggggtgggaaggagcccggggagggagggggaggggccgggagctgggggtaagggaggagtgagcctgggtgctgtggggggagggggttgttcaagggatggggacgatcagggtctctgggaagtgctgacgtgtgcgcgtgtgcggtgtgttgcttgtgggtgcgtgtgtggtgtgtgcatgtgtgtgcgcgcgcgtgtgtgcggggtgtgccgtgagcgtgtgcccgcggttcgggggatgagtaggggcgctgacttttaggaccagccatttgagtcaagctggagacgacgtcttagaacctaggatgagtctcgtttggttttagtctgcaaagctcgtctgcatcagacaggaattttccccagacgcgggtgcacgtgaattaattcatcagaaggcggtt

SEQ ID NO: 31396 - DNA, 2300 bp, Homo sapien
aaatcttcagtccagcaccccttccccgtcccacccactctccacactgagccctcccagccaaccctcactcccgctagcaccacaaatcctcagcccagcaccccttccctgtcccacctgctctccacactgagcccagccactccacgctcccttgggcaggtggcaaggcagagcctgaggtcagctgccacccccagccccaccccagggccctcatgcccccagcaaggcctctccagctctgcggtcccactcaagatgcgcttagctcatttcacacgcaggtgagtgtctcagttctgcgggcacggaggcccctgtgggagggaggttggcaggcccctcgctgacggaggggagcaaggggcaaagtgggggtgtccagaagggggttgtgaggaactgggggacgggaaagagcccggagaggaaaaaggaggtggggaggggctgcgtgtgcatagacctcagggtggggcaaccgaggacctgaaggctggtttccggccgccatcctcacatccaggcgcaatgtgagctcatccctgggagttgggaaatgcaaccggcaggctctggaggctgttctgggactgaatgcaaagcaggcgaccctccccccggccccaaacccaagcactgcagcggccccacaacccctccccccacccacatccccactcccccgtccccagtgagaattcactatttttaggaaaaaggggaagcctctcagcagatccttgaaaggaagtgactttgtgactaagtggaggcaggaacatcatggcacaagggcacacgtcgcacacccagctgggcccactgtggacggcgcagatgctgcctcagagcagcctccgagacaggcagctgcagcggtgcagcccagggccctcgcagaagcttccccggggcctggcctcgtgctgagagaactctgcgctcctgagggcacctggctgtcatgcacacgtgctcacacgaacacacacacctacacgtgcgcacactcacactccgtgcacacacgtatgtgcacactcatgcacgcgtgcacacacgtctaccagctgagtgcagtaaaagaaccacatgaaaaccttgcatcctggttaaaagtatggtgacaacatggacagataaactggaaaagatgggaagaaaccttaagcccaggatctggcagcacaaaggtgcctggaaagcgacaatcagcgtttttatattcagggaaatcaggaacactgccacccgcccgccaggccggcgcccatgccagacccagccaaggtgcttctggccacatcacccctgctggcctgcagggagctggcccaggagccgagaggcctatgggagcaggcaaggcttgctgaggtgacagcggagaggagaggtcgggctttgttgccaggcagccccccaacattcaggtcctttttccactgaaagccatgtggcctcagagcggcgtcaccccgaagcttgtcccagccggggcctgacagcaggtaaaggctgactagcaactctgcatccctcagagtgtgggggaaggtggatgtggtcccacctccacatccagggtccccttgctggcctctgggcatttgggtcctggtgtgattacccagccccctctccctgcacaggggtgaactgcatctcctggaggcagggccagtgccccaccacctccccagcacacccgagcccaggtctgggctcccaggagggcctggggccacctgtgggaccaacccaaaccctcaggcagctccaccagcagaaagcgtcatgctgtgtgtgggataacctcctcaggggattagttctcagggcctggtccgctagaagccaaatgcctgtgcccagccacccgtgacgcctgcaacaggcaggagatcccccaacagttactcccagccttcattccacagggtctggttttcctggaaggtgggaagtcccagggtctgaggagagggagcgcaggcccccatttgtaggagtgagtcagctgacccgcccccggggttcctaatctcactaagaaagactttgctgatgacagggtttcctgggagtccatgcgtgcctggagcagcagcgtctccagggacaggcagccaccatgagcctcagtgaggagcaggcccggagctttctggaccagaaccccgattttgcccgccagtactttgggaagaaactgagccctgagaatgtggccgcggcctgcgaggacgggtgcccgccggactgcgacagcctccgggacctctgccagg

SEQ ID NO: 31397 - DNA, 2300 bp, Homo sapien
ggatgccctgcccccgccgcacagctgtgacccctgggtgacccctggacgacctgcccccaccgcacagccgtgacccctgggtgacccctggacgacctgcccccaccgcacagccgtgacccctgggtgacccctggatgacctgcccccaccacacagccgagacccctgggtgacccctggacgacctgcccctgccacacagccgtgacccctgggtgacccctggacgtcctgccccgccgcaccaggatgagctggatctcgtccctgtcgcacttcacgtggtaaaggaccatgtcctgtgcgatgtccttgcggttctccagcttgttcatcttgtcgtaggtgtcggtgttcatcactgaccagcccaggaactgtgtcagggactggaggggatggcagtgtcactggcgctcagcgctcccggcgcgccccctcccatgtgcctgtgtgccaggccccgtggctcggcgggcaggtcctggggctgccaccatggtgtcgcagtgcttctgtgtggggtctcccgggtgctctgcagaggctcctgctcccgggggggccctttgtcgtcctctccctggccgcatgcataccgcacacacatgagcacacgcacacagccgaatgcttggcggggaggcccccacaccgcacaggccccacccctcgcagggcatccccggcggaaccacgtctgcccaggtgcttacctccatgagaacctcgtcctgttcgtcaaagggcttcccgtctttcctgttgtaaaatgtggcgactcccacaatctcctccttcttgttgacgatgggcatggacagcacattcttgatgagccacccggagtcgtccagggccccttcctgcgggagcggtgtccagagctgagctccgccctgaggctggccctggcccgggcgtgtggccggggagagtgacctcatgtcttctcccctagagccgtgacggctgggctcgtgttcctgtctctgctctctgcattccctctctccctctctgcatttggagtttgtgtccatggtttttgtgtcatgatattttcccaccggaggaggtagaggccgttttcccaccaggagtggtttcatgggcatgtgtgtggggcggcggtcacggcctcgcaggggtgtgtgggggccgcggtcacggcctcgcaggggtgtgtgggggccgcggtcacggcctcgcaggggtgtgtgggggccgcggtcacggccttgcgggcgtgtgtgggggctgtggtcacagccccaggtgatccacccgcctcagcctcccaaagtgctgggattacaggcgtgagccaccatgcctggctgaagttgttttttaagtggcaaaaacgaattcacttcatcatcgctgaatcaaaatctcctcttttgtaagtaagtataatttctaccaaggcacagacagatacctgaaatttgaacatttcgtcagcggaagcattcatgatgttacaaatctgaaaaagcatcagaaaaacgatttcatccaaaacagcggaaggtctgttatgatctaaaatggcctctgtggccctgaggtgagcttttaagtaggtaaagcagggcagctgggggcttcactgaggcacgtggagctggccgggagggcgggacgtggcagagacaaggagaagcacacatcgccgcacccagtgagggcaaggctgtggggactccagacagcacgggactcacaaagccgctttctgccacgtagcttggaaggccgctggccagggcccagtgatcggctgagggtgtgctgtgggcagagagcaggggtcagataggccacgccgggctggatgtgcgcgtgcaggagtcagagggactggatgtctgtgtgcaggggtgagaggggctggtctaggctgcacgtgtgtgtgcaggggtcagaggggctggtctgggctgcacgtgtgtgtgcaggggtcagaggggccaggctgcgctggatgtaggtgtactggggtcagatggactgggcgtgtgtgcaggggtctgggggtctctggctcatgtgccatcctcagcatttactctcttctctgagtgccagggggttcaggaggcgaggaggccagggcgtgggttggaggacggctgtgctgccttcttcctcctccccaggctgccgtgctggggcccctccctcttgggaacccctccctctccggaggccgtatggcttcagcctgctttctaggactcagcgttggtgcctgccctgccaccctgaccctgacttgtgctcaa

SEQ ID NO: 31398 - DNA, 2300 bp, Homo sapien
tgctgttggctccagcccgtggtcccctgagggcagccccctcttggctctggggacccttactgcagctggggagaggcggggagggggatgggctgtacacagtgctgagccgggctgggctgcactgcccagacactcggctgaccaggacctcgctgtgcactcgcctggggcagacacagacgtgctctggagctgtttctagtgtcagaccccgagtgccctgggctgtccgtcccctcacagcgtcctggtggagggtgaaccatgcaggactctagaggccgggcgcgggggatggacctgctgcctgtccttcccctgtggggctttgctgaccaaccaatgccccctttcctgccgaggctgcacctggcctaagccctctccactgcaggctccagagagcccctcgccgcccaccagagcgggtgtgtgagaaaccacagctcccacctggtccacgtggggctggggcagccctgcctctcctgttcctggcgcctatcctgactctcccatttgctggcacctctcctgctgccaggaggtatccagaccccgctgctgacctgaggaccctggcattgtccatcataccactgtgtgggcccgggacgccccccatgcgttctctgccccagcaccctccccagggctttcttggtgcatggctcgcggccctgctggggttcacctgcagagctgcctggacccagaggctcctggtgatgagcgggtggccctggttcctccagtgccaacgacgtcacctctgcataagcatcacccaagccacagctgtacccaggtccgagccacccacacgcatgtcacatgatcccacaaagtgagataaggaccccacgacctcagaaccccctgcctgagaccaagccaggacctgaggctcctgaggaccaagaggggtctctaacacccgtttcaggagtggaaggttccagaagcagcactcacaatgggctgctgatccaagactgtcctttccaagtcaccttgctcccagaactcagcagccacgagaagtgcgacctggaggcacaggaaggcagctgtctgtggagctctgagcccacgcggaagggcccgggcccgccccgtgaggctccgagcctcggtcttctccgccccagacccccggggtccccaccacacagggctccggttgagccatgtagacacactgcagtacccccatccttgccgccctggcctggccccgaggtggccctcagagctccttgcaaacaatggtccgttgccatccgaggctcccgcccgcccggcagtcccatgtgctgagaggcactgactctgggtctggagggccctctgttctaaccttgctctggacttcccagggcttggtgatggcagacaggtcgcaggctgtcatcatcatggccctgcagacacaaaccgggcacgagtgctgatgggcgtctcctgagggcaggtggtttatatgtgttttcttttttgagatggagtcttgctctgttgcccaggctggagtgcaatggcgcaatctcagctcactgcaacctccgcctcccgattcttgtgcctcagcctcccgagtagctgggattacaggcgcccgccaccacgcccggctaatttttgtattttcggtagagacggggtttcaccatgttggccaggctgatctcgaactcctgacctcaggtgatccactcccctcggcctcccaagtgctgggtttatgtgtattttctcactgggtccctgggaccagcctggggaggggctggttgtgaatcaccattttacaggtgaaaaagtggaaggtcaaaatgaagtaagttactgccaagggctacagaccaatgcagggcctgtgtgctccccagctctgcaccatctccctgagagctggggggaaataaggacggcgcatttgtttcacagccctcgacaagctgccgcgacgggctcttcctgctccagagcgtctggggagggctgcagggttaaccagctggtgagtgggcccggtccctgcgagggaaggacccctcgtgccccctccgcccgcgctcacatgacgatctccttccgggtcgtctccagggacaggtactccacccagctcttcttgtcctggtagttcttggactcatccacgatcttctgaaacatcgctctcttcctgaacccagggaacaagggaggtgcaggtgggagcaagtgtggagaccccgccccaagcgcccgtctgcagggaggcgcggagcccgagcgaggccccatcc

SEQ ID NO: 31399 - DNA, 2300 bp, Homo sapien
cccaaagtgctgggattacaggtgtgaaccaccgtgcccagccttttcatctcactggtcagagacccctggtatccagagcctgggtctgggatgaggggctcttaagaggttctgagggatcctgcaaacagcccctctggacgccaggacaggatgtgaaagtatcttgctcactcaaagctcaccttaaccaaatgtcctgaaaagcttataggctgcttctccctttggccttatatttgcaaacgaactcattttacaaactggggctccaagcctagatttgctcaaggcacataactgggaagtagcaaattcaatctgtccattgcaaaccaccaggccaagggtttgggttgttggcaagctcacagccaggaggggcgagaagcccaggaagcctgctggggagggaagtggctcaggcaccacaagaccacctccctgcacaactcaaacagcactcaggccctgtgctcaggaggtcacatcaccagacttttagtcccaagtctgacctggccacttcctgggatcaaagggaggatttgtgaaatggcaggttggggcgaggggttattgtggaggaggacccagcttcccaactgtaagggcgtcagtcagtgcctacccctccccatccaggggtctgggctgctgagagcagcagcctagaactcagaatcaagacaaccccagtactcatgaggcccccagctgactgactccattacagacggcctttggggctccccacctggatgccccagacagaacaggcagcgcgcatctgtccttcccactgtgtttacatgatgcattctgggtctgtgaatggtaatgtggattcttttgaaaccccctccctgtcttccacctcacgtgaactgggaggtggacagaacttcaacctaggaattccacaaccagcgacagcaaatgaggagccggagtatcacacaacacaggaagctttattcatccgctgctggtccaaagagtgggtcgcagggtcactcactttaatatgctgtcatcttgggccggaaggttagaagaaaagcacatgttaccactcaggcaacctaaaaagaccacttcagcttcccagttattttttttttttttttttttgttttgagacggagtctcgctctgtcacccaatggcgcaatctcagctcactgcaacctctgcatcccaggttaaagcgattctcccacctcagccttctgagtagctgggattacatgcacccgccatcatgcctggctaattttttttagacagaatttcactttgctgctcaggctggagtgcagtggcgtgatctcagctcactgcaacctccgcctcccgggttcaagcaattctcatgcctcagctttctgagtagctgggattacaggtgcctgccaccatgcccggctgattttttgtattttagtagaaatggggtttcaccatcttgcccaggctggtctcgaactccagagctcaggcaatctgcctgtctcagcctcccaaagtgctaggattacaggcatgagccaccgcaccgggccatgcccggctaatttttgtagagacagggttgcaccatgttggtcaggctggtcttgaactcctaacctcaggtgatctgcccgccttggcctcccaaagtgctgggatacaggcatgagccaccacgcctggccagcttccccatttttaaacaatccgcatctacttagctctgcttaaatgtcctcctccattttccttatccctgcacaaacctgggagggacaatctataagagccagtgtcactcgtaccttctgccaattctctggcaatccgtttcagttcatcctgcttcttcttctcttctgctgctatcctcctctcctcttctgcccgaggttttaggtaatctgtttggcggaatgcaggagaataaaattcactggaaatgctgtacaaaaggaactgagtccacaggtcaaggtatcttcagcgacgctgtaaaccagacgcacctgctgttcccgctctttatgttaatgcgagtcaacgcctgaccttcaccctgacgagtccaacccagaggctacagggcccctgctgcccacccgctcacgcactggctcactcgtcctctgcgaacagggactgcctcccatcaagacctcagcactcgaacagccatttagcacccgttttcaccaagaagcagccgttttcgagtcccccgcccgggcctcagaagcctgagctttgggtgagctgattccactatcggggtcacgctc

SEQ ID NO: 31400 - DNA, 2300 bp, Homo sapien
ccacaaccagcgacagcaaatgaggagccggagtatcacacaacacaggaagctttattcatccgctgctggtccaaagagtgggtcgcagggtcactcactttaatatgctgtcatcttgggccggaaggttagaagaaaagcacatgttaccactcaggcaacctaaaaagaccacttcagcttcccagttattttttttttttttttttttgttttgagacggagtctcgctctgtcacccaatggcgcaatctcagctcactgcaacctctgcatcccaggttaaagcgattctcccacctcagccttctgagtagctgggattacatgcacccgccatcatgcctggctaattttttttagacagaatttcactttgctgctcaggctggagtgcagtggcgtgatctcagctcactgcaacctccgcctcccgggttcaagcaattctcatgcctcagctttctgagtagctgggattacaggtgcctgccaccatgcccggctgattttttgtattttagtagaaatggggtttcaccatcttgcccaggctggtctcgaactccagagctcaggcaatctgcctgtctcagcctcccaaagtgctaggattacaggcatgagccaccgcaccgggccatgcccggctaatttttgtagagacagggttgcaccatgttggtcaggctggtcttgaactcctaacctcaggtgatctgcccgccttggcctcccaaagtgctgggatacaggcatgagccaccacgcctggccagcttccccatttttaaacaatccgcatctacttagctctgcttaaatgtcctcctccattttccttatccctgcacaaacctgggagggacaatctataagagccagtgtcactcgtaccttctgccaattctctggcaatccgtttcagttcatcctgcttcttcttctcttctgctgctatcctcctctcctcttctgcccgaggttttaggtaatctgtttggcggaatgcaggagaataaaattcactggaaatgctgtacaaaaggaactgagtccacaggtcaaggtatcttcagcgacgctgtaaaccagacgcacctgctgttcccgctctttatgttaatgcgagtcaacgcctgaccttcaccctgacgagtccaacccagaggctacagggcccctgctgcccacccgctcacgcactggctcactcgtcctctgcgaacagggactgcctcccatcaagacctcagcactcgaacagccatttagcacccgttttcaccaagaagcagccgttttcgagtcccccgcccgggcctcagaagcctgagctttgggtgagctgattccactatcggggtcacgctcggtggaggacacggtcctgcagcctcgcatgcgtcccaagcccccttccagagctggagttctccaaatagcacaggagctccacaggaaagccgagcagaccccgccccggccccgcccgcggtcactcactgtagcgcgtggctccgtaggccacaccgaggaacagggcggagtagcggccgagctgcgaaagaggttggtcagaggcggcgcgaaacggggctcgcgggacgggggtcgcgggaggagggggggcggggtcgctgggcagaggtcgcaggaggggtgggggtccggtcgccgggcgagggtcacggggcgaggatcatgggggcgggggccgggggtcgcagcccgcggggtcggagctgcggggcgggacacgggggggcccagagcactgggcggcggctgcaaagcctggatcaccttgatgagcggagagacctgcaccggtggcaccatcttgtccctgacctccgcaccggaagcacaacctgcagacggagcaggatgccgcacaagccagcaaagccttggaggcaaaggcggagctgggcgcacgcatgcgccgtcagcggcgagagagcggggggccgcgccccctggcgaccgaagggtgactgcgcgcccccgcgcggcggtgacgtcacgtgaggcgcacgcgcacaaaggctggggagtgcgcggaggatcatcggctgcgcctgcgcagttgctgcgtgaggcgggatctgcgccgagtgggcggggggtttcctttccccgcagggctgggggtccgctgtttccccgcgctgctgccgaggccccgccgtccgcgtcctggccgtgtgtccacaccccagactgcgggccggggcgcactctgtcttcttgcgcggagcgtcggaggcctgaggtcagggcggctcgggcgg

SEQ ID NO: 31401 - DNA, 2300 bp, Homo sapien
cgtgttggggaggaaggtttcgggatgaaactattccacctcagttcatcaggcattagattctcaccagagcgcaatccagatccaagtgcgcagctcacagtagggttcacgctcctatgggaatctgatgcccaggctgatctgaaagtgggtggagctcgggcaatcatgctccctcacctcgtcctgtgctgcccggttcctaacgggccacaagctggtactggtctgcacctgggggttggggacccctgccctataggactggccttggtatacccagctcaggaaacagagcccagtgacttcctagtttctcagccagagaggcccaggccctggaccccagagcaagccaggagagggggcagaggcgacttaggcccggacaggtagcccaggccgccaggatcacgggtcctccccatgcttgcttcaagagtcctggagtttgtgatgctgcaccttagcgagacccgagccatagttctccagttgcttctgcctgtagcagtgcagggccaggaggggacacaggaggccttgcgtcactactgcatggggccaaagggggcccgagggtggcccagcacgggcagcatggctgccgccaggaagacccagaacgtggagggggtgccaggctcctgcctagactccaagcctggtgtccatggggctggcgggtcagcacttcgggcacagcggggaggctgcataggcaccgcaggccccatctctgggcagctgtgggagacacacagctaccgggaggtggacagaggccagcaaagaccagtgtggggctcagtggtccccaggcctgggccggggcaggcccttggagccgtggagtcctgaggcctggagtcgggggacccagggagcagcctctgttgggggctggtcttcccaagaagatcccagcccctcttcgggacagaagtgatggggcatcctggggtgaggaagctccagctccgggatgaagggcgccccgtgctcccgggcagagcagccgcaggaagaggggcctggaggccatgctcccgcgggccgcggaatccaacgcggcccggccggcgacagacactactgccttgtaggagaaggacctgcccggggagccacctgcactcggctcacactccgctcccaggacccccaggtccctgcccaggccaccctcgggtgggcgcggtccgcggggctggacccgcccgagccgccctgacctcaggcctccgacgctccgcgcaagaagacagagtgcgccccggcccgcagtctggggtgtggacacacggccaggacgcggacggcggggcctcggcagcagcgcggggaaacagcggacccccagccctgcggggaaaggaaaccccccgcccactcggcgcagatcccgcctcacgcagcaactgcgcaggcgcagccgatgatcctccgcgcactccccagcctttgtgcgcgtgcgcctcacgtgacgtcaccgccgcgcgggggcgcgcagtcacccttcggtcgccagggggcgcggccccccgctctctcgccgctgacggcgcatgcgtgcgcccagctccgcctttgcctccaaggctttgctggcttgtgcggcatcctgctccgtctgcaggttgtgcttccggtgcggaggtcagggacaagatggtgccaccggtgcaggtctctccgctcatcaaggtgatccaggctttgcagccgccgcccagtgctctgggcccccccgtgtcccgccccgcagctccgaccccgcgggctgcgacccccggcccccgcccccatgatcctcgccccgtgaccctcgcccggcgaccggacccccacccctcctgcgacctctgcccagcgaccccgccccccctcctcccgcgacccccgtcccgcgagccccgtttcgcgccgcctctgaccaacctctttcgcagctcggccgctactccgccctgttcctcggtgtggcctacggagccacgcgctacagtgagtgaccgcgggcggggccggggcggggtctgctcggctttcctgtggagctcctgtgctatttggagaactccagctctggaagggggcttgggacgcatgcgaggctgcaggaccgtgtcctccaccgagcgtgaccccgatagtggaatcagctcacccaaagctcaggcttctgaggcccgggcgggggactcgaaaacggctgcttcttggtgaaaacgggtgctaaatggctgttcgagtgctgaggtcttgatgggaggcagtccctgttcgcagaggac

SEQ ID NO: 31402 - DNA, 2300 bp, Homo sapien
aagtctccattggcttcagggggttttccccaggccgtgtgtgtttgcccgcatgttttctctgctggtgccctgccccgccccacctctggtggaagctgctggtatgtccccctcaccccctaccttgggccccagagacacttatttttgattctggaagcaggagttgctgaggagtctggattattttaaactccagtgaagggaaaacccattgtcacctgaggccgtctgccctggcggaagcgggggcttgccgagggccaagatggttctgtgccttgtggatccagtgtgcacctgcggcttcctcagcgagcagtagacacggggagggctggagtttgcttctggccccctgaggacagggttcaggcagaggcctcaggcaggagtcttcagggactgccagccaacctcacagaagctggagaaaagatcaggtggccctacagcaagtacctaacctttttggcgcctgggacaggtttcacggaggacagtttttccgtgttggggaggaaggtttcgggatgaaactattccacctcagttcatcaggcattagattctcaccagagcgcaatccagatccaagtgcgcagctcacagtagggttcacgctcctatgggaatctgatgcccaggctgatctgaaagtgggtggagctcgggcaatcatgctccctcacctcgtcctgtgctgcccggttcctaacgggccacaagctggtactggtctgcacctgggggttggggacccctgccctataggactggccttggtatacccagctcaggaaacagagcccagtgacttcctagtttctcagccagagaggcccaggccctggaccccagagcaagccaggagagggggcagaggcgacttaggcccggacaggtagcccaggccgccaggatcacgggtcctccccatgcttgcttcaagagtcctggagtttgtgatgctgcaccttagcgagacccgagccatagttctccagttgcttctgcctgtagcagtgcagggccaggaggggacacaggaggccttgcgtcactactgcatggggccaaagggggcccgagggtggcccagcacgggcagcatggctgccgccaggaagacccagaacgtggagggggtgccaggctcctgcctagactccaagcctggtgtccatggggctggcgggtcagcacttcgggcacagcggggaggctgcataggcaccgcaggccccatctctgggcagctgtgggagacacacagctaccgggaggtggacagaggccagcaaagaccagtgtggggctcagtggtccccaggcctgggccggggcaggcccttggagccgtggagtcctgaggcctggagtcgggggacccagggagcagcctctgttgggggctggtcttcccaagaagatcccagcccctcttcgggacagaagtgatggggcatcctggggtgaggaagctccagctccgggatgaagggcgccccgtgctcccgggcagagcagccgcaggaagaggggcctggaggccatgctcccgcgggccgcggaatccaacgcggcccggccggcgacagacactactgccttgtaggagaaggacctgcccggggagccacctgcactcggctcacactccgctcccaggacccccaggtccctgcccaggccaccctcgggtgggcgcggtccgcggggctggacccgcccgagccgccctgacctcaggcctccgacgctccgcgcaagaagacagagtgcgccccggcccgcagtctggggtgtggacacacggccaggacgcggacggcggggcctcggcagcagcgcggggaaacagcggacccccagccctgcggggaaaggaaaccccccgcccactcggcgcagatcccgcctcacgcagcaactgcgcaggcgcagccgatgatcctccgcgcactccccagcctttgtgcgcgtgcgcctcacgtgacgtcaccgccgcgcgggggcgcgcagtcacccttcggtcgccagggggcgcggccccccgctctctcgccgctgacggcgcatgcgtgcgcccagctccgcctttgcctccaaggctttgctggcttgtgcggcatcctgctccgtctgcaggttgtgcttccggtgcggaggtcagggacaagatggtgccaccggtgcaggtctctccgctcatcaaggtgatccaggctttgcagccgccgcccagtgctctgggcccccccgtgtcccgccccgcagctccgaccccgcgggct

SEQ ID NO: 31403 - DNA, 2300 bp, Homo sapien
tgagctgcgcacttggatctggattgcgctctggtgagaatctaatgcctgatgaactgaggtggaatagtttcatcccgaaaccttcctccccaacacggaaaaactgtcctccgtgaaacctgtcccaggcgccaaaaaggttaggtacttgctgtagggccacctgatcttttctccagcttctgtgaggttggctggcagtccctgaagactcctgcctgaggcctctgcctgaaccctgtcctcagggggccagaagcaaactccagccctccccgtgtctactgctcgctgaggaagccgcaggtgcacactggatccacaaggcacagaaccatcttggccctcggcaagcccccgcttccgccagggcagacggcctcaggtgacaatgggttttcccttcactggagtttaaaataatccagactcctcagcaactcctgcttccagaatcaaaaataagtgtctctggggcccaaggtagggggtgagggggacataccagcagcttccaccagaggtggggcggggcagggcaccagcagagaaaacatgcgggcaaacacacacggcctggggaaaaccccctgaagccaatggagacttgcctttgctcaaggcctttcctgagagcttagtggtgggacgggtcccacctggctcagcacaccgcccgcaggggcctctgcagctgtcaggtcagctgtgggtgcagaagccgatactcccccggctcaggcttgctgctatctttagcactgtgctcagactccagtggcctgggaaccctctgcagggggctctgcagcccttctcacattcccggtggcctcggggggcctcccaaccatgcttcccccctcggtgtggttctccccactcctgcagcccagcagtgccccttcaggatcacacccagaccccactggactggcagcaggggatgccctggcccttgctcccagccccagggttccacatctggtcacctgacaccttgcagtcggccccaggtccctcctgggcaggtcatgcctccagggtcctcaacctcaggagtcagtgcttcatagaggccgctggacctggggatggcaccaggcagcatctcaggggacgccaactgtgaccatgtgtccctcagggggtaggacctctgctcaagagacatgcaagtggcacctgtctttttagccttgcagacacggtggcgcccccagggatcccacctgctgttgtggctgcatatagtcactcccaccactgcccctgcagcaccgaggggcaggtgccctgggtcctgttacctactgcgtcccacgcagacgcaggcctggggggctccaaaagcttgttctccactcagcctgtaggcctcctccttgatcctgcttggcctgcagaccctcctcccaccccttgaaccagggcatctggatgctgactctgtggtggcctctgatgtctgacaccaccaacagaccctgggccaggtccctaccccagactctgtgcctgaggccatggtatagtggggaagaccaggctcagggccctagagtccccctcccagcccatctgagcaacgtggccatctccatggctcctccaacccagaaatgtcatcacccatgggccaggcaaggagctcccagccatgaggtcagacggggtggtcccagggccaaggctatggactgacttctgtcaccaaggcagggaggggcgtggacacccctgacagacagagtgtgcttggcagaagcccggtgaccagctgcagtcacccacagcagcgttgtgcaaatctagaaaaagtgccccttcctctggctcctgcagttccagggtgcccaggcccccagccaagagcgtgtacaggtggccctgctgacacacagaatccttgggagaacaaagcctccccggggttcggggacaggtggatgggaggtagtcctggccagaggtatctggggaggctgggggccttgcggggtgaggcagggcaagggtgtgagtcactgccaggctgccaaagctcactctgcagctgtccagtcccctggggtagccccaagcctgtccttgtagggagtggcagccggagtctgaactgtcctgggggaccaagcaggagcttaagatgggcaagacctggggccctgggcagacgcatcaaagcaggcagaagcaggcatggtgagcaggccgccgtgcatgcctggggcaggcgtgtgggtgtgagctgtgctgtgcatgtgtacatgcgcacagacgagcgtgggcgtgtc

SEQ ID NO: 31404 - DNA, 2300 bp, Homo sapien
ctgtgaccggggcccttcccggaagggacattcggtttttgtggcagggacttccagcctgaggccgaaggaggagggtccaacttcacctttgcccgcccttcccccgcttttttgggtctcctttaactgggacggggcgggaccctcctccgtagtccttggggcggaactggccccccgtggcccggcccggcccggccccacctccgcccgcaggcggtcccggcccacgcgggaaggtccttaagcccgggcggccggcgggaccggcggagacccgtggaggccgccgacgatggcggggccgacggaggccgagacggggttggccgagccccgggccctgtgcgcgcagcggggccaccgcacctacgcgcgccgctgggtgttcctgctcgcgatcagcctgctcaactgctccaacgccacggtaggggcaggggcggggacaggtggctccgggaccctcagtccctcggaccagccgggttttgttttcctgtggccacagcccgaggtgccaggtgctggctgggggcggggggtgccttctggaggtggctagggattgcgggcactgggggcactgtctgtcctggaggtggctgggcccagggcacagagcagggctgggtgccccgggggatctgccagtcacggagtcccagcccttcccagccttcagtggctccagcctgggtccctcttccccagccagtcacatacaggtggccctgcgttggccctctctccttccacgcctcccagccccaggacagcaggcacacagcagaggcgcgcttggagccgccctcccctccacctgactctgagtgaggggcggctcctgggctgggctgggttccgtcctgcccccacccccttcaggtgttgcacgctgcagcctttcccgccctgtgtgccctcatcagccatcccccggagcctcaggaactggtcaggcagtatctggccaacgtgcaatgaacagctagagttggcagcaggacccacagctcagggaggcgccaggtcacggggatggtcaggaagctcgggggcaggggcaggagtcactctcaggcctgggtcagggctcttccaggtggaccccggggcctctcccctcctcctttgctggctgggtatggagggccagcctctggccgagacaggcccgggatctgctggatgggcccaggggctgcctgctgcccacaatgctggcacgagccgtaactcactgctgtggcttggcgtcctggcccaccatgtccaggcactggggaagccataactggctttgggtggagtgtctgagggtgcagggctggtttcatggtccaagagtcagtgggtgtcgtaggtgtggggcgttccttggacagtcaagggcctcctgctgcagttcttcactgttttattaatatccacgagtcatcatggagcacacagaaatctcaccctgacaccaagagtcgtcatggtctctgcctgggtcaccacagtgagccgtaagcaccatgttcactccagccaagtgcccttgaggctggaggttactcatctgcagccagtgaccagggatcccgggttccaaccagcagcatgagggccaggcggagcagagcttgggtcaacacccaccccggaaggcagcccagtgctctggatgagactcaaaggacccaagggggcgagcgcaggcagggtcgaggctgggagatgaggaagggagtcagacagatcgtcctcccacgttgccccgcacgcttcagacgcatctcttctcagtgagtcagctgtgggccccactcaggcccccgaggaaccaggacagggctgaggctggagcggcgggctcggctccgcagggtgggctttctctcccgggctcggccaggcaggcaccagctgggcctggggagctcgttctgtgcctggccccgtcctgcagaaaaaggaagacagggcggctgttgcccaagctccctgtcctgtcccgtgggctgagtcagaccttgtccgggcggagcctgggtctggctgctgtgtccgagggtgtggcctggagctcagtcgactcatggaagttgaccttgagtgacacggcctcctgcctcccggagtgagccccggtgacccgctccactttggcctccctcagggatgagccagtctcacctctcctaggaggccttcccctcggccgcagcgtgcacttgtgctgtgtgctggacgtccgtggggtgaagagctctagtacttgataatgcctgtggctggggaatggtgcc

SEQ ID NO: 31405 - DNA, 2300 bp, Homo sapien
tccacccacctcggcctcccaaagtgctgggattatagatgtgagctacctcgcccagccatggtttgtaattttttttttttttttttgagacagagtctcactctgttgcccaggctggagtgcagtggcatgatctcagctcactgcaacctctgcttcccgggttcgagattctcttacctcagcctcccaaatagctgggactacaggtgcatgtcaccacacctggctaatttttgtatttttactagagactgggtttcaccatgttggccaggctggtcttgaactcctgaccttgtgatccacctgccttggcctcccaaagtgctgggattacaggcgtgagccaccgcacccggcccatggtttgtaatttttagcatgcaagttctgtagatggtttgctaagtttataccaaagtatttaattttccttggagtaattatgaatgtctttaactttggttttcatgtttcttgttggtatacatcaatgcaagcgattgttgtgtgctgatcttgcattctgcaatgttgctgagctcacctgctcaacccaagagttccgacatgtagggaggaggagcccctcaacaatgcacgctcaacagagactgaacaatggaggtagctacagtggctgccccgtttcatggtgacacccctcgacaatgcacgctcaacagagactgaacgatggaggtagctactgtggctgccccatttcatggtgacaggctcagacaccacctgtcagaggcagtgctccacaatagtgaggtccctcaacagggaagcctgcactgcaactccccctctgccaggtggggttaggggatgttgaaggccctaggccaacattggcactggactatggaggaaggttgtgagggggctgggtcctcagggcagggcgagcaagaggtgaggagaaggagaacagaaggaactggtgggggaatggggaacaaagatgaggggggaggctagacggtggggaaggcagaggagataaagagagtgaggaccacagggctccatcacacgtctcagagaatggaacccccttggggcccacccatctcaggacaccccgggtgagctccattttctctttgttactggatgagactctacaaaaaaaaaaaaatcccaaagtggagagctctatctgagacacacacacaatccctgcagaagactgcacagtgaaagctggggcctcatcattagcctgttcagactcaggtgtggaaaatggacaggccctggcaaaggagatgaatgtttaagacaaaaaccacgaataatactgttcaggaaacggggatggtttcaagggtcaagagagcctccctgtttgggggaaatcctgtttgcacgtctgaccaggccagcctccaccccacccctatactggcctcagcaacagggcctggagcctcttgggttcccccagggtgggccaggcacagttgtgggatcagcaggttcttgcagaaaagactaagccgaaactccctcctctgccttccaacacacaggcctctccatcctaaacaaacagaaacctgtgcctactcctctgagagccgtgtcctccattgtaaaatgcaggtaacaatccggtgcgtgtgtggcggactgcctaccccagggtggggcccacaggcctttctggccttccctccagccttggcctgcagcccctcgccctcctaccccatgcctgcttcccgcaggggctgtagagggactggtctgatttgaggctctgcgcaaagccagcccagcctcttcttccaggctggcctctggcccctccctgtggctggcttgaacctcaggaacttggggtccacagcccccttcaggaagtgcagagcttctgctgggcagagtgacttccaggccgcctttcctgctgagaagcacacaggctgtgaccggggcccttcccggaagggacattcggtttttgtggcagggacttccagcctgaggccgaaggaggagggtccaacttcacctttgcccgcccttcccccgcttttttgggtctcctttaactgggacggggcgggaccctcctccgtagtccttggggcggaactggccccccgtggcccggcccggcccggccccacctccgcccgcaggcggtcccggcccacgcgggaaggtccttaagcccgggcggccggcgggaccggcggagacccgtggaggccgccgacgatggcggggccgacggaggccgagacggggttggccgagccccgggccctgtgcgc

SEQ ID NO: 31406 - DNA, 2300 bp, Homo sapien
acagcagactcaggatggcctggggaagccatccggccatgtggcatttaagcttcctaatgacattcagcagaaacagagctggacacaagagcccagggctcagagtcaaggtccgggcaccgctggcacccacccaggagagtagtgggaagcctaggggtagggtctgcacctccttgaggaggggcctggggcctggagtgagttctgaactgcagcttaccactctgcctcttcctgaggccaccacactcagcccaggactgttcctggcctgctggccaccccctgccccttgcaccccagcaccaataccttgcccctgccctccttctgggatgatcctccagtcctcccctccacatctggggcctgcctccaccaactgaaaactgcagtcagggctcttgtggagggccagcaccccagtaccccaatcccaggcagccctctccagtgggcccctcccctgcactgggccaccccatggctccacggagccctccctgcctcccctcccccgggggcagcagtggccacatttagtccctccccttcacagcagcatgcctgggaatgctgtacacattcacatgtctgctgtctgtcctcctcccacccggataacgtgtccacccagtgctggagatctcagcaggcccccagcccttctcaggcccctctcagcagcggactcaagccgcttccccacgtgctgcaccatacctgggcccggggccccctgcctggtggctgctcccggggtccaactctagacttcacggggacagtcgcagggtcactccctcagccaccacctctccagacgggacgagctaatgactcccgactcctgctccatgcctgcaccgcacagcctcgcagcgagtgcccctgggcctacggggcctcccctctcgccaccaagcctccacactgcgcggtgccccgccgcccggaaccacagtggtctcgcttcccacccaagacccaacctgccctcccgtcctgggccgccagcccagaacccgcaaaccgggagaccctaggaccccgcgtgcctgcacgtccgcctcacccccgcacgcgccctcggtcctcggatcccgccctctcaggacagtgccagtcccacgaaggcgcaaatgccgcccgtactgctccaccctggcggagggcacccaggtcggagagtccgcacgtgggtgccctgtccgtcctgatgctgaacataacctaaatacaagcctaaacatgaccagacccgaacccctgaccctgaccccacccctaatcctgaccctaaccctaaacccaaccctaaccctaaacctaacccctaactctgaccctacccctaatcctgaccctaaccgtaaaaccaaccctaaccctaacccctaatgctgaccctaaccctaaatccagtcctaaccctgactctaaccctaaccctgaccctaaccctaaaacccaaccctaaccctaaccctgaccctaaccctaaacccaaccctaaccctagaccagaccctaacccctgaccctgaccccacccctaatcctgaccctaaccataaacccaaccctaaccctaacccctaatgctgaccctagccctaaacccagtcctaaccctgactctaacccctaaccctgaccctaaacctaaacccaaccctaaccctgactctgacccctaacccgacccctgaccctaacaccgacccttaaccctgccgggagggcgctcagtcccggctcccacaaaggacagcagcacccgtactggacggcacccccggagggacccgggcctgaggactctgctgctccagcgccccagctcacgatcgtccaggacccgtcgggtccctcagcacagcgcggccctgtcgctctcctgaccacgcccctcatggccccgccctatgcctcgcccctggccctcgcgccccgcggctccctccgccgagtccaggcccgacgcgcctgcgccctctgaacacgcccctccccgcccctatccccaccccttaccgcctggccccgcccacgccccttgccgcggggtgggagcccagacgcacaccgcgcatgctccgagcgcggcgcccccgacgcggcgctcggctcggctcgggcatttccgcctctttgttttaaactccggacgggcttttttctcctcctcttgggggggacccagagggagcggcgccccctcccccctccggcgcggaccccgcgtgcgccttgctcgcccgcagccccgagaccgcaggtcagtgagtccg

SEQ ID NO: 31407 - DNA, 2300 bp, Homo sapien
acacaggccaggtgcgcacccacgagaccattcctgcccgccagcctctgccccacagcccatcccgcccgcggctgcccactgctggtggcctgtttcacttccatggacacacggtggacggggccgatcctaaccatggctcggaagaggctgggacgacctgagggttaatcggagacacagagagcctggcggagagtggccctggggctcctgaaatggggaggccagtgaggggccagctggggaaactgaggcggttccaggaggctccgtcatcatctgtggtcacctgctgggggacccggggacgagcgctgaggctggacaggaggggcagcgactcgggtttcccctgggcaaataagagcagaacccacagcagccctctgcagcccacacagccacagcacagagcccacagcagccctcggcagcccacacagccacagcgcagagcccacagcagccctcggcagcccacacagccacagcgcagagcccacagcagccctcggcagcccacacagccacagcgcagagcccacagcagccttcggcagcccacggagccacagcgcagagcccacagcagccctcggcagcccacggagccacagcgcagagcccgttcctactccctcctcacgtggacacggctccgccatgcactgggtcagatggtcccatgggccccacaacccctcagggccgctgcccctcctcccagcagcctacacaccccacgtctagtccacaacttctcattaggtcttaatttatcatttcttaatatgcagaaatataaacgaaagcttaaagctggaaacagaacttcccacgattgtcacggctccacatgtacacccctcacagcgcggccggcggtccgcaatacgcacctcacacggcctctgacaaggagagacaggagctgaaatacgagtcctcatcaaaaccaaccacagaagcgcaggctctggtgacctgaacagtgtgggaagctccctcctgtgcccgcatctgcccgcctgctgcacccgcggtgtcaccaggccagtttcagatccaaaactgcctacttctctcagtgtgcacaactattggtatgtataaaggcagatttatcaacactaagacagtaatttcttttctttgcttttttttttttgagaaaaagtcttgctctgtcaccaggctggagtgcagtggtgtgatctcagctcactgcaacttctgcctcctggattcaagcaattctgtctcagcctcccatgtagctgggactacaggcgtgcaccaccacacccaactaattttttgtgtgtgtgtgtgagacggaatctcgctctgtcgcccaggctggagtgcagtggcgtgatctcggctcactgcaagctccgcctcccgggttcacaccattctcctgcctcagcctcctgagtacccagctaattttttgtatttttagtagagacgggggtttcaccacgttggccaggctggtctcgactcctgacctcaggatctgcccacctaggcctcccaaagtgctgggattacagatgtgagccaccgtgcccggccaagaataatttctaacaaaacacctggagtattttatgaagtaaataaacaaaagacagactttgaactggcagctgccaccccacccagcccacagcatgggctccgccttctggtccatggcccccacagcaccgctgtccaccagggtgctccgtggagcttcaccttccctgcctgtgcggccggctgtggtggcccacaggactgagcccctgacctggctggcatggccgaggacggactcgggtgtggaaaagcctccggggcctttgctgtagcccctgagcctccttgtcacccacttccctgtctcccgcagccgatcccacctcttcgctctcgtcccaaggccacgtgggcctgaccacccccagggctccgtgccccctcccggctgacaaccaccatctgccctgagtctttctgccggggctctgccattgggccctgaagttctcaaactgacccgaacattccttgactgttaacagcagctgctgtgcctgacgcttgcagtcctgggcagacagcagcccccaccatcctcacagctgctggggaagggagcaaggcccagagaccccttgatccctggacgccccacacgcctcctccctctgctgactccactctgccctgtccccggaatgcgctgcggccatggagaccacaggccttctggggagccagccagcctgcggtgccgt

SEQ ID NO: 31408 - DNA, 2300 bp, Homo sapien
tgagtgaggaaggctttattcaggaccagcactacaggtacagggaccatgcaacagggcttgccatgggtgccaaggagcagggtgggctcagtggatggaaaatgactgaggaacatcaggggttgggggattctgatgaaacccatctaactggattctagctggagacaggcagggcaatcagacagacccatagggtggtgaagcatgaggaccccaatcagatctccaggatgaaggtttgttgctaaactgacttagccagattctttgctaaaactgcattttacaaggaagtgggccaatgggcctaccagaagattcaggaagttaactaaagtttgaccacacaaaaaatctttgtcaggagccctctctagggagcagcatgtctgggtctcctgtaaccttcctgatgctgctggctgggaatgccccagggagctgcccagtcccagggcaggagggccccatgtgccctgaccccaggccgggccctcctggatgccaggtgggagctgggagggaacgtgctctcctccaagcccagggaagggtgtatccagctcctcctcctgctgcctctggggaagtgtgcaccccaggcaccaccaaattgcccagggtgatctctcctctgccagctggccccccttcctcctggaacagaaactcagtgtctttgcacccacccctgtgtccgtggctgctgccagctgcccctcaacagggcaccccaacatccagccactgctcagcctccatcctcccccagcctcccatttcccatccacagcctggtctggacccccttgcaagcctaagcagcgacttggacgtgccaggtcacgacccaggcagctttcccttggagtcttttttttttgagacagagtctctctctgtcccccaggatggagtgcagtggtgcgatctcggctcactgcaagctccgctcccaagttcacaccattctcctgcctcagcctcccgagtagctgggactacaggcacccgccaccacgcccggctaattttttgtatttttagtagagacggggtttcaccgtgttagccaggatggtctggatctcctgacctggtgatccgcccgcctcggccttccgaagtgctgggatttcaggcgtgagccaccgcacccggctcccttggagtctagacgagcccttcctacagcaatgaatgctgggtcagacctgagcttctccgggatccagctctcatctcaggtgacggggtctgaggcctcctgggaatggcactcctccccagatgtttactgagcccctgtgatatgcgctgctctgttctaggggctgggaatactagtccctccctcctggaactggttttcctagtgatggaggacagatgataaacatggaagtggcggtgtttgccctggaggaaaatcaagcaggacagggagcagagagcaatggttagggttactatttcatgagtggtcagggggcctctctgtcagagtgacgtgcacagacccggagggaggcgcgtgtcccgtgggagagcattctgggcagagaacagccattcgagagccaggaggcagcgctgcctgggtgccaccagcgtggccctggccccatgcactggctgggcaccaccctgcccccggagtctcctccttctgaacgtttgactgtatcttgaacacagcggggccggctttcaagctccagacacggcctcctccccaggccaggaagccctgtcaggcagcagatccggccccctcagcagatcggcccctccagaagacccgcccctcacagcagatccggccttcccagcagacccgccccccgagtagatccgcccctccaggatatccatctccccagcagatccgtcctctccagcagaaccgcccccagcggagccgctcgggcggggcctccgggcctggggaagggagcggggaccgggccgtggaaggaccgcgcccgcccctggccagcctgagccaatcagcgcatgctaggtgggccgacatgattggctcctagaggctcacgtgtggaggcctgaccaatcagagcccgagagacgccattgcaagcctctgcagaggcgctggagctgggtcagtccgccgctcaccccgcggccgcaccttcccgccttctcaggtaactaagtgcgggtctcgggcctggcagaagcttcttcggccccgtgccctcgcctggccccgccccgtcggttgtgtgcttgtctcgtcctgcccccaggccctgccggtccccaccgtt

SEQ ID NO: 31409 - DNA, 2300 bp, Homo sapien
aaaagacacagagacagatacagtgacagagaaagacagagacagaaagatagagacagagagacgggcagaaagacacagtgacagagagatacagcgacggagaaagagacagagagagaggcagaggaagacagggcagaacgtgagggctggcagagggtctctgtcctctgtgccccaggccccagctccaggtgtgcttggagctcaggctggcctgggttgtagaacggggaggggtcagcctaggagtccagtgcttctgctcggaagaacgggcacctccctgcactcctgtgcagactgtcccaaaggcaccagcatatcccttgcatgcagcttgtggaggtggcagggtcagtcatgagcctggctctgggctcagggggtcacccctggggtcctctctggggttactgtccgggttagctgttgggttatccacccagttagggatggagagagaaagcaccagggccgagaagtgacctctttcttggacccgaacatctcacccttgctgtcccctcccaggtcctgaggagactagaggagcagatggagcagagcaggctggggctcaggccgggcccccaggcatgtgtcctgcctcctgtccctgggcccaacgttctgagcccacttggctcagatcccgggagagaggaagggacggtgctgggggtgcccatggcttccagccagggaggctgaagagaccccaatcctagggcatgggtccccctctgggaggttgcctgtgaacccccaggcccacgggaccctcatggctgtctcagggagcccccatgggcttggccctggtgccttcacccttccctctcccccagcgctcccttcctctgcgaagggtcccctgccaagtcagcagaagagtggggacgggggcagaggcgctggggccaaggctgggagtccaggcctctgagtcctcctgagctcaggctaaacacggggcaccggaggggatggggctgagggcgggggaggggccgcatcttccctgcgccaggggagtccccaggactcagcagggaggggacagtgacaagttagtgcggcggccaccggcagcggcccccctcccccctccccacccccaccccgccaggagcacagggcagctctagggtcgcggtgcgccccatccctcccgccgcctggctcccgacactgcacagcgcgaaccgcagggccgaccttgcggcgaccccgctctcccgcagtgccgcgtccgctgcagaggaaatcccgggggccaggggagggagcggtggggtctctggccttcgtcccggtaaaggaaacagcgactccgttacaccgaaagtgagcccgggccggcctgcgggtctctggctgcgaggggcttgcgtgggttttcaggggtctgggggcccccttctcccgccctgcgatacggggaggtcggggcagaggggtcggggcggcgggcggcgctcagggacacggtcaccggagaatgggggcggcagcgactcccaacccctggcccctccgctcgggaggcagcgacttctccgcccgagggttttgcacccaccggccccgcgcggaccctgtagggagcaggcccgcaccgtcgggctgggggcgggggggcagagccgggggcgcccagatcaggggcgggcgggggtcgcaggcgcccgccgggggaaggtcgagcccgggccgggttggagggaggcgggggcgcgtcactcgggtccacccccgcccccgcccccgggtccacccccgcccccgccccgggtccaccccccgcccccgcccccgccccccgcccccgcccccgggtccacccccgcccccgccccgggtccaccccccgcccccgccccgggtccgccccccgcccccgccccccgcccccgcccccgggtccaccccccgcccccgccccgggtccaccccccgccccccgcccccgggtccgcctccgcccccgcccccgggtccacccccgcccccgcccggcgcccgcggccccgcccctcggcgctcccctccccgtgctcgtcacgctcggacgcgggcggggggcggggagcgcctgcgagtgacgcgccctcctcgcggtgcccttcagccgccgccgcagctcaccgggcgccacatggacccagccggcccgagcgcgccccgccgctgaccgcccgcgccccgggaaggtaaccgcgccccgagcgcagcgcgcgcccggcctccgctccccgggtctcccctcccggccccggcgtctcctccccggc

SEQ ID NO: 31410 - DNA, 2300 bp, Homo sapien
ggctggagtgcagtggcataatcttggctcactgcaacctccacctcccagtttcaagcaattctcccgcctcagcctcctgagtagctgggattacaggcatgcaccaccatgcccagctaatttttgtatttttagtagagacatggtttcaccatgttggccaggctggtctcaaactcctgatctcaagtgacctcccaaagtgctgggattacaggtatgagccaccctgcctggccaagccaatatcatttttaaccatcctcctaaaatcaggaacagggcaggagtgtcttttctccacttgtacttgtcggaagtcccagctgctgccatttggcaagaaaaggagatcaaagttacacgcactacaaagggagaaataaaattactcctgtctgcagatgacacgattgtctgcgcagggactctgaagcaatctacaaagatcttttagaactatgagttcagtaaggtcgcaggataccaggtcaacacacaaaaatctgtcctatttctgtttacttgcaattatataaggaagccaacatttaaaacagtaccatttacaatcaccttttttttttttagaaaaaataaacatttaggtataaatctgaccagacatgtctagggcttgtgtggtgggactacaaaaccaaccgtggcgaaagagaccagaggagatgcgagtgaagggacggacgctgcactcacggcctggaggctcccgagtaaggtggccgttctcctgtgtgcatctgtagcctaacgcagttcctaccaacgcctcagcagggattttcctagatacaaatgagcttactgtacagtgtatttgaaagacagatggactagatgcctggaatagtttatttttttgagatggagcctcgctctgtcgcccaggctggagtgcagtggcctgatctcggctcactgcaagttcccttaccgggttcacgccattctcctgcctcagcctcctgagtagctgggactacaggcacccgccaccacgcccagctaattttttgtatttttagtagagatggggtttcaccgtgttagtcaggatggtcttgatctcctgacctcgtgatccgcccgcctcggcctcccaaagtgctgggattacaggcgtgagccaccgcacccagccatgcctggaatatttttgtaatggaaaaatgaaatgggagaagtcactgttcctggctttgaggcttactctgaagccacaaatcaacattgcggcgatggcagacagacgcgtctgtggagagaagagaggactcaggccacacaagagagaccagcggagctttgacagaggcagaaaacccgttcatcagatggtctggagcacctgggcagcggtaggcaaagccctaagccctcgttctacagaacagctcatcagaatgcagggcctttaggtgaaaacctttgtggcctggggctgggcagagttcgtagactcgccacccaaaccacacccataagaggacaggtggacccaacttcagagctctgagcatctgagctgcggactgggagaagatatttccaaaccacctatttgacaaaggactcatctacagaatataaaaatacagtcaaaaacaaactgaaagcaatccagttagaaaatgggcgagagcgcagggtcctctgcctacgaaaaccagagacctttgttcacttgtttatctgctgaccttccctccactattgtcctgtgaccctgccaaatccccctctgcgagaaacacccaagaatgatcaattaaaaaaaaaaaaaaaagaaagaaaatgggcgagagacggccgggcatggtggctcatgcctgtaatcccagcactttgggaggctgaggcaggcggatcacctgaggtcgggagttcgcgaccagcctgaccaacatggagaaaccctgtctctactaaaaatacaaaaattagctggacgtggtggcacaggcctgtaatcccagctactcgggaggttgaggcaggagaatcgctggaacccgggaggcggaggttgcgtcagccgagatcttgccactgcactccagcctgggcgacagagcaagactctgtctcaaaaaaaaaaaaagaaaatgggcaagagacatgaagagacctccagcacattgacatccgatggccaggaagcacaggctgagacacccagcatcaccgaatgctggcgcggaggaggccggagcgcggaggaggcccgaacacggaggaggctggagcgtgtgtctcacgcattgcccggggggcga

SEQ ID NO: 31411 - DNA, 2300 bp, Homo sapien
agtgcagtggaacacagggacagaggccagttctgaagcccacagacctctcccggggctgctgggaagagtgacccaggtcatcgatatgggggatggtgcaggaggcaccactgcagaccccgcaggctctacgagggtcacgggtgcaggcgcctctgtgcagtatgcttgacgacttacgtgaaattgataaattcctcaaaaccagttcctgccacaacttacccaatatcaagtagatcctttgaaaaattctataaatacaaagaaaataaattcataattaaaaacttcccaaaaaggaaacctgcggacccacctgggccactggagaatttcaccgaatgttgaaagagaatgccaattccaccctctcacaggaagcaggagagacggagcactttctaattgattttacgaagctcatactatcaccctgataccaaaatcagacagaaacagcaccggaaagggaaactgggactatattccccatgaatatacacacagatcctcaaccaaacttcagcaaataggatttatcggtatataaagagaattctacaccaagatcaagtaagatttattccaggaatccaaggctgacatttcagaattgttaacaaaatctatttaggttgctgcgaaagtaattgtggttttgccattgaaagtaatcacaaaaaccgtaattacttttgcactaatctgatatcatattaactggctgaagagtcatgtggtcacatcaacaaggcagaaaaggcatttaacaaaattcagaaagtcagcaccttttatggcagcactgtcagccagtcatgagcagaacgtcgtcagcttggtaacaagcatgtctagagacccacagccaggccaggcggagtggctcacaccgtaaccccagtgctctgggaggccaacgtgggaggatttcctgaacccaggagtttgaaaccagcttgagcaatatagtgagacccctgtaagaattagccagctgtggtggtgagcagctgtggtgagcagctgtggtggtgagcaaatgtgggcagctgtggtgagcaggtgtgagcagctgtggtgagctatggtgagcaggtgtgagcagctgtggtgagcaggtgtgagcacctgtggtgagcagctgtgagcacctgtggtggtgagcagctgtggtgagcagctgtggtggtgagcaggtgtgagcagctgtggtggtgagcaggtgtgagcagctgtggtggtgagtaggtgtgagcagctgtggtggtgagcagctgtggtgagcagctgtagtgagcagctgtggtgagcaggtgtgagcagctgtggtgagcagctgtggtggtgagcaggtgtgagcagctgtggtgagcagctgtggtgagcaggtgtgagcaggtgtgagcagctgtggtgagcaggtgtgagcagctgtggtgagcaggggtgagcagctgtggtgaggtgtgagcagttgtgagcagctgtggtgagcaggtgtgagcagctgtggtggtgagcagctgtggtgagcaggtgtgagcagctgtggtgagcaggtgtgagcagctgtggtggtgagcaggtgtggtgagcagctgtggtgagcaggtgtggtcccagctactcagcaagctgaggtgggaagatcacttggatcgcttgagcccaggaggtcaaggctggcctgagctattattgcatcactgcactccagtctgggcagcagagcaagaccctgtctccagaaacctgcagccaacatcttttttttgtttgtttgttttgagacaagagtcttgctctgttgccctggctggagtgcagtggcataatcttggctcactgcaacctccacctcccagtttcaagcaattctcccgcctcagcctcctgagtagctgggattacaggcatgcaccaccatgcccagctaatttttgtatttttagtagagacatggtttcaccatgttggccaggctggtctcaaactcctgatctcaagtgacctcccaaagtgctgggattacaggtatgagccaccctgcctggccaagccaatatcatttttaaccatcctcctaaaatcaggaacagggcaggagtgtcttttctccacttgtacttgtcggaagtcccagctgctgccatttggcaagaaaaggagatcaaagttacacgcactacaaagggagaaataaaattactcctgtctgcagatgacacgattgtctgcgcagggactctgaagcaatctacaaagatcttttagaactatgagttcagtaa

SEQ ID NO: 31412 - DNA, 2300 bp, Homo sapien
tcgcttcctgcacacgctggactggcagggtaggcagcgtccctggacctggccacttgcagagggcaggcccctggtctggaggtgcccctggggcagggcaagcgtcttgggagacgggcctccggcagagctgagttgcacctcagtggggctgtgcacccggcatgtcagcctgttctttaatggctcacgagctaagaatgatttcatatctttttaaaggtgaaaaaaaaagaacatgcccacaaagtctgaaataacaaccctcgctcttcatcccagtctgtgggcctggggaggctggcagcatgggccatgctggcggggcccctgggtacaggggaagggcctgggcggagggacagactgtcaccacctggggatcccacacctctctttgcccacacccccagtgggctcccagcccctctgaggcttttcaggaaaacacctgggcgccatcactggacctcaccccagacacaccccaagggatgcacctgccacttcctgtcccagcacccctggccttcccatcgggctcgtcccttctgccgcctgttcccagagcacccttgattggtgttcctaccccctagtgctgccatgtggcccccacttgactcagcctgaggcaccgcagaggcccaggcggagagagccacaggcagacccttgaggcagaggctggaggtgggtgtgctggagacgcctcaggaacaacaccccaccgcccgcccagaagcttctgcagcactcgccagggccctgggccaaggaggcgctgaggggccgtgccatggggacattggtgctggccatgtgggttcgccaaggccctgggctgaggggacgcgccgtggggaccctggtgttcctgcagcacttgccaaggccctgggccgaggaggtgccgaggggccatgccatggggaccctggtgctggccacgtgtgttcaccaaggccctgggccgaggaggccctgaagggacgcgccgtggggaccctggtgctggccacgtgtgttcaccaaggccctgggccgaggaggccctgaagggacgcgccgtggggaccctggtgctggccgtgtggtctcactagcctgtggttttgtttccttttcgcagaagagaaggaggcagagactggtgcagaaaatgcctcttccaaggagagcgagtctgccctgatggaggacagagacgagagtgaggtgtcagatgaagggggatccccgatctccagcgagggccaggaacccagggccgacccagagccccccggcctggcagcagggctggtgcagcaggacttggtttttgaggtggagacaccggctgtgctgccagagcctgtgccacaggaagacggggtcgacctcctgggcctgcactccgaggtgggcgcagggccagctgtacccccgcaggcctgcaaggccccctccagcaacaccgacctgctcagctgcctccttgggccccctgaggccgcctcccaggggcccccggaggatctgctcagcgaggacccgctgctcctggcaagcccggcccctcccctgagcgtgcagagcaccccaagaggagggccccctgccgctggtacgtgtttctgttctgaaggcgagtggcttcacagtagatgagtgatgaggctgagtcattctcactgcatgggcgtgtttcgaaggtgcttgcaggaagggaacgtgcccttcccccacctcccccaggagcagcctcggggtcatgtcagggttctgtgctgcccacctgagctcacgggccgggagctactggcttctccatctcagcagtgttgctgtgtccctgggaaagtcatcctgaggcgtggggcacggggagcccctgggctgactgcctcagtgcccctgcgagggcagccgtggggtctgggctgcccagctggagtggcctcttgggcaggcctgactccagagctgggctcctttgtcttcaggcagccgggctgagtcctccccatgcccgcctgtccccacagctgacccctttggcccgcttctgccgtcttcaggcaacaactcccagccctgctccaatcctgatctcttcggcgaatttctcaattcggactctgtgaccgtcccaccatccttcccgtctgcccacagtgctccgcccccatcctgcagcgccgacttcctgcacctgggtaagtgcctctcgcctggcagccagctctccatggccgcctccctcaggaccgcagcctctggtgggaaacagagctgtgggtctcaggcagtgg

SEQ ID NO: 31413 - DNA, 2300 bp, Homo sapien
ggcacagggtgctctcccctcgtgcagggagaggatgttttagagggtgagcaggaaggggtgaactagaggcctttcacacatcacaggcatgtgtggagctcagagaagtgacagttaaaaccagccgtggctctgacccacacaggccgccgggcccgtctccctgccctccctcggcggatcccactctgctctgggtgttcctggccctgcagacactggcagcctgggtttcccaggaactggccgccactcttttgtgtttcttctttattttcttaggtgtataacattcaacatgtagagattttaggtggcgtaaaataagacaggcatggggagcctgctgcccgctggagagcccaggcttatcagtgcagtttatgacagtgggatcagagatgatcataggaaatgtgtgaaatagcctggaattccttagagagctgtggggctgggaaatggtcagtgtcaggtcacacctgcctccccgtgcggccaacaccccaaggcgggccctgctgacccctgcccctgctccccacccacatggccgacaccccaaggtgggccctgctgacccctgccctgctccccacccgcacggccgacaccccaaggcaggccctgctgacctctgccctgctccccacagctcagcctgggctgcctccccagccccacagtgaacacagctttgtttcccccggaatcatgttcccaattccctggcagccggattctagaggtcttggttttatgggcatctgttgacagttgtggatttttgtcagggcggacgtcgtcatttttatggaaaacacatttagtatcccagagtgcgtgctctgagctgccgggtggctgcagtctgtgtgtgctgggtagtgagggccagcgcctgccttggaaccctggggtcccacctcagagctgcctgcctgggtgccggagtctccagctgtgggatgttgtcccgtctgctctgagcacgtggcctcccctggagttgcaggaaacatggcggccccgcccggtgcccctctgccttgaacacagtcgcgggcatccccactgtgacgtccgaggagcgagtgaaatgatgctcttctggggccgtgaccgggggtgctggtgccctgtgggttcctgggacagctgctgggtcagctcacagggctccagcttccgcaggcgggggtggccggctgccctggttgttctcgccccgctgcctgcagctgccacctgtttccatgcacgtttctttagtgaatgtccaaggacttacagactacttgggtggccttcctaagtggtgtctacttgtaaccgcaggtatgacctggacgcgtgtgacattcaagaaaaatacccggatttatttcaagtgaacctggaagtggaggtggagcccagggacaggccgagccgggaagccccaccatgggagaactcgagcatgagggggctgaaccccaaaatcctgttttccagccgggaggagcagcaagacattctgtctaagtttggtaagatcccgcaggtgaattaggtgaaccctgttctggtgagtgtctctgtggagagagacacctttggctgagctctggcagggctgggccccacgcctgctgctgcacccaggccctgagcagcttgggctgcaggaggttttggaaactccgtcgtggatgttggacaccaccaccagctacaccagagaaggactcgcaggctgcaatttctgaggcccatgggcagggacggaggcagagggaggaaaacccaggctcctggagcgaagcggggttttgtcccaggcgtgtgtctgggtcagatttttgtcatgtgtgctggacacacgtccactctcactgtgagcctcaggcctgctggcagcatgtggaacagaaccctcgctcctgtcgctcttcacttccgagcagtttcgaaacggcagcccaggaagtgctggcaggtgggcccagggccgtccactgctcatgccacgcttgttctcggctcttggtttgcagtgtttgctttttctttctgagcatcttcagcgtccctgaaagaggctgtatgtgtgacctgtgcgtgctgtgtatgtgtccgtgggtggtgtgtgccgtgtgtgtgtgtgcacgagtggtgtgtgcattcatgtgtactgtgtatctgtgtgctgtgtgcattcgtgtgtacagtgcatctgtgtgtgctgtgtgtgcgttcgtgtgtaccatgcatcggtatgtgctgtgtgtgcgttcgtgtgtaccgtccatttg

SEQ ID NO: 31414 - DNA, 2300 bp, Homo sapien
cacgtacagagagggtcacgagagagactgtggcactgcaggggcctggcatgcttttacttgaagttctaggagaagagagagagtggaacagaaataatacttgaaaaatcattggccaaaaattttcctaaactgatggaggacgtcagaaccacgaaatcaagctctgcagacgccaaagaggatactttttttttttttaacaaaaagaagaaaagaggttcagtacctcagagcatcctggttgaattgctggaacccgaagagaacaatctccagcccgaggacaggacggggtgggaatgcatgacctgcagagtgacacccgaaggcagctgaggcgcgccgtctctaaagtgctgagagaaaaatacgggaattctatatccagtgaaattatccttgaaatatgaaagccagttaaggatgtcttcagccaagcaaaggatgagagagttgattgttggcagaactgctccatttcagcaagtatccaaggcaagcctgcaaagcctgcagcctagggaaggaagggcagggaggctggaatgcatgactctgtggtgaaatgacaccagcaccagctgcttaaaacaccaatactaacgtcctgtgggttttaaaacctgtttggtagtaacatatctgacagcaggagcaccagcgcgtgcgcacacacagacagcaggagcaccaacacacgtgtgcatgtacacacacacaagcaccagcgcgcacacacacacacagccgaggaggggattaaccgagtgaatgtgtttcaggagctccatcaccaggaagcagagaatgtaccaatccctagggcagattaaagatgcaatcaagaagaaaaatggaacaaaaaatatgtgatgaattcgccagaacaacgtagagataaacaaacaaacccaggtgggatatagatagaaaacagccagctggtagaccgacgccctgctgtgcctgtcagtcatcccattgaaggtggatagaagacacactccagttaatcgggctggattaaaaaccaagctcacacaaaactcaagtctatactgcttacaggagccatacttcaaaacccttgcacacgaagacctagcaaggctgaagtggaataattggaaattgcttaccatgcagaccataacaggaagaaggctggtgtcactgtccatatcaggtgggatagaccaaggcaggaggtgacgggtgacgttgcaggggcgagggcagtgacatggcttcagtacaggcagcacaaagggcagaaggaggggtgaagttgacaggcccacgctgatggccgcctctctccccaggcagtggaacaggtagacaagaacaggatatagtttttttttttttacaaggtttaaccaacttgacctgagttttgcaaacttcagcgaatacttggagaaatggcatctgttcaagtgggcgtttattaaagtggactccacgttgggtcatacagcaagtctcaaggcatctcaacagtggattaaagtgggaatcagtgacaggaaaacacccagagaccgtatgctcgttaagtgacctgtgtgccaaaaaggaaatcactgttgaaatgagaaaatattttaaacacattgataatcaaaataccacttaccagatgtgtggggtgcatctgaagcagggtttagaggaaatgtgtaacttcaaatgcatacattaaaaggaagaaaggttggttgcgcacagtggcttacagctgtaattccaacactttgggaggcaggaggattgcttgaacctgcgagatcaaggctgcgctgtgggcgagaggcgtgttccctgcgtggtgagcctgcgccgtgcctgggcgagaggcgtgttccctgcgtggtgagcctgcgccgtgcctgggcgagaggcgtgttccctgcgtggtgagcctgcgccgtgcctgggcgagaggagcacagggttgcagccatggcacagatgtaacagctgagcctgtcaggagtccgctctgccctgttggagctagtctggcaggagcctgcgggcagtgtcctctgcagtccagggctctcgggagtggccagccctgctcacagacctcattgtgccctcagcgccaggctgggtgagccgagcctgcaggcccagtgcccagggccatctcaaggggcagctgggggagggaggctgggcatgagcggcactccctctggggctgcccaagttcggtctgtcccaggacccaagcccgtctggccgacctggctccctgcacactccctccctccgtgccc

SEQ ID NO: 31415 - DNA, 2300 bp, Homo sapien
cacagaagctgctctgggtgcggccactctggagcggggcccttgtgccaggtgagacacccttctcctcagcaagcggacttggtgcgcagcaggccaatacgtcggtgccgacatgccatgaagcacgggaggccgtaggagattgagggaggtgaatgactcagtcctcatcgtaaggagcgcgctgaggccgaagatgagcagcggagctggtgcatggggccgactggcctgaggtcatcccggggcatagtgtgcgggacaggctgcccctcagtctgctgtgcatttggaaagctgcacggaagtggtgcaacataaaaaatactgtttgtgggatgcaacttttcctttgaaatgtttgtattttttcagatcacgaggaatacaacaccaatgtatagaacaccagaaatcatagacttgtattccaacttcccgatcggcgagaagcaggatatctgggtgaggtctggcgcctctcagtggcagtgcctggctccgtgcgccctacttaacctgaggcggcgtgggccgggcacctgccactcggaactggcctgcctcctccaccccctcttcccctcccgtccccttttctttttcctttccttaagaatcactgtggctgccactgtttttttgggtttttttggagacagggtcttcctctgtcacccaggctggagtgcagtggtgtgacctcggctcaggctcaccgcagcctcccgcccctgggctcaagggatcctcccacctcagcctcccgagtagctgggaccacaggtgctcaccaccatgcccggctattattttgtatttttggtagaaggggtggtctcaccatgtcgcccaggccggtctcgaactcctgagctcaagcggtccacctgcctcagcctcccaaagtgctgcgattacaggcttgagccactgcaccctgcccaaccttgactacttctaatagggatgagtcgagtagcagttgggggcgtcctgtgcggctgggtctgcctgaggctcccctcggccccgtccatggcttgttgtgcatctggccctgagtgccttggcccaggagtgtccctgccacaccccagccttgctgcgctcagagccaggccagagtgagggctgagcctgatggctggggtggtctcctgcgtcctccctcatccctgcatctctccaaggccatgtccccattgaccgagggtgaccacgcgtggagggtgtcctgccttgtggttcttttgacgtccccttaccccgtcattcagccaccaggtgcggcagttggccctccgtagtgtatttgcctacggaccgggtcagccgtgccatcagccacagcacatgggctgaaggctgagacagcacgtggggctgcaggctgagacagtatgtgggctgtaggctgaggccctgtgtcccttgaggagtgtggaaggatggggccacgtgtgtggtcattgcctgtgttcttggcccaccctggtgactggtcctctgcacatcccgcacgaggacactcctggccggctcttgctcggcctggggtcccggtgtgagctcttactcttggctggataagatcctgatgccgaagtaatcaccagtcccttctctgggctcacatattgggtgattgacgagaagtcgctgattgttcaaggccagttctgcgaaaatcctgagcagactgaggaggctgcttcctgcagcttctgccctgtgccctacaccctgcatatggggtcagttctgaaaagtgggtctctgctgttgccaaggacaggacaggtgccttgcccctcgcatagcacacagcagggtctgtgctggtcccaccagctcatagatcttcagtgcatgagtgtgggaaccccggaattttgaaaggaacctttatttatttatttatttatttatttatttatttatttgagacagagtctcgctttgttgctaggctggagggcagtggcgcgatctcggcgcactgcaacctctgcctcccgggttcaagcagttctttgcctcagcctcctgagtagctgggactacaggcatgcaccaccacgcctggctaatttttgtatttttagtagagacgggatttcaccatgttggccaggctggtcttgaactcctgaccttgtcatccacccgcctcggcctcccaaagtgctgggattacaggcgtgagccactgcgcccggcctgaacggaactttttaatcttaagagcctagagtccgtttaacactgtcacctggacagttctttgcggtgaa

SEQ ID NO: 31416 - DNA, 2300 bp, Homo sapien
gaaacaagttcttttgcacaacctcagcagctgcccacatttccttgttcttcttcctgggtgctaagtgacccacaagcttctttctttatacgaatcttcctctccgggccccagtgagggtgcattctccatccctcccaccaagatccgtgccatcttctgcttggccccttcccaaagctcacactgtctgtaccacccctaaggatctgtccctgtgctgcctctgtctctccaccccttgagcacaagtctgaagttccagaaagcaagtcctgtccacaataaacttcttaaagaatgaagataaccacctagtattttcagaataaatgatttgatctgagagaaatcttccaactgatgtgaaagaatatcacacttcagcccccacttctgaaagaagagcttagactttctgaccaaatcatacccaaaatctgtttggttttgaccacaatggagacaaagtgtgtgataatgctacagtcaaaatgtctccgcaggccttttgtgataatcagaattctgggatagtctcctgtctggtcacagagcaggcacctggacaggctaaccctccagccctgagaggtaccagggagctggtgagggtgagggcttttgtgtcgcttcactccctctccctgtgccaatacagcagaatagagttacgcttccgcacccaagtcaactgtgtttagcccataaacttcacagccagtgaaatatgacacacctccaggcaccactggacaaaaaatgtaaggaaaatccacaagagagaatgggacccactggcactggtgatcgattccgtgtgaacggagaggacatccagggagctagaaatagcatgcagagacaaaactgactcaagactgactcaagaggacttaagccgagtgacctgtccactctgcaagttctatataggtcacaaccactggctctgcttcctgtactacacacggaatcacacgagtagatgttcaccgggaagagaaacactgaggtgttgaaagacgaagggggatcacgagacacagcccagtctaccctcggccaacccccccaccccccaggctacaaccgcaactacctgcaacacgtgtgcacccaccaactctcaagttccctggactgtagaagaaccagccctaacctccaaagtccagtcctgtccctgcctgctcaataaccccagatgtccggcaaaaggccaaggcttaaacccacctcctgcaccgctcacctcctgactccagctgtcggccttctaggcaccgtccctcagtctccgctgtgggtccccacccaagctccctgcctgccaccatcccccacctcaccgtaacatcttcccccacccaccctgagggggttccccaagccccaggccttgctccgacttgaccctactcttatgacaagaaagtaccccgacccggtcccagcctcgccctccgcaatcaccgccagcaggcactcacctacgcccgcgctatgaccttcgcctggccctgacccacgccctcggcagagaccctcccctggccgaccctgacccacgatcccgctgggaccctccccagccctaacccacgcccttccactccgggctgacgctgcccccagcgtcccggagacaacactccgcggccgcacccgcgctgccgacccggggcctcaccttcggccaggacccgccgcacccgcagccgcagctcgcccagttccaccgtctgccccacgaagtcactctggtcgcggccggaagcaccgcccagggagcctggacccgccaagaagtcgagcgccgactgcagcagcgacatggcggtggctgcgccgcaccccgcggcagccggagtggtcgggctcgggctcccgctccctcgccgtccgggtcagctcagcaaccgccggcccggaggtgcaccatcttccgcctcgacgccgtgacgtaggcgcccgtgaggacgcgtcgcgtcaggcggcgacccggcctagccccgtcccctccgccgcggcctcacttcctggctgcgcgcgcaggcgcggaggtctgacggagacagcgcgtgcgcggcgtcgccgggcttgcgatgaacttccggctgtcaagctcccggccgggctgactcaagcggaggcgcgcggaacagtcgccgaggcgattcccgcccaggtagttcagcgccccagtccagctcccggtaccgttccccacatggtctgttttgtgggaggctccttctcaggtgtctccggtttaagcgcttcgccatcctctg

SEQ ID NO: 31417 - DNA, 2300 bp, Homo sapien
tgatcccttgtgaataaatccaacacatatcttccatttctttttctacttgacttttaagtggcattcgacactcttagctgcactctctgccccgaacatcctcgttccttggctctgttacgacactctcttggttttcttcctccttcactgactgctctttctccacaaactgtctattctctgaagattctaacctctttatgtctagtacaccatctctgttggtcctctcttcagctcctagagccaactgccacctctatgctgaggatgcccagatatctgtctctagcagggattctttcctgagctctctatccttctattccacagtcgaccagacaaacgcactggctggaaaagccatgacttgcgttgaattgcagttgtatcacttgttggccctggccgaataatggcattgttgagcatattttctcatcccaaaataaagggggttaattatactgtgctttcttcacaaagatgttttcactacaatgaactattacagaaaagggtgttgtaagcaataaatcagtgcctaaactaagctattgctactgttatttttgttatatatatttttaaagatgtcatttggcttcatgcaatacttcattccataacatagataagtgttccaacgagctgaggctattatcttttaatgataaagataacagatgttagcttctgggacggctaagaggctgatgtgagctttagaatccatttttgagttggagaacaaataactctgttgaaggggttgcaaccttaaatgactataggaaccaggcaggtaacatacatgagcccatctggtcaggcaaatgactgtgtcttacctcaagggaccactctaggtaattggtaacacacatcattttgggtccaatattgacaggtttgatttttccacagaagctggaaaactaggtttttaacatttaggcctttcaattattattattattattatttattttttgaggcggagtctcaggctagggtacagtggcgcccgcctcccgggttcaagcgattctcctgcctcagcctcccgagtagctgggattacaggcacccgccaccacgctcggctaatttttgtatttttagtagagacggggtttcaccatgttgaccaggctggtctggaactcctgacctcaggtgatccgcctgcctcggcctcccaaagcactgggattacaggtgtaagccaccgcgcctggcatcagtctttaaatgatagcaactaattcacctcctgctacccactcccaacccccaaatactgtgtgggccaaaaactaaaaatgcattgtctgtgagccatttccttattatcctataaggaaagtcaccatttcatctccaaatagttgggcattacgaacccttccaagtggttcatgaggatttgcttttgccttggaaaatgtcagggtgagaacgaaccttgagggtcacagggcagtctctgcagtgttgtggttgcccaggacgaaggtttttctagcccacggctcccactactggtcactgccccaggccagaccctggccctctcctcggaagacagagcaatgcagcagcgtttcccctgcaaactgcctgcctggctgctgggagggggctgccaaccttactcactaagcgtcacaggaaactccgacctccatgagacgaaaaccaagtatttactgaaagcttaacgcacgctaactccttgctccttagccaactgagagaaaaattcgcgaacccattcgcaaacgcggcgctaacagcaaacgggaggctgactccacccagaggatggcgaagcgcttaaaccggagacacctgagaaggagcctcccacaaaacagaccatgtggggaacggtaccgggagctggactggggcgctgaactacctgggcgggaatcgcctcggcgactgttccgcgcgcctccgcttgagtcagcccggccgggagcttgacagccggaagttcatcgcaagcccggcgacgccgcgcacgcgctgtctccgtcagacctccgcgcctgcgcgcgcagccaggaagtgaggccgcggcggaggggacggggctaggccgggtcgccgcctgacgcgacgcgtcctcacgggcgcctacgtcacggcgtcgaggcggaagatggtgcacctccgggccggcggttgctgagctgacccggacggcgagggagcgggagcccgagcccgaccactccggctgccgcggggtgcggcgcagccaccgccatgtcgctgctgca

SEQ ID NO: 31418 - DNA, 2300 bp, Homo sapien
gcaccattgagcactgagtgaacgagactccgtctgcaatcccggcacctcgggaggccgaggctggcggatcactcgcggttaggagctggagaccagcccggccaacacagcaaaaccccatctccaccaaaaaaaacacgaaaaccagtcaggcgtggcggcgcgcacctgcaatggcaggcactcggcaggctgaggcaggagaatcaggcagggaggttgcagtgagccgagatggcggcagtaccgtccagctttggctcggcatcagagggagaccgtggaaggagaccgtggagggagagggagagggagagggagagggagagcggattcaaagttttaaggccccttcagcgagaagctgctggtggctttggaggacgttctaggaagtccgtggagtgtttgctggaaggatgctttgcccgccattttaattaacgtgtgcgtcagaaagcagaaagttctggcagaaatggtagatgagggttttcctttttaagatgtttttgatgctctccactgtctcctaaatggagaaaggtatgtccttaaacagtttttcctcagaagccagctgcagtttgcaccgtggttcactgccatgagcaccacgggctcagtgagccacctcctcctcatgggccacaaggctgggtcctagctctcccagggcccaggcacagggggtcttggggcctggctgagggcaggctcggggtggggtctggcacaggagacagggaatgcaggggtggtgactccgggcctcccagcataggtgggcatcaggaaaggatttctgcggagcaccctgccacagggcctctgctccggctttccgcctggacgccttcctgctgcccccaggcagccctcattcttcagggtgctgtctgtcccagagcgcagctcctggagggtgaaggttccctgaagctttggctgcattccctttaccctggggtccacccagggtcctaccccagcagctcaaccagcagcttctggacaaacagaatcctccctggttgaggactgcgtctcccccctcaccatctcaggggcctgctcctccctcctcagactgggtccccggctcaccctccattcctggaatcccctgtggtctgggtgccctcaccagcacagcccctaggacaggtctcccggctccttccctccagagtccacagcccccagcccctttcaggcgtctccccacaggcccttccctgctcttcctgccccctgagaccgcctgctgcgatggccctggagccctgccctctgcaggtccccgctcggtggcccggggtggggtcccccgcttcgcagactcctatccacagttaggcccacgggggcaaggacccagactgctgccagcggcggggaggggtgacccgcgtggacgcggctctcaaaggacaccagcgccacctgaacaagacccgtggcgcgcacgaggcaggagagctgggcgctcggcgtgaggcccgggtgggggtcgcgagcggacagccccgggccgcaggcgggtcccccgttgcagtgaggacagcggtcgggcgccgggggtcctgggcctcgggcagggccaagtctgcgcgtgcgaagaccccacggacggagccgcccaagcaccgcaaaccccgctttccgggacccactgtgggaggcccgcagcgctgcccctcgccgggggcgtcctgcgcggccgggggcctcggacagcatccgcgtctcgcgtgggaggcgcctgtctgcgcagccgcgggccgggaccccgcaggtacaacgccgcgcgtgcggcgtccggagaagtctggcccggctgcggtcaaaccgagcccacgtggaccagttccccacggctggttcgcgagcggcctccgcgcacaggccccgccccttagcaggccccgccccgcccgatcacagggcccgcccccagccccgctcatcgacggggcacggctgcgacccttagcaggccccgccccgccagcccccagatccgcccaccagcagcgccccgccccgccccgcggcccgcgcctgcgcagtggggcaggcgcagtcggaagcagtgtaccgggccgtggagcggcggctcctgtacccccggcgcggacctaaaggggctcgggccgctcgggccgggaatggcggcggcggccgagcccggggcccgcgcctggctgggcggcggctccccgcgccccggcagcccggcctgcagccccgtgctgggctcaggaggccgcgcgcgcccggggccggggccgggg

SEQ ID NO: 31419 - DNA, 2300 bp, Homo sapien
tgtccccatcatgcactttgtaataatttttcctgacccggatccattccagcaccgtgcagtgaggacttctgtctgtttttgttttgttttaccttcctccagggaaggtgtacttttctgtccacaggtgtcccggtgagcggctcaccttaattctctcagggcttgaggtgatttaaggctggcttcagtccccacaaagacaattctgttgctggtttacctttgcttttaggggatagaactttggggtcccaagaaaaacccaaagtctttaccaggccccccgcctgagcctcgacttctgtcctgtggccacagtgtgaggaacgaacgcagcagcgtgtcgccatgtcttgtgtggctgggatacgctgcaggggtgtggagtcgccgccccaaagcgggccccgccccctcccggcttgtccctgcagagccccgaggcctcagaggctcctcagagctcccagtgccctggacggttccgttcagcgctctccagttctgatggttgctctcaggaggcggctggtctgaaacaattcagtttccattgctgtgtcctgcaccacggtgtgggactggtggtttcttactgtttttctcagttctctgacgctttgaggaattgtttttaaagcgagttatccatcattttagttgttttctctggggtcgttggactgagggtcttaccccgctgttcctggagacagttctgtacttgcatggtttctctcgcctttccctccctttcttactttttagtttcttaatgaatttttttgtattatgtttttcctccttgctaatttggaatatatacacactatttcacttttaaatggctaatcacttttaatgcaatttcaacataagaagacctaatgttaagcaatattttaacccctctccccaaaataaaaagacccagaacactgtaactctaattatccttctcccaacttagagaggattattgtccagtattttcgttttgttagtagactgttctttttttcttttctttttttagagatggggtctcattttgtcaaccaggctggaatgtagtggtgtgatcatggcccgtctcagccttgaactcctaagctcaagcaatctcccacctcaatttcgtgggtagctgggcctcacaggcatataccatcgcatctggctaaattttttttttgtacagatggggtcttggtacatctcccaggccgatttcaaactccaggcctcaagtgatcctcccgtgttggcctgcaattccaaagtgctgggattgcaggtgtgagccaccgcaccaagcctgttctttccattattatttttatacaatgtttgcttggattcacacatgcatacatggactacacatgtactacagttgtcccatggtatcctcggggtattggttccaggaccctcccagataccaaaatttgcaggtgctcaagtacttgatataaaatggcacagtatttgcacattacctacgcacatcctactgtgtagtttaaatcaagattacttatagtccctaaaacaatgtaaatgctctgtaaatagctgttatactgtattgttttaaaatatgtattatttcgtattgctttggctttaaaacaatattttcagtctgcttggttgaatccatggatctgaagccaagtgtaaggagggcccagtgtgctcttctggggtaattctccttcctgctaaagcgcacgctttactcaggaggctggggtgagaaaatcgctgaagccccggagatggaggttgcagtgagctgagatcgcgccactgcacctcagcctgggcgacaaagcaagactctgtctcaaaaacacacaaaaacagagaaaaacaagacagtaatggctcaactcacatagcaccaacgggcgaagcgttcttctgagcgctttccgagtcatcggtcctcagagcagcccctgaggcccgcaaggaagcggggctccaagccctgccgtgctcccggctccccgaggctccccgaggccacccaacccctcccacccggccatcgccccctcaccaaggccccgccccgcggcggcggtcacatggggtgcgcgcccagactccgacccggaggcggaaccggcagtgcagcccgaagccccgcagtccccgagcacgcgtggccatgcgtcccctgcgcccccgcgccgcgctgctggcgctcctggcctcgctcctggccgcgcccccggtggccccggccgaggccccgcacctggtgcatgtggacgcggccc

SEQ ID NO: 31420 - DNA, 2300 bp, Homo sapien
gctgcaggacctgcgccgagactacggggccctgggcatcagcctgctgctagcctgctgcagcccgcctgtgagagacattctgagcagaggaggcttcctcggggagggccccggggacacggctgaggaggagcagctgttcctcagtgtgcacgatgccgtgcagacagcacgagcccgccacagggagctggaggccaccgatgcccatctgtagcagggccaggcctgcccagcagcctctgctccctcctggggacccacagcagacgtctgcaagccactgctgagacccttcccagggaggagccacccaagagctgcactcttgtgccacagctgccctggggaaaccggggaaccccaactgggaaaggaggccctctgatcacacgcaggacccaaacactcagaaatcaagaacctctgcctccgagacaggctggcccacagtgctggctgggccccaatgcaccgtccctcagctcaggagggatgggcctgacctgacgctcagggttgacatcttatttgaacaagggtcccccgccatcatgcagcctccaaggtgccaagaggactccctatgcccaggcctgcccggtgcccaccctgctggtaggagccagcggctctggccaagtgcacgagggtctctgtgtttccagaaggccccacacacccaagtgcccctcacacctcgtgcctccccctcacagggtggccacctgcaccagcgtcagggcccagggtgctgtgaccgatgagacctcagctcagccctcaggtgcagtggccctacccagcctggccagcagacacacacagggatgctcacgggtgcaccaggagccaggtgcggcgcagccaaccctgagcctgcagggagacctgcaggaagcccaccgtgccccatgcaggggctccctccagcacacagccctcaccccagcacagccagcaaggacacgctctccccaacagggtgcttcggcgggaggtgggggaacaaggggtcttccgagcagcccccagccctcccctcccatctgtgcctctgtaaggggctctgggacgcccagaccctgcccgccgcccacctggtggtgacaagctccagcagccagtgggtccggacctgcttgatgccgcggtgagggacggcgcccacataggcgaggttgagctgctggtcccagctgaggacgtactggtcagcctggctgtgtggcagcggggggctggggacaacaaaggggcggctcagtcccgagcctcagcatggctggcagcgcggctgacacacacgttcaagcccaggactgcccgggcgcaggatccaggcgctgcccgtgcgttcagtgactaataaaatgacccttagggccaggaatgtggggaggtcccatcttcatggggaacggcagcagcagtaagacgaggggccaacgccagccctggccctggccctgccaggaaggcgggtacctcagctctaggtggaaggaatgggacaggcaggccaggtcccgctgcagggccgtccactcccaggggagactcctggtttacctcaaagagcaggatcccgggcatcggcctgggctgcagggggcggcccaggctcacgccccggcgcccactcaggtggaggacccacccacaaacacggcggggggcgggcccgggagagccagggccccagaggagggagctccggtctctgaagctctcacagtgcgcagtcagggggcgcccgagctctccccgtgcggccagggggtcccggaggccgcggagcgctcaccagaagcctgtgctcctccagaagcgccgcaggggccacagcgcgcgggccgcgtccacatgcaccaggtgcggggcctcggccggggccaccgggggcgcggccaggagcgaggccaggagcgccagcagcgcggcgcgggggcgcaggggacgcatggccacgcgtgctcggggactgcggggcttcgggctgcactgccggttccgcctccgggtcggagtctgggcgcgcaccccatgtgaccgccgccgcggggcggggccttggtgagggggcgatggccgggtgggaggggttgggtggcctcggggagcctcggggagccgggagcacggcagggcttggagccccgcttccttgcgggcctcaggggctgctctgaggaccgatgactcggaaagcgctcagaagaacgcttcgcccgttggtgctatgtgagttgagccattactgtcttgtttttctctgtttttgtgtgtttttgaga

SEQ ID NO: 31421 - DNA, 2300 bp, Homo sapien
cagccccacccgagggacccaccgcagcctcctggcctcccttgggatgggagagcactgagggctgcagcccctcgttacactcaccctccggccacaggtgccccgtgcaggctcccacccagtactcactgtcaaagtcggggggacctgaggctcccaaggaattttttttttttttttgagacagaactggccgggcacggtggctcacgcctgtaatcccagcactttgggaggccgaggcgggtggatcacaaggtcaggagttcaagactagcctgaccaacatagtgaaaccctgtctctactaaaaatacaaaaattagccgggcgtggtggcacacgcctgtagtcccaactactcaggcggctgaggcaggagaatcgcttgaacccgggaggcagaggctgcagtgagccgagattgtgccactgcactccagcctgggcaacagagcgagactccatctcaaaaaaaaaaaaaaaagacttgtaggctggagtgaagcgctacaaacatacctcactgcagcctggacctccagggctcaagcaatcctcctaccttagcttcccaaagtgctgggccaatgacagcgtttgtttttgagacgggctcttgctctgtggcctaggatagggtgcagtggcctaatcatacctcatggcagcctcaaactcctgggctcaagccatgctcccacctgagccgcttgagtagctgggatacaggcacacaccaccacacccagctaattttttacttttaattttttaaaggttggggggcagggggcggccgggtgcagtggctcaagcctgtaatcccagcactttgggaggccgaggtgggtggatcacgaggtcaggagatcaagaccatcctggctaacatggtgaaaccccgtctctactaaaaatacaaaaaattagccgggcgtggtggcgggtgcctgtagtcccagctactcgggaggctgaggcaggagaatcacttgaacccgggagacagagcttgcagtgagccgagatcatgccactgtactccagcctgggcaacagagcgaaactccgtctcaaaaaaaaaaaaattagccgggcgcggtggcgggcgcctgtagtcccagctactcaggaggctgaggcaggagaatggcgtgaacccaggaggcagagcttccagtgagccgagatcacaccactgcattccggcctgggtgacagagcaagactccgcctcaaaaaaaaaaaaagaaaaggtggggggcgtctcactatgttgaccaggctggtcttgaactgctggccttaagcgatcctcctgtctaggcctcccaaagtgttggaattacaggagtgaaccatcgtgcctggctaataattccttttaaaaagcagcttacccttattttcacgtgtgggcctaatttagttcacttaaaaaaatcatttatcttcaccccagccctatgaggcaggcactgccggtcctggtctgtggtagaggggagggcagaggagccgtgagggtgaccaggcgctgtgggtcggtgctgggtccagtcagaccaggactcctggccagtcacggcaccttgaccccggcagtcctcgccctgggcggtgagcaccacacacagggcttacgcgagcacacacgcatatgcacgcaccggcagccttgggctgagccggctgtcagcctctgccctgctccagcttggaccaggctggctccttgcaggaccaggagggtgtccggcgactggacacggagaccaagcctccctcagccccgcctgggtttgaaggctgctgcactcgaccccagaccccagagctgaaggtttacctgtgctcagcccctgagcccccgcctcccgctggtccctaagcccccccggcagggccgcagagccacagctgcagcggctcctgggaggctgggagctcctcagaggcccacacagctctaactcctacaagcccctgattacagttcaactcccggatcagccgatcaggtaacatggctggagaaacccatgactcagcaatctgtaggtaaataattgaactacagagtccagggcacagaccactgcctgcaggttggcgccaccacccccactctccccgctgctcgcgggagccagagggccctgcggtcctcggtggtcttgccagcccctcgtcatcccagggccctccgcgcctgtgaggactccctcaggtaagaaccatcctgggcccagatctcagctgcagcagaggggggcgtgggagccgaggccaga

SEQ ID NO: 31422 - DNA, 2300 bp, Homo sapien
gcccccgcggcttccgttcccgggctgggcggtggctcgtctgcgtctccggccctgggggtgggctgcgcgctccatctcgccggcccagtcccctccccagcgtcggtctctcaaggcccctcccaatgggggccaggcggagggtgggccctcgggcctgtggactgaccccggggttcctgggcctgggggcggggatccctgtcccgggctcccctcgctgcgaggctggccctgccagatgacactcagaggcgccttgggtgtcaggccagggacatctctgatgctggggctccccccgctagggtcaggggctgccgggctatcgccttggggttctgcagagaaaacctgaagcccagctgggtcttcactttcctccaggtcaccgtgccccgctactccaactccgtgggactttggaatgcaccttctgggcatttaattcttatccaagtgcctcttaagttatacttctttgctaccagtgtgtcctttggatggaggggaggagaggtggtaggggccgggtggggtggaccccagggactcctgctgctcctgctggacacccagcccggggtacaggagcaggtggggaccagcagaggcggggcggagcaggagcccacacccaaaggctgtagactcctgccaaggctctgccttgatcttgtacaccatgggaggaccagaagggaggcgttgaggtgtccagacctttgctgtggagctgggggtgctgtggcatggggagactgacagacggggagctgtatagggccagattccggtccatggtggtaaccccatcccccaccactgcagatgcggcacaaagccagctgccacaggaggtgcactgccccacgggcagctgtgctcacctgcgtggcgtccgcaggaagccctcagaccctggccagcctggtctctgcttctcactccaggctcaaggctggctgctattccattcaccccattccctttccctcaggccagaagcatcactcacaactccagacccttgcacaccaatctcctcactcagttcaccctcagatgtccaactccacatggccaaaaccgagaccagtctcactccaagctcatccacccgcctagctgcccaagctgaaatccacagttgccctgtacgaccccccgaccccccacctcaccccccagctcacctcaaacctcatcagtccctctgctcacagcctgcacagccaccacccagtctgggcaccatacctctctgggcaacccccatggcccccagccagtcttccagctcccaccctgactccagtgagctgccagagggatccttgaaaaatgctctggaagccaaggtgggcggatcacgaggtcaggaaatggaaaccatcctggctaacatggtgaaactccgtctctactaaaaatacaaaaaaattagccgggcgtggtggcgggcgcctgtagtcccagctactcaggaggctgaggcaggagaatggtgtgaacccgggagggggagcttgcagtgagccgagatcgcgccactgcaccccaggctgggcaacagagtgagactctgtctcaaaaaaaaaaaaaagaaaaaagaaaaatgccctggcactgctcagctcagaaccttgaaagggatccttgtttcgctctgggtcagggtcccatcctcaaagcagtcacttccagagccccatggagcctcatatcccatgatatccacccttattctgtctcaggcccaccagctgcctccctgctgcctgattgtcatgtgtgcattcctgttccagagcctttgcactggcgatgccatctgctgcctggatgtcttcctgctggctggtcccgttgcatggtagccttaggtgtctcctcagagaggtccctcgctgaccatcaggctcctcactccctgtcgtatccccttcaccaaagattcccattccctgacgacgcctgtcccctcggaatgcaggcctcgtgggaattcagcccatccgcaagtgcagtggcagggcggcccccttcccccttgacgacgcctgtccccttggaatgcaggcctcgtgggaattcagcccatctgcaagtgcagtggcagggcggcccccttctcccttgaggacgcctgtcccctcgtaatgcaggcctcgtgggaattcagcccatctgcaagtgcagtggcagggcggcccccttctcccttgaggacgcctgtcccctcgtaatgcaggcctcgtgggaattcagcccatctgcaagtgcagtggcagggc

SEQ ID NO: 31423 - DNA, 2300 bp, Homo sapien
ggcgggactgtcctcgctgccgggtcgcttcccctctctccagcaccacggtcctcggtttcgtgagcccagtgccttacgtgctgttttcacacctatttttttggttgctgcagctgagagtgtgtaagtcactgttactgcatctccattctctgccaagcctcctccacccgcctgtccttgtcagtccctacacctgctgttcctgagatgccgcctctgtgaggcctgcccggctctcccccagtcctgcctcttctgccccggggcaggtgctgtcgcgggcaagcgaggatccgtgctagcgaacctgcgcgcctggggctcaccggggctgggtaggtggctacaagaacctgtcttcccgcggtcaccccatggggttggctgaggatggggcctgagaccccgagggtggctgaccgccccgtttcagttttaaggggcaggacgtgcttgcgccggcccctcggctccgcgctgcctgacccgaagggccgtgggagcggggagggcccagtccctgttccgggggtgggcgaggggcggggggctgcctgaggacggggcctgggccggccgcgggctgggacgtggcgggcggggcggggcggggcggggcggggcggggcgaggagacgaggaaaaacgcctcgggagctgccgcgccggcgccgccgccaccgccagagggcagcgcgtgccggcgcgggaggcccgggccccgcccccgcccggccaggccccgccccctccccgtccccgcccctgtccgcctcgggccccgccccgtctgccgctccgcccctggccccgccccccgtcccggccccgcccgccaggggccgcgacgctgcccgtgcccctcccactgcccgctcattcgggggccggcacctgccggcctgtccgctccctgcttatactttgcacgctcgcagccacgtttccgcacacctgtcccctttccacgcacctgtgtccggcagcccgcacatctgtgggagcgctgcctcctcgccagctgtccgggaagttcagcgccgctctcccacgggcgtgagaccgccccacccacctgtccgtgactgcagctccggccgggagggcggcaggtgggccccggcgctgctggctccttgtgggacagggccgcggcggcggcgcaggacgttctcccgccgggaggaccacgcggcggtccctggacccttccccgggtgcacagcggcggctgcgccagcgggggcaggatgggccgtccgagcgcacctccatccgccctcgcgacgcccacgctggcccagacgcgggatttggggtggaggacgctgggctgggaaccagcaccttgggacggccgggtagttcgggccttgaggagtcccacaccctgacagctggcgccccccacgccccgcctagctctcctcggcctggggacaccggctgccaggcctctccagtttcagcctttcctgggaggacttcctggaagagggggcttcaggccccagaaagagaggctgctctgggggatggaggaggtgctgggatggtgactccgcggagtcgagggtgtgaggcgggatgtgggcaggccgtgaggtttgtgttgcaagactgggaggcaggatgaggggaggccatggggcggctggaggtgcggcctgggagccctgcgtgctgggccctgggcagggacggcaggcgaggcgtgtggaggaagagccgcgaagagctgggcgctgtcttctccacgcctccgtttcttcatctgctcctggggccgcctgcccggtagcggagattgaatcgcatgttgacgtctattacgatgattaatgttcttgtcattcccgtcactagcaggtgagaggctgggaggcctcaggtgggaacatacctttggccaaaggcaccaggtaacccgaacgccccggggaggacccctgcctgcatcgccgcggccgtccccccctaccccgtccccagcagctccggctgggcgaggccctgcttctcccttctgctcccgaagaccccccggggcgcagacctggaagcctcgaagctcccgcggccgtccagtccgcccccttctgagcaaccagagagcggtctgggcccggcccggggctgcgcagaggtcagactgccgcgggcagggccggagcctgctctgggggtcgcggaggtgtctcgagagttgaggacccgacccgggcgcgcgcgggcgcaggtatggggagggcgcggcggctcctggccggtcctaggagcctgcggggaccaag

SEQ ID NO: 31424 - DNA, 2300 bp, Homo sapien
cgccggcccctcggctccgcgctgcctgacccgaagggccgtgggagcggggagggcccagtccctgttccgggggtgggcgaggggcggggggctgcctgaggacggggcctgggccggccgcgggctgggacgtggcgggcggggcggggcggggcggggcggggcggggcgaggagacgaggaaaaacgcctcgggagctgccgcgccggcgccgccgccaccgccagagggcagcgcgtgccggcgcgggaggcccgggccccgcccccgcccggccaggccccgccccctccccgtccccgcccctgtccgcctcgggccccgccccgtctgccgctccgcccctggccccgccccccgtcccggccccgcccgccaggggccgcgacgctgcccgtgcccctcccactgcccgctcattcgggggccggcacctgccggcctgtccgctccctgcttatactttgcacgctcgcagccacgtttccgcacacctgtcccctttccacgcacctgtgtccggcagcccgcacatctgtgggagcgctgcctcctcgccagctgtccgggaagttcagcgccgctctcccacgggcgtgagaccgccccacccacctgtccgtgactgcagctccggccgggagggcggcaggtgggccccggcgctgctggctccttgtgggacagggccgcggcggcggcgcaggacgttctcccgccgggaggaccacgcggcggtccctggacccttccccgggtgcacagcggcggctgcgccagcgggggcaggatgggccgtccgagcgcacctccatccgccctcgcgacgcccacgctggcccagacgcgggatttggggtggaggacgctgggctgggaaccagcaccttgggacggccgggtagttcgggccttgaggagtcccacaccctgacagctggcgccccccacgccccgcctagctctcctcggcctggggacaccggctgccaggcctctccagtttcagcctttcctgggaggacttcctggaagagggggcttcaggccccagaaagagaggctgctctgggggatggaggaggtgctgggatggtgactccgcggagtcgagggtgtgaggcgggatgtgggcaggccgtgaggtttgtgttgcaagactgggaggcaggatgaggggaggccatggggcggctggaggtgcggcctgggagccctgcgtgctgggccctgggcagggacggcaggcgaggcgtgtggaggaagagccgcgaagagctgggcgctgtcttctccacgcctccgtttcttcatctgctcctggggccgcctgcccggtagcggagattgaatcgcatgttgacgtctattacgatgattaatgttcttgtcattcccgtcactagcaggtgagaggctgggaggcctcaggtgggaacatacctttggccaaaggcaccaggtaacccgaacgccccggggaggacccctgcctgcatcgccgcggccgtccccccctaccccgtccccagcagctccggctgggcgaggccctgcttctcccttctgctcccgaagaccccccggggcgcagacctggaagcctcgaagctcccgcggccgtccagtccgcccccttctgagcaaccagagagcggtctgggcccggcccggggctgcgcagaggtcagactgccgcgggcagggccggagcctgctctgggggtcgcggaggtgtctcgagagttgaggacccgacccgggcgcgcgcgggcgcaggtatggggagggcgcggcggctcctggccggtcctaggagcctgcggggaccaagggcgcgcgggcggggccgggggcgcggcgaggctcgggttggggcggggcgggggcgggggcggggccggacccggggaagccgcccgcccgcggggacgtccgcaccgcgagggttaaggccgggagcccggcggggcgggggcggtgtgcgcgcgcggattggggaaaagtttggcggcggggcggggcacgggggagggctgacgcgcgcggattggccggaagttgtgccgggggcgggtcgggggtccgggctcggcgctcgctccgggagagttgacaaagccccgcagggaaggacgcctcgcggcgcggcgccccgggcccctcgccccgccgccccgggatcccggccccggcccccggccccgcggactcgcccccgccgcctgcccggtccgggaccccgcgccccgagcgcccgagcccggaccccgacccggcccgagccgcccgcgcc

SEQ ID NO: 31425 - DNA, 2300 bp, Homo sapien
gccggcgccgccgccaccgccagagggcagcgcgtgccggcgcgggaggcccgggccccgcccccgcccggccaggccccgccccctccccgtccccgcccctgtccgcctcgggccccgccccgtctgccgctccgcccctggccccgccccccgtcccggccccgcccgccaggggccgcgacgctgcccgtgcccctcccactgcccgctcattcgggggccggcacctgccggcctgtccgctccctgcttatactttgcacgctcgcagccacgtttccgcacacctgtcccctttccacgcacctgtgtccggcagcccgcacatctgtgggagcgctgcctcctcgccagctgtccgggaagttcagcgccgctctcccacgggcgtgagaccgccccacccacctgtccgtgactgcagctccggccgggagggcggcaggtgggccccggcgctgctggctccttgtgggacagggccgcggcggcggcgcaggacgttctcccgccgggaggaccacgcggcggtccctggacccttccccgggtgcacagcggcggctgcgccagcgggggcaggatgggccgtccgagcgcacctccatccgccctcgcgacgcccacgctggcccagacgcgggatttggggtggaggacgctgggctgggaaccagcaccttgggacggccgggtagttcgggccttgaggagtcccacaccctgacagctggcgccccccacgccccgcctagctctcctcggcctggggacaccggctgccaggcctctccagtttcagcctttcctgggaggacttcctggaagagggggcttcaggccccagaaagagaggctgctctgggggatggaggaggtgctgggatggtgactccgcggagtcgagggtgtgaggcgggatgtgggcaggccgtgaggtttgtgttgcaagactgggaggcaggatgaggggaggccatggggcggctggaggtgcggcctgggagccctgcgtgctgggccctgggcagggacggcaggcgaggcgtgtggaggaagagccgcgaagagctgggcgctgtcttctccacgcctccgtttcttcatctgctcctggggccgcctgcccggtagcggagattgaatcgcatgttgacgtctattacgatgattaatgttcttgtcattcccgtcactagcaggtgagaggctgggaggcctcaggtgggaacatacctttggccaaaggcaccaggtaacccgaacgccccggggaggacccctgcctgcatcgccgcggccgtccccccctaccccgtccccagcagctccggctgggcgaggccctgcttctcccttctgctcccgaagaccccccggggcgcagacctggaagcctcgaagctcccgcggccgtccagtccgcccccttctgagcaaccagagagcggtctgggcccggcccggggctgcgcagaggtcagactgccgcgggcagggccggagcctgctctgggggtcgcggaggtgtctcgagagttgaggacccgacccgggcgcgcgcgggcgcaggtatggggagggcgcggcggctcctggccggtcctaggagcctgcggggaccaagggcgcgcgggcggggccgggggcgcggcgaggctcgggttggggcggggcgggggcgggggcggggccggacccggggaagccgcccgcccgcggggacgtccgcaccgcgagggttaaggccgggagcccggcggggcgggggcggtgtgcgcgcgcggattggggaaaagtttggcggcggggcggggcacgggggagggctgacgcgcgcggattggccggaagttgtgccgggggcgggtcgggggtccgggctcggcgctcgctccgggagagttgacaaagccccgcagggaaggacgcctcgcggcgcggcgccccgggcccctcgccccgccgccccgggatcccggccccggcccccggccccgcggactcgcccccgccgcctgcccggtccgggaccccgcgccccgagcgcccgagcccggaccccgacccggcccgagccgcccgcgcccaggtagcgccgccccgccccgagaccgggcccgggggcgcggggcggcgggatgcggcgcccggggcggcgatgaccgcggagcgcacgccgcgggcccggccctgaccccgccgcccgcccgctgagccccccgccgaggtgagccccccgcgcgcgcggccgcgaccccaggtgggcacacgggggagggcgggggtccggggcg

SEQ ID NO: 31426 - DNA, 2300 bp, Homo sapien
cccccgtcccggccccgcccgccaggggccgcgacgctgcccgtgcccctcccactgcccgctcattcgggggccggcacctgccggcctgtccgctccctgcttatactttgcacgctcgcagccacgtttccgcacacctgtcccctttccacgcacctgtgtccggcagcccgcacatctgtgggagcgctgcctcctcgccagctgtccgggaagttcagcgccgctctcccacgggcgtgagaccgccccacccacctgtccgtgactgcagctccggccgggagggcggcaggtgggccccggcgctgctggctccttgtgggacagggccgcggcggcggcgcaggacgttctcccgccgggaggaccacgcggcggtccctggacccttccccgggtgcacagcggcggctgcgccagcgggggcaggatgggccgtccgagcgcacctccatccgccctcgcgacgcccacgctggcccagacgcgggatttggggtggaggacgctgggctgggaaccagcaccttgggacggccgggtagttcgggccttgaggagtcccacaccctgacagctggcgccccccacgccccgcctagctctcctcggcctggggacaccggctgccaggcctctccagtttcagcctttcctgggaggacttcctggaagagggggcttcaggccccagaaagagaggctgctctgggggatggaggaggtgctgggatggtgactccgcggagtcgagggtgtgaggcgggatgtgggcaggccgtgaggtttgtgttgcaagactgggaggcaggatgaggggaggccatggggcggctggaggtgcggcctgggagccctgcgtgctgggccctgggcagggacggcaggcgaggcgtgtggaggaagagccgcgaagagctgggcgctgtcttctccacgcctccgtttcttcatctgctcctggggccgcctgcccggtagcggagattgaatcgcatgttgacgtctattacgatgattaatgttcttgtcattcccgtcactagcaggtgagaggctgggaggcctcaggtgggaacatacctttggccaaaggcaccaggtaacccgaacgccccggggaggacccctgcctgcatcgccgcggccgtccccccctaccccgtccccagcagctccggctgggcgaggccctgcttctcccttctgctcccgaagaccccccggggcgcagacctggaagcctcgaagctcccgcggccgtccagtccgcccccttctgagcaaccagagagcggtctgggcccggcccggggctgcgcagaggtcagactgccgcgggcagggccggagcctgctctgggggtcgcggaggtgtctcgagagttgaggacccgacccgggcgcgcgcgggcgcaggtatggggagggcgcggcggctcctggccggtcctaggagcctgcggggaccaagggcgcgcgggcggggccgggggcgcggcgaggctcgggttggggcggggcgggggcgggggcggggccggacccggggaagccgcccgcccgcggggacgtccgcaccgcgagggttaaggccgggagcccggcggggcgggggcggtgtgcgcgcgcggattggggaaaagtttggcggcggggcggggcacgggggagggctgacgcgcgcggattggccggaagttgtgccgggggcgggtcgggggtccgggctcggcgctcgctccgggagagttgacaaagccccgcagggaaggacgcctcgcggcgcggcgccccgggcccctcgccccgccgccccgggatcccggccccggcccccggccccgcggactcgcccccgccgcctgcccggtccgggaccccgcgccccgagcgcccgagcccggaccccgacccggcccgagccgcccgcgcccaggtagcgccgccccgccccgagaccgggcccgggggcgcggggcggcgggatgcggcgcccggggcggcgatgaccgcggagcgcacgccgcgggcccggccctgaccccgccgcccgcccgctgagccccccgccgaggtgagccccccgcgcgcgcggccgcgaccccaggtgggcacacgggggagggcgggggtccggggcgggggcggggaggggcgggttcggggccccagctgggcacgggtcatgcgcgccgccgccgctcctgcgggcccccggcctgccccgcccccgcccccgcgccccacgtgggccccccccagcgcaaatttgtccgctaatggcgcaggcg

SEQ ID NO: 31427 - DNA, 2300 bp, Homo sapien
tgcacaggctcaggcagcccgccgtgctcggttgcttgtggatagctgtggggtcgctggcccatgcccaggcccggctgggccctgggctgatggttgggtgggaattaggtgaggggcctggggcctctttgggacccaccaggccccccatccccctactgcccttgtccttggggggccactgtcccctctgacctcgggtgtacggctgcttcctgtatgaccagaaggagactctgcccttttggttggtggttttcgagagttaccaagcgcagctgttttgcatcctctggggaccctgctcccttctcgtgtctcaaagagccagcctctggggccacggggctgccccggccatgagaggctgctgacgtggtgtttgctgggccagtgctcagggctttggtgcatgtgggcagctgaggcctgggtcaggggcactgcacctcggcccctctgctcatcttgggcaggtgacccaggtggagctcaggcccgaggtctgtgctgggccgtgggtccccttttgaccgcccccccggctccggaccccaagcccctcctcgctgactgttcctcggtcccacccgcaggccccccaaagatggcggacaaggtggtcccacggcaggtggcccggctgggccgcactgtgcggctgcagtgcccagtggagggggacccgccgccgctgaccatgtggaccaaggatggccgcaccatccacagcggctggagccgcttccgcgtgctgccgcaggggctgaaggtgaagcaggtggagcgggaggatgccggcgtgtacgtgtgcaaggccaccaacggcttcggcagcctgagcgtcaactacaccctcgtcgtgctgggttagtcgctgctgcggtcagaggtcatgggctgggttggagccaggcaggggtgtgcaggagggcggacggggacacacctggggcccgagagtcagccagcccccggcagaaagccttccttcggtgccctgccccacctcagctggctgcacctctgccaccatcccccaggtatcctgtcccgttcctgtccccgtcaggctccagcctcggagccttcctcccagcggagggcggagggtggagggcgggagccgaaggcagtggtcccacagaagggctggggcccgaggccttggcagggtgtgccggccgtcggctgtgactttgaggctcgggtttcggagttcagaggagccgccgggatgcgtggcctttctgttctcttctgcgcctggggcccgggcgctgggcttggacaggtgtccagagagacacgccctccatacctagggacccggcaccccgcctgctccgctgggctcctgggtgtggggccctcgggtggagctcctgggagctgggctggcccgtttcttttttttttttaattctactttaagttttagggtacatgtgcccgttttctgaatacaggagcctggcccaggccccagcagggtctgggggtgcggcctgagacagcctggtcctgggctcagtgaaggagcggctgtcacagggtggatggaggggacattccacagcacgccctgcccctcggcattgtgtggaatgggaaaactggctgtcccccacccccaccccacagtcctttcaaaggggacgatgaccgggtggtatgagagtctcgtctgttcaccagccctcggccccttgatgtaggctagggttactgcagctgctggccgggcccggctccctcctcccccggggcctgcagaccccccggagccagaatgggggccggccctccagccccacccgtgcccatcagggtcacctgcgcccagtgtgggccagcggcccttgcccagctgtccctgggattctgggctgtgggtgtgtggcgcagccccctgcctgggtgtccagggctgtcccggctggggctgggggagctagaggccacgggggagttgggggagctcctcagggcccccctcacctgccctccctgtgcacctccgtctctctgcagatgacattagcccagggaaggagagcctggggcccgacagctcctctgggggtcaagaggaccccgccagccagcagtggggtgagcagggggtgacgggggtggggggcgtccgtctgtcccggccccttggctgcatccccgtcctctgacctccacgccaccccaccccgcagcacgaccgcgcttcacacagccctccaagatgaggcgccgggtgatcgcacggcccgtgggtagctccgtgcggctcaagtgcgtgg

SEQ ID NO: 31428 - DNA, 2300 bp, Homo sapien
atctaagtatccatcagatgaatggataggcacaatgtgtgtctccgtacagtgggctatgattcagccttaaaatggaaggaaactctggcacacgctaccgcgtggatgaacattgaggacgctatgctaagtgcataagccagtcgcagaaacacaaatgctgtgtgagtccatgtgtgtgaagtagtcaagatcgtagagacggaaagtaggatggtggctgccagcggctgtgggatggaggggtgggaagctctcgtttaatgggagtttcacaaaatttcagtttcacaaaatgaaaacagttatagagatgggtggtgtgatggttgcacagcatcaggaatgtatttaataccagtgaactgtacactgaaaatggttaaggtaggaaactgtatcatcataaattttcaaaaaacaaaagagacaccagggagcttgcttactaactctgcacacacacaaaagaggccgtatgaagacagagtgagaaggctgctgtctgcaagccaggacccccatcagccagcatcttgatggacttgccagtctccagaactgcgagaaataaacttctgttgtgtaagccacccagtctgtggtattttattacagaagcccaagcagactaatacacgttttagttctcctgttgatactttatctgtgtgctttattatttcagtgattcctctagagattacaacatgcatcttgaactcaccacagtgaacactcactgaggtgaacaccgactgaattccagtggaacgtaaccacattgctccatatagctccgcttcctcccacctgctttgtcatatgtatttatgtacatatatatgggatctatgtgttataaatctaacaatatggtgttgtcattatttcctgaattaaacttatgtttcttaaagaccttaagaggaaaaaaatcttttattccatcattcacaacatattaaccatttccagttttttcttgcagggaagattggctagaagtcagttctcttcattttttttttccatatttgaatgtctttgtcttcattttgaaggataatttcactgaagatacattttcttggttgactttttagcacttggtatatatgtcattcctctgtcttctggcttccattattattaatattggtttttttcatttttttttttttgagactgggtctctgccacccaggctggagtgcagtgtcttgaccatggctcactgcagcctggacctcctgggctcaatcaatcctcccacctcagcctcctgagtatctgggactgtaggcatgcaccaccacacctggctaatttttcttttttctttttttttttttttttgagactgagtctcactctgttgcccaagctggagtgcaatggtgtgatctcactgcaacctccacctctgggttcaagtgattctcctgcctcagcctcctgacgagctgggattacaggtgcgcaccaccacacctggctagttttgtagagatggggtttcaccatgttggccaggctggtctcaaactcctgacctcaggtgatctgcccacctcggcctcccaaagtgctgggattacaggcatgagccaccgtacccagccatttccattatttctgatgagaagtcagctgttaatcgtattgtcctgtaggtgatgagttgctcttctcttgctgctttaagtatttttctttttgtctttcacttactaaagctttatagtaacttttgaaattatgaagtgtgagttttccaactttgttcttttttgagattgttttgcatattttgagttccttgcatttccatatgaattttaggatcaactttcccatttctgctgacaaagcaggttgaaatctcggtagagttttaattcaccttgtacatcaatgtagggggtattgccatctaatactaacactgcatcttccaatccatgaatgttggacatagctttacctttatttaggtctttgatttctttcaacggtattttgcagttttcagtgaagaaatcttgcacttcattggtaaaatttattcctaagtattttgttattttggtgctactataaatagaattgttttgtaacttttattttcaggttttcattgctagtatgtagaaatacaactgatttttatagatggatcttgtatcctgcaatctactgagtttatgagctctggggattttttttgtggattctctagggttttctgtatatggcaaatcatgtcatcggcaagtggaggttgttttactttt

SEQ ID NO: 31429 - DNA, 2300 bp, Homo sapien
ataaaatatacgaataggtcaaattcctgatattttacaccaaaatacaaaaccatcttttataaggttgatttttactctcttatacttggctaagcaacagattctggtttagaaaagcagactgcacggatacgttggtgtaagatattaattgggtaatattaaataccttgaatgcccacaacaaccctcccctcaaaatcgtgagttaagtactttatgacactaaacctacttcttttccgcataggaccgtgaagaaaattttcgaacgaccagtgaagatacaaatagcaatgttttatggtgggcttttgcacaaatattaatctttatctcagtcggaattttccaaatgaagtacctgaaagacttctttatagctaagaagattgtttaaaatattatcaataaggacaaataatctgcataatgtttgagttaataaatcaaaatacctgcatatatgtgtattatttttatgatttcaaagataccagagattgagattaacgttatatcattataacattgagagaatgcttttataatgcagcttctgaatttgatagattaggcacctcatcctattcttaaacttatttttgagactgagtctcgctctgctgcacaggtgccgtcaggctcaccacaggctcgatctccagggcccaagcaatcctcccacctcagcctcccgagtagctgggaccccaggggcccaccaccacacccagctaatttttgtattttttgtagagacggggttttgccacgttgctggtcttgctattttaaacttggtagagatcagcactgtctaacagaaataaaagtgggctacatacataattctaatttgctgttgttgttgttgagacgaagtctcactctgttgcccaggctggagtgcagtggtgtgatttcggctcactgcaacctccgcctcgttcaagcgattctcctgcctcagcctccggagtagctgggattacaggcgtgagctaccgcacccagcccatacgtaattctaagttttctagtctccacattgaaaaggattttttgaaagggtaaaatcaacgctactgatatatatttaacctaatatatcaaaaatatcatgttaacatgtaatcaatataaaattactaagaaggttttcatacgaggccctggaaacagctgtattttactcacatctttcggggcgcaggggtcacttggcccgtagctaccgggagcgctcaccctgcgctctcccggcacaagcacttgcctgagcctctcgatccgagctttgcagcgtcccagcgggtggaaactctcaaaaccacgcagaggacaattttataaaaagtcacttccccatgctggaacctggaagcagcagaggtccttcccgagctacgccttccgtttcagagggaagcaggctcaggcctcccgtgctgaggtctctgcgccagcggccacctggacactagtcccaaagcgtgcagcgcggcctggcccccacccccaactgccccccccacccccaccgcctcatcacaccccacccccaccgcctcacgcccccacacccaccccaactcccacatccccactcccgctcccaccccaactcccacacccacttatccctccctccctcctatcccgctccccgggcccccagggcccccacgcccactctcccctactcctcccctgcctcgcccagcgcactaccctggccgccctggcctccggcccagctcccggccctcaaggtgggcctggcccgcatcccccgccctcggcgctccccctccccctcccccactgctgtcgcgccgcgacgcctcctcagcgcagccgccattccccgcgcccgccacccaggcccggcttccacaaaacacctgaggaccgccaagacaggggcgggacgttggtgctcgcggtgcgttcctccgcctactccagcccaaacgacctgggagacgagtcacacgcgccctcccaggtgctgcgggagaacccgcgaggttggcgggagggcgcgagctccagtgcgcgggcgcagggctgccgtcgactttgcgcaggcgcagagctgcccgccttcgggccctgcgcggggaggctggtcccaaccttgcgtgggcttcgcgtgggcccggcctcgccgctgcggtcgcccgcctggcatggccaactgggtgttctgtaatcgctgcttccagccgccccacaggacgtcgtgcttcagcctcaccaactgcgggcacgtgtactgcgacgcctgcctc

SEQ ID NO: 31430 - DNA, 2300 bp, Homo sapien
cagaggctcccttggcactagggtgtggggcaggtgtgggctcctccaccacagggcagtgggtgaggagcaccagacccacaggatggcttccaggaccagtctgtagctcttggactttaagggcatactgttctcttttaaagaaaagttaaaactgtggcctgatgcgccttttttttttttttttttttttgagatggagtctcattctgtcacccaggctggagtgcagtgacgcgatctcggctcactacaacctctgcctcctgggttcaagtgattcttctgcttcagcctcccaagtagccaggactgcaggtgtccaccactactcctggctaattttttttcttctttgtatttttagtagagacggggttttaccatgttggccaggctggtcttgaacccctgacctcaagtgatcacatgcctcggcctcccaaagtgctgggattacaggtgtgaaccaccatgcctggccctgatgcactttcaaagttttccataacagtgagttttaagtagccaagctctaaatctaaataattgcccaagggtgatggttaaggagactgctgagtgggaagaacagagagtagggaggcttgggaagaccaggtgaggaggagcagtcagtcagagaagagccttggcaggaactgaggagggaggcgtggacagcagcatccgtgggaaggaggactccagaggctcctgacttgggtgagggagccagccacagtgggccctggtcttccagccagatgggaccgcttgccagaggatccttggggtgtcacatttctagctggaaacttctgtggctggtggcacccttgcccgagttttgcttgggcccactgggcttgttctgcccactcagcctggcatgctgcactcaactcacgctactggcctggatcccacacctgccaagagcgagtcaggcacagagcagtgaggggtgtgtgagtgagcatggggtccagccactgtgcagtcaggcacacccgcagctgctgcaaggtgggcagctccagtgctggcatgggcgcccactctctgcaaggctgcagctggaccaggtgcactgcaagcagcttccacagctggcactggggaatgcagtatgccaggaaccacagggccccaaagagggagtccaactcagaaggggcagggctcctgcttgttcctggcctggggggctcccaagtctaggctccctgaagggctgcagctcttctctccttctcttcccccatagcatggcaagcaaggggcatgtctcagccctgtttgtgttataccagctcttttagccttgccatttgacgggtcccaagttcttgtcctgtgaccaggaagaatgaggtctgcagacaagtggagggtgagcaagaggaagacgagctttattgagcgatacaacggctcagaggagacccgcaggggcagctcctttccacagccagggtgtcacaacgcgtgttcagctcctagcacagaggagaccgtagagtgggaagctcctcttggcaggcaggccatcctgtcatctctgaggctctcagcagagaggaggccctggagtgggttgctcctgtctgcagacgggccatccctttgtgcctgcggctctcagcagagaggaggccctggagtgggctgttgctctctgcaggcaggtcctcttgttgtctccccagctctcagcagagaggaggccatggaatgggtagctcctctctgcatctggttgccctgatgtctgctcagctctggttgagcctagggcttttatgggccttagaggggaggaagtgcactgtgattggtacattggcagtcatgggtaaaggcaccagaagttcccactctggtctgcaggactggcagcccagtccccagccttcaggacctccctggcctgaaggtgggggcctcaccagggacctgccctcttccacccaggaacttgtctgcgtcctgctgctattcatggtgtccaggctataggtgccaaggggtgcctgcaggccagtgccaagctaccctcagcccacccttggcttccctcctattctcggtgcttaaagtctggagggtgctgaggcagcagggggctggtgtattagcactgccctgagcgtgtgcacacctggccaggctgcaacagtgcccaggctcgccctgactttactctgagatcaaagtggacactgacagcagggagaagccaggcagcagaagcaggcacttccaaacctgcgaaggccggggatggggcttcc

SEQ ID NO: 31431 - DNA, 2300 bp, Homo sapien
gctttcgagggctgcaggccagagcaggcacctgacaaggctggtaacatacgcagccaaggctggattttcttcatagacttcaaccaacagcacatctcagcagatgaagtgctggagccgatatgggaatccagcttccactaagccggacaatacaaagattcgcaccaacgtagaaccacgccacttttctcaggcgggtttttcatttttaaaagtatgattgcttttcataaaacattatgctatttatgttaatgtgtaatagcaatattttcttatttttaagtgaattggcaagtattctgaacatttctgttatgatttagaaaatgataagtatccataggtataacccatacaaacaaaaaagttcttcagtgtcctcaattagttttttttgtttttgttttttgtttttttgttttttttttttttttgagatggagtctcgctctgttgcccaggctggactgcagtggcgcgatcttggctcactacaacccctgccccctgggttcaagaaattctcctgcctcagccttctgagtggctgggattactggcgtgcaccaccacatccagctagtttttgtatttttagtacagatggggcttcaccatgttggccaggctggtctcgagttcctgacctcaagtgatccgcccgccctggcctcccaaagtgctgggattacaggcatgagtctcactctgtcgcccaggctggagggcagtggcacacacagttcactgcaggcttgacctcccctggctcaggtgatcctcccacctcagtctcctgagtagccgggaccacagacacagtctcctgactagttgagaccacaggcgcactccaccacacccagctaatttttgtatgttttgtagagatgaggtctccctgtgttgccaaggctggtatcaaactctgggctcaagtgatcctcccgcctcggcctcccaaagtgctgggattacaggcatgagccactgcgcctggccctcagtgacctttaagagtatgaaggagtcctcagataaaaacatttgagaagcacggaggtggaaatttgtctttggcctgggggcctggagtctaaatactgcattgagtggctgatctgtggttttcgcttaaaatacaggttagatcatttgtttctgtttgcattctgtcctagttgcttctatttattttttctctctttttgaatctgtgaaacattaacagggttccaaacatcagagtgttttgtctaagcttaaaagccctctgggtgattccgatgagcagaggccgggaaggattgagcaagaccattcccgagctccttcctccgctctgtttccagatcccatgactggggacctataaatattttcctgacatggagcaggatcaacttcagcatctgttagcttcatcccaaaggcagggaagcctagagcccctgggagggctctgcaccgcacacaccgccggcctgcagccccagccctgtgcggggtcctggggaggggggccccctttctgtggctcttcctgactccctgcgcgttccaccccagaccctcagcccactctgacctccctccaggagggatggcttgcaaatgccctctggccacagtgcagaccgctaggctgttctgtgcagctttaggccatgccaggaaagagacttaaagccagggccccaaaggccagggatgcctgcgccgggagccaggagcttccccagccacttccagcatgtagactgaagtcaggccacgcacagggctctccaggtcacaccctgcgcaagaaggtgtagcacgctggctctaatttcgagaaggtgaaaacaagagcccctctgcccccacgccctgagctttcccgaaaggcttggggcaaagaactcccctcagtggcacctagggaggcaccaggaaggcgcttgttggaacgggagagaaacggggagagggaggaggacaggggggaggggaggaggggaggggaggaggggaggggaggaggggaggggaggggaagggaggggacagggaggggaggggagggataggacagacagacaaagaaaggggtgcggcagcactgccaggggaagagggtgatccgacccggggaaggtcgctgggcagggcgagttgggaaagcggcagcccccgccgcccccgcagccccttctcctcctttctcccacgtcctatctgcctctcgctggaggccaggccgtgcagcatcgaagacaggaggaactggagcctcattggccggcccg

SEQ ID NO: 31432 - DNA, 2300 bp, Homo sapien
cctacatgtccatctgctgagggacagatgggcacattgtggcctggccccacactattcttcacccgtaaaaaggaatgaagctctggcccatgctccaaagtggatgaacctcgcaaacatttgccaagtgaaggaggtcagacgcagacggccacatatcacatgagaccatttatgtcaaatgtctggaatgggcaggtccacggtgacacagagtagactcccagctgcccggggctgggggcgagggcacagctgggggaaaatgggaagggtcttagtccatccccgctgctgtaacaaaacacctcagactgagtaatttataagcaacagaaatttatttcctgtagttctcaagctggggagtccaagatccaggtgccggcaggctggggtctgctgagggcagctccaatggcgtatccagcctcacatggcagaattcggaggaaaaacagccaagctagttccttctagcccttttataagggccctgaggacagaatcatggcaagggatgagaccctggggcacctttgggaccgcagagctcactgcctgcctgggtctcccccgatcctggcccagccctccttggccgccccagccatggctcaggcaggtgcaggcgcagctccaaccatcgctcccaaaggcacatgcggggggccttgacggcatccacggggcgctgacactgcaggcgatggtggcctgcacccagatttcaaagcatgttgctgacagccttggggcccaggcagaggctcatcgtggggttggagctgcctcggagtccccaccgaggctatgcccaccggagctgaggtgggggctgcctccgagaccccaggactgcagggccaccagcgagcaagcacagcctgggagagcggcaggcaggagactccgacccatgagcactgagtgggctgagcccacagaagccgtgggggcccagccctgcccccatgtgtctggaaggtgggcagggagtccaagatcatcccctgttcatgtatcctatgagtcctgtccctctagagaatgctgactcatatgattttgtatgtgagagcggtgagtactgggcctggcgtgcagtgccgtggttggaacgtttccgtcctctaaagctcaggctgaaacttagaccccgtggagtgccgggaggtggggactgatgggaggtgtttgatccactcacgaggcagagcccttgtgactaaagccaccatgaaaagggcttgtggggcagacccaccctccagccggtgaggatgcgacgtgcaagggccatcgtggaagaggagaacccaaccttggcctccagacggggaggcaggaagtctctgttgataaactgctgtctgatgttctgttgtggcctcactcaaaccgtggcggggagcggttgctaacaggcacaggacgtcttctgcggatgatgaacgtgttccggagtgagatgagtggggatggttgcacaacttcgtgaacatgctaaaaaccactgaattgtacactgtaaagagtgacttgtgagcatgtgaatttcatctcaatgaagctgttttgcgggagccaggtgaagcactgtggaggccacggctcaagaaggcagcaccggctgggcgaggtggctcacgcctgtaatcccagcactttgggaggctgaggtggctggatcacgaggtcaggagatcgagaccatcctgactaacacagtgaaaccccgtctctactaaaaatacaaaaaaattagccgggcgtggcaaccggcgcctgtaatcccagctactcaggaggctgaggcaggaggatggcgtgaacccaggaggcggagcttgcagtgagccgagatcacgccactgcactatagcctgggtgacagagcaagactctgtctccaaaaaaaaaaaaaagtcagcatcagaaaaccagaaactgcgcgcggacctcagtgtggcaggcactcccggggtgcagacggggtgaaggcagccttctctgtggtcacgtgcatgtaacggcaccttctctctcagggcctcctccctccctgcgtggtttgggggctgttcctgatagcacagatgccctgatcacaaacacctgcctgcattgctgaccacaggcctggcctggagaaacccacagcctcttcagggaagcgagcaaggggcttggaagtgcctgaagccagtgggctggggactcacggccgggacactcagggcaggtagggcgggcatggggccccagcatggcacagggccagacccaccccctct

SEQ ID NO: 31433 - DNA, 2300 bp, Homo sapien
gggcagaggtcctcctccgggcgccgggctcagggcccagtggccagatggttttctttgctgcagggagtgccggctgcgggggtaggcctgggagggctcatgcagctgctcttgggtttctctgctgttgttttttgctggaaaatcaatcctgcaagtccagctgggctctggctgagagcagctaggggtggggatggtgggtgcttcccggcccccacggggcaagttctgggcccacagtggggagagaaggcaggatggggtgcagggccagcctggggtggggccccgaagagcctggctccctgccctgtgccctgcttgggccaccccagagggactgtcccgaccctcccaacttcctgccaaggcccccggagctgcctgcagcctccccttgctcccgtgcccggggcggaagtctacaggagaccagagcccgggtgttcatcagcagccgcaggagagttccccaccaaggcgcagtagcctgaggtgctggggctgcccgaccctccccagctccacccctcttgcctctgagccctacccaaggcctggagaatcaccgcttcctcctgctccaggggttccagcagggcccttggaggatgtgcctgccgcgttctcagccctctctgccgacctttcttgaacggactctggccacggtgccaacgcgtcaacggtctgtccgtctgctgtccgagctcaggggccgtccatgcctccacggctggcatacagtagctctggttttacccatgagggggaagcccagcacccgtgccctcgatcacatcgccagttcacaaacacacatgcgcacacgcacacgccgcccgcccaccaggcagacacccacacacctgtgcacgcacgcgcacgccaagccagcgggccctgcccctgccccggagccctcagtgtcagaaccaggctgctgtggctgtttcctctttaattcgcctgagttttatgagcccaaattcatagacctttgttgctgcatataaacttgaggataaacttgttgaatttgttcaacgtaagcagctgaaattctgcgtggggtggtgatgaacggctctagcactcggtaaaaggtatttaaagcgcatgtagtttacaacactaacagcccgccgcccgcgagcacagcccgtctggtcatccggcggcctcaccgttcaccacggttggcggccctggtcactcccacggtctttaccagccgggtgccagtggctgggaccaggttctgaccactgtgcccactcactgtggaatcgcgtgagcaggccagaccctgcgtcgtaaggacagagcaggacacgtcctgtcatggggcacccgctgtctgcgactttgtttccgtttgtttccgcctcagcttgggggagacagttggcaggcaccagaggcgctcctgtgaggtcacctggccagtctcaggattagctgcaggctttggctgattttcttgggtcttgtacacagatgcttgtcagcaaataccagagacttatctcttcccttccaacatgcaaaccttccttcatgttcttgtcttaagcgttttggcacaacctccagcctaataccagcctctagggagataaacagtgctgccgatttcacaggccaggaaaccgaggctgagggccccccacccacctcctgctaccccgcacccctcctggggccttgctgggcggggtgactccccggaggcggcaccaaggggaggttcgtttcgaggctcagagcacttttctgacagctttctgtcccttacatcccagactcagttacacttcagcgtcccggctccctggccgccaggctcacaccacagacagcccttggaggcattccattcctgccccgacccttcaacttggaaacatggaaacaatgaggccagctgagtgggagcctccaggcctgtgtccagagctagttcccagtgtctggctgcctctcagggcggggcctgtctccagctggagctgggagggcggcccaccctgccagaggccagccccaccctcggctgccgtgggggctgaccagggcccagtgacccagcccagggcttgcctgtggagaggctggagtcagccgtcagcgcggaactcctggtcttcccactgccacctctgcagcccccaccagagatatcagaaaacatcagctccagcctgcagcccagacacttgaagtcaccttggctgcccctcctcacacccgtgcccacgtcagcaaaaccagggccggcttgttaaccgtgt

SEQ ID NO: 31434 - DNA, 2300 bp, Homo sapien
ccacaggaggaaggaaagcagatgtcagggctgaggaagctccccagaccatgggtcagccagcctacggaaatgggcaaaaaagccaaaaggggtcatgcctcaccttggcccacagctgagcctgtttaccggcgtcctcttcaaaatcccagcctcctggtttctcagagctgcttttggaagcgtggtccatgcaaatcagcagagtcccaactcatttatgagaaggggctgcagcgggtccaggcggtgcgaggaggggctgcagcgggtccaggtagtacgaggaggggctgcagcgggtgctggggaacccgggtcccctcgggatgtttccatcccaagcctttccctgcatgcaggtgggttatcctgccaccccaagtgtccagaccctgccgcgtcatccgccaagtgtcaacctccccttgctccctgccccatataaagcagaaagaagcgggggggggctgctgcctttggtggggtgccccctcctacctggctctgcaccccagtgctcgcagaggtctcttgggtatgggcagtggctcccagtctcgaggcccacgccgaggacagccccacctcatgactgaggcctctgctccctgccctctccggaggtgagtggcagaggccgcccagcccatctctgacctgtcttgggctcttcaacttggagccccctgggccactgagggaggtggcctgggcagggtgggaagggtgggttctggacacggttaacaagccggccctggttttgctgacgtgggcacgggtgtgaggaggggcagccaaggtgacttcaagtgtctgggctgcaggctggagctgatgttttctgatatctctggtgggggctgcagaggtggcagtgggaagaccaggagttccgcgctgacggctgactccagcctctccacaggcaagccctgggctgggtcactgggccctggtcagcccccacggcagccgagggtggggctggcctctggcagggtgggccgccctcccagctccagctggagacaggccccgccctgagaggcagccagacactgggaactagctctggacacaggcctggaggctcccactcagctggcctcattgtttccatgtttccaagttgaagggtcggggcaggaatggaatgcctccaagggctgtctgtggtgtgagcctggcggccagggagccgggacgctgaagtgtaactgagtctgggatgtaagggacagaaagctgtcagaaaagtgctctgagcctcgaaacgaacctccccttggtgccgcctccggggagtcaccccgcccagcaaggccccaggaggggtgcggggtagcaggaggtgggtggggggccctcagcctcggtttcctggcctgtgaaatcggcagcactgtttatctccctagaggctggtattaggctggaggttgtgccaaaacgcttaagacaagaacatgaaggaaggtttgcatgttggaagggaagagataagtctctggtatttgctgacaagcatctgtgtacaagacccaagaaaatcagccaaagcctgcagctaatcctgagactggccaggtgacctcacaggagcgcctctggtgcctgccaactgtctcccccaagctgaggcggaaacaaacggaaacaaagtcgcagacagcgggtgccccatgacaggacgtgtcctgctctgtccttacgacgcagggtctggcctgctcacgcgattccacagtgagtgggcacagtggtcagaacctggtcccagccactggcacccggctggtaaagaccgtgggagtgaccagggccgccaaccgtggtgaacggtgaggccgccggatgaccagacgggctgtgctcgcgggcggcgggctgttagtgttgtaaactacatgcgctttaaataccttttaccgagtgctagagccgttcatcaccaccccacgcagaatttcagctgcttacgttgaacaaattcaacaagtttatcctcaagtttatatgcagcaacaaaggtctatgaatttgggctcataaaactcaggcgaattaaagaggaaacagccacagcagcctggttctgacactgagggctccggggcaggggcagggcccgctggcttggcgtgcgcgtgcgtgcacaggtgtgtgggtgtctgcctggtgggcgggcggcgtgtgcgtgtgcgcatgtgtgtttgtgaactggcgatgtgatcgagggcacgggtgctgggcttccccctcatgggtaaaaccagagctactgtatgcca

SEQ ID NO: 31435 - DNA, 2300 bp, Homo sapien
cacaggttgtgtgcatgtgctcgctgaacaaacagggaaacgtgcggctccacggatgtcctggagaggaatcttgctggcaaatccatgcctttgatcacagcccctgcgctgtgtcctctgagctgtgatgcggccctgcaggccccgtggagtgcggtggctccctggctcacagggatgctgccgtccaaggtgccgtatcggctcgtggatgacttgggcagtgtctgtctggggtgctgtcgtcggaggagctgtttcaacctgtgggtgacgggccttgtctgtctgggggaggttctcttggccccgtgctctcagcccagtggctccatgctgctgtgcggctccctcttgggggcctgccttctctgccattgcagggcagggcctcagttttctctgggcggcaggtggctgtatctcaggactggaaggctccgggtcaggctgtgcacagccttcgttcatgtcagcccctggctgggcagcaccgccaggccctagtctttgggcctccaggcctggacagccagagggggcatctcaccaatgcccagatggctgccggggactcacggcagggcagctttgtcacgagagggccactcgagcccggagtaatcagggcttatggggacagggcagggtgagggccgctgagaccacccagccttagggtgcccttctggtggtcggggagcccttcctgggcagcggctttaggggctgctgtggggagggggaagaagatggggttggtgaggaggagcttttgggacactgtcctggtggaggtcgtgagggaggggagcggaccggttggcccagcagggctggccagtggagggacgtggagggttggtagctgccgagcctgggtctgagcaggcggggatgaggaccaggtgctgaggctggggaaggaacaggggtagctgcttggtcctggcgcatcttggtgccccctgggacttcctggaacaccccccccccagtgcccagagacccactgtggctgtctggatcggggcaggtcccagcccatggtgacccccagtgtgccggggcaacccggtccctctccagaccagaatggaccgatgcccagcacacacgtggatcggggcggagtgggcaggcgtggccaacaggagggaggatccggcaagcagatggtgatgtgcatccagagacagggcgttgacatgtggccaggaggctctggggtcatcgggccgccaccgtgcagccccccgggacttgatgcctccagagaacctgggggctgctgcccctcacctcacccccatttactttaaaatcagtttttgttttagagcagtcttagatttacaggaaaataggaagcacaagcttccatgtgctctacactcacttccctcgtgggtcccttgagtgctttcttacaacatgaggttaagcgtctgcagggtgagaagctggagactgtcctcgtgtcgctgggctgagagccgtgtgcggctgtgagtttttgatgaggaaaagcagtgtgggtcctggatttggacagcacaggcccctctgggagccgtgtgccttcacctcggagtgtgtgggcaaggtacagagctggagcccttgaccctgaccggccagccaggaaggccgtaggaggccagctccctggcgtgaggtgcgcagggcctctggcattgccctaggtgagggctccaggactcggacactggctctcagtggggcaggtgtggcccggcagggggcgctttgtgggtgcacagtggccccagggtggtgcagatggtgggcagacctaccccagggctgtttctgagacagaggtccctggaggagaaccaggtgctgggcctcaggtgtctgtcctgaactggagcagccttggaacaaggaaccacaggaagtccctgtggcatggggtgcagcccctcaggtctggcagggctagcccagggagtgcagggccccaggagccctgccacaggttcctcagctcgggagctcacggcctcctcactgcagggtcctttcaggagggccagggtggccttcacacatctgcttcttcctcagagacacaggtgtgggcacgtactggccagtatagataagcattgagcagcattgatgggtatcgatgatcctccaggagcagcggctggtgccatgctgctgtgggcagtattgagtattggccggtcttgacgagcagcagccggtactgggccaccgtgggtagcattgatgagtattgactggtatcaatgagtatcagc

SEQ ID NO: 31436 - DNA, 2300 bp, Homo sapien
ggaagcaggtgctcaaagatgggcaacagaatcacagagagcaaaaggcgtctgcggagccgacagccccaaccaggagccaaacccagaccccagagggaggtggccaggcccgggcaggcaggggagacctgggaggccgggtgctgaggcccagggcagagccacgccctacaaagttccaggacacagaaagggggacccccaaaccgcagctgtcatcctcagctgcaacggcaaatagttaccccacggttctcccccaaccctgccccaagctgcagacgggtacacagacgcgcaaaggccacgcgctaggagctcagcgaggacggccgcggtgcgggcccagccgccagcgccgttttcttcccgagggacgtgtgctccctgccgcgctcctacagaaacggtggagaggccggggagggggggggggctcgggctcaacggaacaccctgcgcacccgccgcctcggccctagctccaggccctcttgccccaactctcagggtttcacctccccactcagggcaccgggaagggcgcgaccgccttcccttttccccactggaagggaattctgtcccggcaatcacggagacgacagcaaaagggatctggcccaggccgggcttccagacaccggcgcccttggaggccgccagagaacgctccagtctcggcccggggctcaggcgcacggactctgcctttgcagccgggtcgagggaaagagaggctccgcgcagcggctcgggccggcccaggacgcgggcgctgcaagatggcgatggtggcaagcccggcgcccgcccgtgctccctgcttccgcggccgcagcccgcgaggaaggcgccccgggacctgggcgggcccaggcaagggcaggtgggggcgctgggccggtccgggacctcgcggagttcgcgggaacggagaccccgggccctcccgcgtcaccgccgggggctgcgctttgggcccggtctgagggcagcggcctcctccacggtcatacccggcacccgcgccccgtccccttcccccacagcgcgcggccacggtcgccggcggcctccccgcgggaggcgcgctcccgcgagtggcccgggagcgcgcgccccaggacaccccgagctgcgcacggctcccgccccatcccggccccgcaggcccagccacggggtcatgaccggggacggggtagcggccggggatcgggacccggggtgccgtcccgggtccgacggggctggggtcggtggagctgggggtccggcggggcagcccagaggcccacaggcccttttgtgtcacctgcacgggccgcgggcggggagagcagactgcggcgctcgcgcacacgcagcggcccgcgcatgcgcaagacccttcccgcggtcccgcccccgaccgcggccacgcgcggacgccggcgcgcacgcgcactcgcacacaaagccggcggcccgcgggcgcgcgctcggtccgcccccgcgccccccgcccgcgcggcacccgccccgccccgcccccgcccgcggccggaaacgcgcgcgcgcgcggccttaccaagcggcaggcccttgttgagcaagtgcgagctgcccatcgagaggcgcgagcggccgcgggccccgaccactccggcgcgctgcgccgccgcgagcccggcgcgtggggcggcctcggcgccgtccgctgctccgcccgcccgcctgcgcctggccgccgccgtgccgagtctccgccgcgccgctgagccgcgctccgacgaccgcgcgggcggggacacggcggcgcgcgcgggcggggcctcgcggttggtctcctggttcccagcgcgggcggcgcacggactcacgcgggcggctcagggcccgcccggccgggacgcggctgcggggcggggcggggcgggagcctggcgggaagctcgcggggctgcagcccggcggaggccccgggcctggtgttccgcacgttctaaaccgcctgtccccgaggaagtcgggcagggtcgggccggactcagcgccgctggcgggagcgccgtccgccccgaggaccctgcgggcccggaagccgagacagggccgcccacgtcagcgcctggcgcgggcccgaacgtaaatggcgctcctccgcgccgcagccgcagccgccccgctcccttcccgctccgccagctgccgccctcccgcgctcgcttctcgccccgcggcctggcccgtgcgcctccgaggctggccaggggcaccgaggccgcgggccccccatcgcccccacccgagcc

SEQ ID NO: 31437 - DNA, 2300 bp, Homo sapien
agctctgcagccaggaccccagttggagaaggcagcgcttggaacaagccaggacagtggacagacgggccggtgccaaatagaagtcatgataacgcgctgacaagctgtgcagacgaacactgtgtgtagacggaggccatggagagtgacgatggggaagacgctggatccctggctggcctgcatccctctccgttctcagttgcctgtggaattccggggagctctgctccagctacactgcacataaaagtgcgcaggaagtggatcctggagaggaactgttcttctggactgagcttgctgctcatggcagccccacctgcaggacccaaagccttatgtgatgtttgctggacactcagccacgtggctgcctgttgagctctgcaagtccacgcgggagccaggaattcctccccagaagtctctccattatattcaccaccccctagtaaatcacaacctgacttgctgcagaggatggagtgcctgggactcgtctgaccccagctcccctggggaagtgggggtggtacgtccctgcacccggccacgtgctgccttctcctgggctgcctgtccatgctgagcagacaggaaagtccagtgaggtccctgcctgtgcactccaccaaccacatcgtcccttcccggcagcctcacctaggcccctccagctacgaccccttgtcccctgcaccgatgcctggccttggaggttgctgctcatttttctggaattttttcttagatctctgcagggctgcccctccccctacaagggctccacacgtgttccctccttcatgactcccactgggcttccccgacagggcctcaccctccccaaagctctggtgacacctgccaggtttcctccaggccacagctcggcagcccgatcttagaacagaacgtggcacgcagggcaggtctggctgagggcccagcattgtcagcggggttggaggtcttcccgggcctcgaaggggagacgtaggcttctcagggcagcccaggacgcgtcctcacgaaccacagcgaaattacagcaggtatctcgcggataggagtctgcatcattccgtctccatgccgtggtttctgaaattatgcaactatctcggcattccagagggctcagagtagccacgcgcagaggccctccccatggggtggatggaagcgtccactcgcggcgcgaggaatatccctgggcccctcgggagagtctgcaggggcagcccctgggtgagcaggcccagtgcggcctctccctgaagggactttcgggccctcccgggtcggggcttcaccggtagcaggcagggctttgatattaatgcttaaagggaaagcagagctgagctgtcaggacgttggttagctacaaaccctactcttgttaaaagagaaatggggtcggggaaggggttctccagccctgaacttcccgggccgggcaggacgcggtccctccaggagtcggggctcccccgcctggggacgcactggggcaggcgcgcttctcctctcggggtcccatgtgccgccggctctcggacggtaaatcagggctcgggtgggggcgatggggggcccgcggcctcggtgcccctggccagcctcggaggcgcacgggccaggccgcggggcgagaagcgagcgcgggagggcggcagctggcggagcgggaagggagcggggcggctgcggctgcggcgcggaggagcgccatttacgttcgggcccgcgccaggcgctgacgtgggcggccctgtctcggcttccgggcccgcagggtcctcggggcggacggcgctcccgccagcggcgctgagtccggcccgaccctgcccgacttcctcggggacaggcggtttagaacgtgcggaacaccaggcccggggcctccgccgggctgcagccccgcgagcttcccgccaggctcccgccccgccccgccccgcagccgcgtcccggccgggcgggccctgagccgcccgcgtgagtccgtgcgccgcccgcgctgggaaccaggagaccaaccgcgaggccccgcccgcgcgcgccgccgtgtccccgcccgcgcggtcgtcggagcgcggctcagcggcgcggcggagactcggcacggcggcggccaggcgcaggcgggcgggcggagcagcggacggcgccgaggccgccccacgcgccgggctcgcggcggcgcagcgcgccggagtggtcggggcccgcggccgctcgcgcctctcgatgggcagctcgcacttgctcaacaagggcctgcc

SEQ ID NO: 31438 - DNA, 2300 bp, Homo sapien
tgcaggtggggctgccatgagcagcaagctcagtccagaagaacagttcctctccaggatccacttcctgcgcacttttatgtgcagtgtagctggagcagagctccccggaattccacaggcaactgagaacggagagggatgcaggccagccagggatccagcgtcttccccatcgtcactctccatggcctccgtctacacacagtgttcgtctgcacagcttgtcagcgcgttatcatgacttctatttggcaccggcccgtctgtccactgtcctggcttgttccaagcgctgccttctccaactggggtcctggctgcagagctgtctgctccccacgttgggcaactccagccaagattcctacacccaaatgtgaccgtgttgctcacgaagaaggctcagctttgcgtgtgcccagccgtgtgcacagctcgtcccaactcctgcgggtggcacctgcctctcccacctccagtctttcccctgtgatgagcagatgaccaccgccctccagggtcagcgtttggctgtttgtgtgcctgcccacccgcctccctgtgcctgggcctgccctgtgcctgcacacaggagtggctcatggcgtttgccctacacggatgggctgtcctgggagctactggacagtcaccttggtgggaatgccagaggcatgggcattaggtccccccggccagcctccgttgccacatgggctatttttgtccatcgcgtgggacaacctagtattgggggaaaactcagtccactctaaagaagcatcggcgttttggatggacgaatgctgcttcatgcgactccatgtcaatggactattttattcaactcgggtatttatgagtgtctcctctgtgccagccacgtgtgaaagaagaactccaagttactggacaccaggacaaaccaggtagatcactgcatccggttcctcctctttctgccgactctcccgggcaaccgttctgattcctggcatggagttgggggcgagctcatcagtacccagagcgcctggtgtgcagccaaaggcccccattttattagtcggtgtgttcagtatcacgctcaagacaagggccaacctattacttcacacacctcaaatacaaaaagtgcctgggaacgtcgatgaggtattaaaggaaaccactggtcttgtcagtcatgtacacacagaaaaaaaaaccagtcatttttatttttattttttgagacagagtttcgctcttgttgcccaggctggagtgcaatggtgcaatttcagctcactgcaatctctgccacccggattcaagcaattctcctgtctcagcctcccgagtagctggaattgcagacacccatcaccacgcccagctaattttatgtatttttagtagagatggggtttcaccatgttggtcaggctggtcttgaactcctgacctcaggtgatccacccacgtcaggctcccaaagtgctgagattacaggcatgaaccactgtgcccagccgaaaacaaccaagaattttttaacaataaaatgaccagcaagtaaacttgaaacaaaaatggacaaatatctaaaatatttttaaatgtatgtattttaattggcaaataatacttgtatatattgtttacaacttgttttaaagtatgaatacattgtggaatggctaaatcaagttaattaacatgcattaactcacatactttttgttttttggtgtggtgaggacacttaacatctactctcttagcaattttccagtcaccatgtcctactatagatccctagaacatattcctccaatgtaactgaaatgtatcccttgaccaacatcactgcccggccccagccccaggtaaacaccattctaccctctgcttctgtgagttcagcttttctagatttcacctgtgagtgagattgtgcagcatttgtctttctgtgcctgggttttttcacataatgcccttctggttcatctatattgtcatatatggtagcattgtcttcctttgtaaggctgactggtataccattgcgtatatacaccacattgtttacctaaaatattttttaatacaatcgctgaaaactgccacataacttgtataactgctgtaaggcttggttttcagccataagatgggaagagaagtaacatctaccttgcaggatgactgcaagctgtaaaatgccacaaagcgcaggggagcccagaaccgccgcagcaggacaggtcctctggaagcagacagacctgccttgttactttagccatcca

SEQ ID NO: 31439 - DNA, 2300 bp, Homo sapien
ttggccaggatagtcttgatctctgacctcgtgatccgcccgcctcggcctcccaaagtgctgggattacaggcgtgagccacagcacccggccaagtctagcagctttttaagatctagatatgaaacatttgccatctattgcttctaatggtggccacctatgaggcttcatctatgtaataagaacgttggtctccacaaccccttttaacccagatgctcctttctctcgattccagatctttagataagcactctttcaaccaaatgccaatcagaaaatctttgaatccacctgtgagctggaagccccgctgtgctttgtgttgtcctgccttttcggaccaatgtaaatctcacatgtactgattgatgcctacatctccttaaaacgtataaaatcaagctgtaacccaaccaccttgggcatgtgttctgaggacctcttgaggctgtgtcactggtcatgatccttaaccttggcaacataaacttctaaactgattgagatctgtctcagacactttttggtttacaaaaggactaattcaaatacagttttatcttccaacataagaaaacctagaatgaatgactcaaaggttgtagagggttaaacaacctctccaacgtgcaaacctctgccttataattcctaagtatttctgactgtagatggtactaggataggatcattttaccatggaaatgaaacccgtgtcctttcctttgggttaatcttgaatccctggtgaagtgaaggcagtctctaagaggagtgcagtccatccaactgctgcagtgctcctgtgtactactgggaccatcccggagagtggcagacacgatgcgaaccgtgaaaggacgcaaagagtacagagtgcatgcttccatctctataggaaggtcaggaacgctgttacggggagcagggttagaatgatggggatatagcccgggaaggggcagaggagctttctgtgccacgggaaatgtcctaaatctcaaccaggacacggttagataaaagtgcaaatatgggtgaaaattcattaaagctgtatagttaagatttgtgcacctcactgtaaaacttacttcaaatgtctaaaagactggagtctgcagccacacacttgaggaataacactttccttagtcccaactcctgtttaagtaagacagagaaagattccacagtgcgggtcggatgtcttgcggctgtaacatgtagcagcctccaagcggaggttctcccttcatcgctgtgtcaccttagatgtttttcctttgtttaaacaccaaatattttaaaagttgtttagaaatgtgttatgtgaaacacaaggtggtttaattgggacgtcatttcctaattaataaaatctaatttcagttttattttggaaaggagggagacgggtggtgtttgaaaggctgagaatgtgaagtggctgaaatgaaggcagcgcacgacctggatgccagcgctgcccgccctgcaaggagagggcggagaggccacacgcttctcatgcttcgggagtttctgtccataaatcagttttaggtactgggcctttcctcttccgttgggaagtcggaggttccacatcaggattccagcagctgtaaatcggtcaaaataaggccaaagaaaaatagctggctacaggcgcatgcggccaggcgttttgttggcgttgcccttggtaccgcaggcacgagggacccacaggggaccaccccgcgggagccccaagtaactggacggacgccaagtcccccagcccgctcggccccagctccacccgcccgggccgcagcccgcaccccatcggcccgccccgggccaggagcatccccagctccggcgtctgcggcctgaacccggtagcgaattcaaggtggaaaccgccagccggggctatcgttgattggctgaacgagaggaaacccggcagtgattggttcgcgccttcttccgcctccggccgactgggcggatacgattggtgcaggggcatcggcccgcccccatcctgctccggccggcgcgtggcgtcatttcccggcgtgcagcgcgctcgcgcgtcccccgcccgctaatgttttggccgcttcaagatggcggtgcaggagtcggcggctcagttgtccatgaccctgaaggtccaggagtacccgaccctcaaggtgggcgcctgcgccgcgcaggctgagggcagcgaaggcgtctccagccagtgccctcgggccgcgaggggccgccccgggagggccagcggcgagggcgg

SEQ ID NO: 31440 - DNA, 2300 bp, Homo sapien
accagccagcaaccccacatgtggtccctgtctcctccccgccctgccgacctgggtcctgcctgctccaagcttgcttctctgcctcatgcccctgtgaggcaccagccagcagccccacatgtggtccctgtctcctccccacccggggcatcagcgcctcgggacaggacttgcccacgttctcccagaacagccccgggttcaagccagcacccagtctacattcgggatagttgggtccagaggcccggtgggagtgtagaggaagcagtggcctcagggcgggacccaggaagctgctttgtccttgcagaggggttggtgcctttgctccagcagctgcacctgctgctctgccctcccagctgtgctcctggaagcgccctgagcgccctggccttcgggttgaaatgctgggcggctgcacgccccaccgcagctgcaggagcagggggcgggactcacattcagaacccagtgttccctggaaagtctgctgcaggttaaagtggcagcttcagcctcagccctgccttccccgtgcctgtgagagaggggttcagagctttggttgtggggtctgctggtggacatgcgggtgcggcacccgggcacctgggctctgtgggatgtgctgtctaagccctcgtcttgtctttgccctcagagctgcctggagttcagcctcagaatccaggagttcattgaactcatccggcagaataagagactggacgctgtgaggtaggcattgcggacgtgcgtctcctcgagggagggcaggatgttcggctgcggcccctgccagccctccctgtcgtggtctgggtcctgggacgtcccctgggtcgtcccctgggtcttgagtctgacccctgcctgctcaggtggctgcttctcccactgttcctgaatgggacttggggagtgaggcctggagcctggcagggcccccgccaaggtgtggccccaggtgggcatccagacccccgtggctgccaggggaaccagctttgaggtcccgaccgtccacgtaaaacacgtggatcaggctcccggcaccccctttccacattggaaagtgccgccagcctcagtagatgggagtgtctctgacgtgtggtcctcaggtagctccaagcgtcctgagcttgggaatgtccctcacagtcatcggggaatgttgacagcgtgtgatgagggcacttctgggttctccggcctgtctccgacccaagggcggcgtgcagtgagctgaggccagcggcgccctggtggtcaggcctgagaaggggatgctggctgtcactgtggctcagcccagttggggtgcacggcgtctgcaaaggaagagaggctgtccgctggcttcccgctggctccccagagtgggcatcgtcaggcagcagtggtccctggcctgggcagtgtcggccagttcatgctcaccccgtctcggggcagggctgctccttgagtgctaggtcgtctcactcactttcatggaggttcctgagcggccaagccttgcggtgacgcttgagttgctgtgtggggtgtgtgggcctggctggccctcagctcccgggcgagtgcccagcaggtgtgtttgccaggagggggcacctgtccatgcccacagaaacccgaccgcgactccatatccacctgcagtgggccgggtggccgagtgttccacagaaggcccatttggagaagtgggcgtctcacgatgaggtgctgagggtggtccccaagacgcacggcagaaccgcggcaagtccctgcccttgcgtggaccctggagaggcccggggtcctgctccggctcctgatgctgacctgggcgcatggtggcaggtcaggcctcgtcttcacgcacgagggagccaggcctgcaacgaggtcccttctgtgcctgagagggctaaagcggggatctcgggacccgggccagtggagagtggcgtgtgagcattgcggggacacggccaggggccccctgtcaagaggaggggctcccgctctgctctggcctccgtgtggcctcggtgcctgtgtcgctggcctctgtccggcggcagtctgcttccatcccgagtcagcctccgtctccttgagggccccggccactgtcagccctggagtctgaaaacaaaacgtgtccatcccggagtccctccgtcacagatgtcttcatctaggtggcagctggttccgcatagggtctgttgacctgttacccccactccgcatagggtctatttgcctgtgttaccctggctccgtgtagggtc

SEQ ID NO: 31441 - DNA, 2300 bp, Homo sapien
ggctgcagctccgccctgcctggggcatttgtgggtttttgcgaaatgcaaaagtatgagctgctagtgattaacttttaacgcctttaatttttagtaaatgagtaagtgaatccctgaccccaggcggctgggacctggcctgtacttcatgggctttgtgtgagcagctccgtgccgtctgtcgcacacccacacctcagcctggccaggcacagtttaggaattttgtcttctgggtgtttctctctctctctctttccgtgtgtgtgtgtgtgtgttttgaggttgagttttgctctgttgcctggcacaatctcagctcaccgcaacctccgcctcccgggttcaagtgattgtcctgcctcagcctctgagtagctgggattacaggcgcccaccaccacgcccggctaatttttgtatttttagtagagatggggtttcaccatgttggccaggctggtctcaaactcctgaccttgtgatccgcccaccttggcctcccaaagtgctgggattacaggcgtgagccaccgtgcctggcccgtgtgtttatatttttaaagaaaaatggaagtttttgtgtttcttatgttagctgcatttagtttgttaaaagtcacggttttgtttcccctgtgtcctgtggatgcataccgtgctgttctccccggacctgctctgagggccccacatctcggctgcagttctctgtgtgttggggctgaatgctggcatcaaacgatctgaaaagagtcagccgccactgttaggttttctgtttctgtcttggggtcaggatttgtggatcagggacctggggtgcgaggtgaggcagcttgttaggcggatgatgtctgtctggggtttgattgatggtgagataagacgcgtaaaccaggtcatgcaaatgagatcttgtagatgtcaaccacggagattaaatttcctctcttcagcagctctgggaggaggtgagatgcccgttggccgtgttctgtgcacgtcttggcgtgtgacgaagggtgacttgtctccagagatggaatgagggggttgggtggggctcctcctggactcagacccacgcccacccacacgctccaaggagggggatgcatgggcactggaatctcggatggccgtccccagcccctgcacacgcaccctgcggggtcagccgtgtggactcacccccgactcccagtccctgtatgcaccctgcggggtcggccgtgtggattcacccccgactcccaggccctgcacaggccctggggcgtcagccatgtggactccccaggctgggtcccaagcgtggacgccccccactccctgctgccccgggctctcctggtggtgcttccaacacgtggtccccgtgctatccatcaaggggctgctgggccacctcctacactaactccagtctctgcgagacactgcatcttctccaaggccaccgtgagcgcctggcacctcctcagccctgtgttccttggtacatgccttgttctggacagcacagggctgactcacacatgggacttgaggcccctggttctgtgcattggggtcgctttggcagaggggccctgagggctgagaacgtggggtgcacaggggcccgtgtgagggtcaggacatgggggtgcaggccctcaggacagccagagggacagtgaccctgtgtgtgggggggggcatgagaatgggggccctgggggtgagcaggtgcccgctggtcagcttgaaagggatctgttatgttctgctttggtttcttggttgcccagccttagactggagtggggttctggcctggagtaggcctgtgtgcatcccgcagagttggctcaggaaagatcgtggctgcatgtggtgtgtggcacgctcagggctgagagggctgggccggatctgcagggagtccagcctgtgggctgagggaggctgttcttcggaaggttgtgctgggcgtcactgccaaacagcaaggactgcagttgagaagactacacgttcttggtccgctggggccacggggtccgtgggggcgagcatctggggagagtgggaatcctcagggtttgggttccttgtaaaccagaatcgctttggagagccctcgggggcaggtgccatttgcagttctggtgttttccgtgggttgtctgtgtggcttgggtgccctggtcccctggaggaaggagtgtctggtagctgctcctccagcctctggtgagccgcacctcccgccatcccagccccacccagcaggtcggcttggagtgagg

SEQ ID NO: 31442 - DNA, 2300 bp, Homo sapien
gtgctcagatctggatgtgttctgaaggtagggctgtcaggatttgcaaaccaaatgggcatggagtgagaggaagagagaagcccaagtgagtcagataattggtccaagcgaacagaaggatgcagggcaggcccaggcacggtggcccaggcacggtggctcacgcctgtaatcccagcactttgggaggccgaggcgggcggatcacctgaagtcaggagttcgagaccagcctgaccaacatggtgaaaccccgtctctactaaaaattcaaaaatgagctgggcgtggtggcgggtgactgtcatcccagctactcgggaggctgaggcaggagaatcgtttgaacccgggaggcggaggctgcagtgaaccgcgatcgtgccactgcactccagcctgggtgacaaagcgagactttgtctcaaaaaaaaaaaaaaaaaaaaaaaaaaaaaaggctgcagggccatcagcggatacagagggcagtggacgggcagcttggctgtgctgttgagcctgagggctgagaggacaccccggggcagtgtaaaggagactggacttagcaattggtaagaaaagttggataaagagagggttttgttagtatgggagaaacggcacccttttatactaatgagaactagtaacaacaaaaaaaaccacgctgtagaagacagagggaaactgctggatgggtgccttggaggaagccacaggccggggattggatgcacagggcaaggggcgctgagggagggtctggctgcagcttgctcagtgaagcaagaggcagggtgaggaaggggtgaggcggaggagcggctcggggctggctgcaagctaggagctgggagccactgacgcccagggacagaagctggtgctgcagagaggggcggcgcagggagtccctcttcttttcctttttaaaataattgctttactgagatataactcacacatcctgaaacccaccctgtaaaaacacgattaacagagttgtgagctaccaccaccgtaatgcaagggcacgcccatccccccgaaaaagaaaccccggcccgccgccggcggcccccgccctgcacccagccccgggagcccagtcgggcgtctgctctgcgtggcctgtgccgggcgccccgcgagtggggtccacaccacgctcctccgaagccacggtttcccaagcgcggtctccaggtccgtccgtccgcagccgacctcgcactcccctgcgttcgaggctgcggacttcggcggcaggacggacggcgcctctgcttctcattccgcccagggccagcccgggcccaggggtacctgctgtgcgtctggcgccgaggtgggccccgaagacccccaagcccgcccagggattcccttcccgaggccggagcggggaggcgccgcggggttcagggcgccctgcgcggggcgagctcgggggcgggggcccgcgcccgcccgtctgggcggtcctcaccggccctctgcaggtgaagggacctggctgcgagcccgcgggcgggcgtggcgttgaggcccagaccggaacttcctttcggcctcagtttcccggccggccccgcccccggcgcccgtacatgcggcccctttaaggactttctgcgccctcccgcctcttttttctcgtgcgtccccctccccacccccggcagcctgcctcgccctcgccgggagcgcgcctacgtcaccgcgcagacctcggccgcgtctttgcgcctgcgcctcctgggctggggtgagccattggctgtcgagctcagggcacgtgctagggggcggggccttgaccggaaagggtggggcaacggcgagaaaggccgcgtcgagcggtaggtgcagtcgtcgctgtggtgaccccaggtcctgatgcgtccggcccagggccagccaatggcggtagaggtcttgggcacctgacaagaggggcggtccccccgccggaaggggcggggcgaggcgagcggccgcgtcagcggtaggtggggctgtggttacgctgccgggcgggggtcgcgccggttcggtccccggggctctgcgggcgccgggcagagacctgcggccagggcgtgtcccgtgtgcccgagagcgccggcggcggggccggagggcgggccctgggccgagtgacaggccgcagccccccgagcaccgtcgaagccggcgcgcccgcccggtgcagccgctgtgcgagagcgaccccgcggtccaagcctcgcgtggccctgccgggccccttctttccccgagtagggcgcagc

SEQ ID NO: 31443 - DNA, 2300 bp, Homo sapien
cgcgtctcagggcactcacctcccgcgtctcagggcactcacctcccgcgtccctgcactcacctcccgcgtctcagggcactcacctcccgcgtctctacacactcactgcccatgttttgctccaccccctgccccctggcttttctttgtgactactggctctgaaggtgttttcaaagcggacctcaccatggcaaacctcaaaaggccttgtctccatgaggtcgtcgtcctgtgcctgcacaagaaatgaccttttagctggctataaaatcctgagcttgaacttctccttcggcactttcaaagtgaccttctaagatcttgcattcacggttgctattgaaaatcttgtgtcaatagaatttttattttttgaaagtatcagctaatttatatgaccacaaggtcccacaagaggccatctctaggctgaggatcaaggagagccagtccgagtctcaaaactgaagaacttggagtctgatgttcgagggcaggaagcatccagcacgggagaatagatgtaggctgggaggcgaggccgtccctccttttcacgtttgctttatattcgttggcagctgactagatggtgcccaccagattaagggtggatctgccttccccagcccactgactcaaatgttaatctcctttggcaacaccctcgcagacacacccaagatcaatactttgtatccttcaatccaatcaagttgatcctcagtgctctgtgttaaccgtctcgggccatggtgttcttaggttttcctgtagtgcctctggccatggtttttcctctgtctcctctgactctcagtgagccttccaattccaggaaaatgtggctcattgtttcttcaactgttttctgcactccaattatgtctctcctcctgggattttagaagagacgaggatgctgacacctgcgcgtcccccacacccctcagagctcttaagagggtgttccgtgcttcctccctcgctgtctgcggtcacctgtgtctcactcgtgctgtggccggtcccctcagccacccaacaagtcctctgcacctgacaattttccttgccctttgtctttggtggaggcatcttcaggatcccctcacttcctggcctctcgctgtgtctctatggtgcccgtagctcctggggagcgtggcatgggctgtgcacctcttcgccccagctgccagttcgttttcttcctgtggattctgccgcagccaggacgccttgctcggtccgttttctttccgtggattccgccggggccaggacgccttgctcggtctgttttcttccatggcagctctccgaagtctggcttccctgcggtccaggttcttctggggtcctgagcccccctggccggcagcccacaggggaggacaggctcaagtgcaggccttagttgctcctgcagcaggtttggggaggtgggtggtgccctttgtcctaacccatagcctacctggcacctcctgtgcctcctgccatcccgacgcctcaggacaccagcttagccgctagggagtataggccccgccctgaccgagaggcgccgtcagggtcggggtgagccccacggagcagcctgagagccaagcgcaggctgtggtgcaggaggaggggagaggcaggtcagggcccagcagtgttggagaatctccttgtcctggtccggggaccctgggtgcacgctgggctgcggaggccaggggctggtggcctcgtccctgtcatctctgtgggacgttggtgagacgcagcgccatggccttgtcttgctggcggcggggcggaccctcttcgacgggcactccgggacggcatcttggtccttggaattcagcctctgcctggcagacggagggagttgccagggccaagaccttggtccagtggcccctgtggctgtcagaggcgcctgctgaagctgtggtgcagccccgggcgtttctgtggggacacaggggctggaatccccgctaacatcgcggtttgacgtcagcgtgagatgtgggttgaacccctgtgtggagctgtgcgtctcttctccttgaggaccatgtgagcaccctgtgggtggcctttccaagcggctgccacctcaggcttgggtgctggggagggctccaggctgcctacatctcaccaccggagcctgagctgccggggctatgggcacagggtgccgggcagtctgggctctcgctgctgcccagcttctttccagcctggcgaatccatctgctcaggctggcacttctgcaaagcccggcagc

SEQ ID NO: 31444 - DNA, 2300 bp, Homo sapien
gctttgacctcccagactcaagcaatcttcccatctcagcttcctgagtagctaagactacaggggcatggcagtatgactggctaattttttaaaagcttatttttggtagagatggggtctcactatgttggctaggctggtctcaaactcctggcctcaagaaattttcctgtcttagcctagcaaagtgctgggattacaggcatgagccaccacacccagccctaattttctttaaaatttttttgtggagacaggatcttgctgtgttgtccaggctgatctttgtcaaactcctggcctcaagtgaccctcccaccttgacctctcaaagtgctgggattgtggatgttagccaatgctcccagcctattcatagtattttctggttttagtaatttgattcttctctcttttactccccttagtctagctaaagatttatcaattttgttgatctatttaaagaaacaacttctggttttgtttattatcccctatgattttccattctttattttgttaatttccactgtaatctttattatttcctttgggttgctttgggttttattttctcttctttttcttgtttcttaagatggaaaattagcttactgatttgaaatctttttcatatagacatttgtagctataaatttttatctcagcactgatttacttcatcccttaagttctgctatattgtgttttcccttttttaaatctaaaagtatattctgatttttctggtgatttcttcttttatctcttggttatttaagagtttgttgtttaatttccacatatatgtgaatttcccaggtttccttctgttattgacttcttttcttatttttgagagacaagatctcactttatctcccaggctggagtgcagtgcagtgatcgcagctcactgcagccttgacctcccacctcagcctcctgagtagctgagactacaggcatgagccaccaagcctggctaaatttttaaaaattttgttgtagagacagggtccgactatgttgcccaggctgtgttggaactcctgggctcaagtgatcctgccacttttgcctcccaaagtgctgggattacaagcatgagctaccatacctggcctgttactgatttcttatttcactccattatggctaaaaaacatagattgtatgatttctcgtcttttatatgtattgagagttattttattggcataccgtattttctgtcccagagtgttgaagaatatctatcctgctcttgttgggtggagtgttgtatagatgcctgttgggtctgattggtttgtagtgttgtatagacacctgttgggtcagaggttggtttgtagtgttgtatagatgcctgttgggtctgattggtttgtagtgttgtatagatgcctgttgggtcagaggttggtttgtagtgttgtatagatgcctgttgggtctgattggtttgtagtgttgtatagatgcctgttgggtctgattggtttgtagagttgtatagatgtgtgttgggtctcattggtttgtagtgttgcatagaagcctgttgggtcagaggttggtttgtagtgttgtatagatgcctgctgggtctgattggtttgtagggttgtatagatgcatgttgggtctgattggtttgtagtgttatatggatgcctgttgggtctgattggtttctagtgttgtatagatgcctgttgggtcagaggttggtttgtagtgttgtatagatgcctgttgggtcagaggttggtgtgtgtgttgtatagatgcctgttgggtcagaggttggtttgtagtgttgtatagaagcctgttgggtctgattggtttgtagtgttgtatagaagcctgttaggtctgattggtttgtagtctgattgtttatgtcttctcttcccttattgatcttctgcccagttatattgatattgaatgtgaggtattgaatccttcagttttgtcagcttttgtttcataaattttgaagctctgttaagtgcatctgtatttctatttctttctgatgaacagacccttttatcattatgacatgtccttctttgtctttagtgaaaaaaaaatgtctttaagtcccttttgtatgttattagtatagccacttagctcttttttgattattgtttgcatggtatcttttttcaccctttaactttcattgtatctctgaatctaaagtgtgtttcttgtaaacagcatatagtgggatcatgtttcttatctgtcctgctggtctctgccgtgaatct

SEQ ID NO: 31445 - DNA, 2300 bp, Homo sapien
gggtgcaggccacccggggtgttcagttttagtgcagtggctgcttaattattggttaatctagcaatttagcatgcttcatttaattctaattaggagaattaataggcagggaatagcgatttcaatagactggcacaaaacaaaacctagcctggacatcgtgccggtctgggggccgtgtccaggcttggggggggcctgggggtgttgacagccaggactgcagaccttcccaggcgcctgaaggtcgtggcaggggaaggcgctcagggcaggcaggaatcgcaggcaggaatcgtgctgtggctgctcaccccggcctgcaagggcagccgggtcaagggcatggggagaacccccagagcatccccgggcagcacccccacagccccccacctgcacccccgcagcccctcacctgcagcccccgacccgcagccctgcggctgcctggtcccggcagagcctgtgtttgtctctgctcatcaggcggctccctgacaaggccccgacattggacaaggctgtccctctaattaaggtgctaattgaattaaatggccgcggtaatgagcagatgagcggcataaaaagtacagagtcagataggccaattaacaagagcgccgcgcataattataacattggaaatacatgcagctcgctccaacattgttaattgttaccgggggatttatggtaattggcgcacaacaggcagccggggaacctgcccagggctggtaattaaaaaaatgatattctacacaaacgccggatggcctaattaggacttgatttacataaaggcctttgaggaggtgctgggtacctcaccgctgctgctggggccactctggccagcagtccacgaggtgagaccagcaggcagtagcccccctaccaccccgcaccctgtggccacgggagctgctggcgtccaggctccgtctgctggcggggtccgcatggccatccctgagccctgagcacaggccctgcctctgtctgggagaggacctccagggcccaaggccaccttcccctgggttcgccactgtcctggagggggcaggtccattcgtctggcacatggccccctctgctctccctgtgtgctcccctcctgcagtgtcccagtgagtgtgcctggctaatgtcctgagcacgtggtcaggcaggtgatctgggtccagccctcccctaccacgaggacagcctcagacccaacaccctggtgcgggaagtgcccctgtccccaccgtacccgctcagttgcctcagagaggacccggaacactaccagatgcacagagggctggagggagggaggggccgggaacagtgtgcagtgtgggagggaggggcgggggcacccttggaaggcagagaggagaccaactaagctctgactcacccctcgttctgtcttaccccctccctcaaggaggccgccctgcgccccattttacagagtgggaagtgaagtctgatgtctgacaaactaggcccaactctccgggcttccgccacagcccctctcctctcctggggctgtccccaggggccagcatggtgccgggcacctctccagaatgtggaccctggccccagccggggcacagtcccagtcgcccctgcggcgtccccggcctgcccaccgctgccgcctcttcgactttctggagcagatttaccgtaacgttcacactctgaacagaaaactctgcctcatttacaaatgtaatttcaattgagggtagttttccaatctcctttcattggagtcccaattgagccccttctcgcggtgctgatggcatgattagacagtgtgcgcgcggaggcagattagtcaagcgcggccccgtaaattgggaaggatgttttatcaggacacgtcgctgtgctgcaggcagctgtggggtgctctgggctgtcccctcaaatcacggttatggaataatttagcccgcgattctctgcgattactgccgccactgatcatgctgtcactttccgagtgagcacttcatcctgcgtttattcatgccagatctgttttgcttttgtaatgagcacatattaccccggcacaaagaggatgaaggcagccgcgtgatagataggcgcgagattaaatgggatctttatgacttctgcagccatcagttctgactgtgtgataagacgcgtcgactagggccctgatttgctctttattggagccaatattagcatgctctcaccagtgcacgggccgatcaaacccacttaaggtggactcaccgcatagg

SEQ ID NO: 31446 - DNA, 2300 bp, Homo sapien
cagcctcccaagtggctgggattataggcgcccgccagcacgcccggctaatttttgtatttttagtagagaccgggtttcaccatgttggccaggctgatcttgaactcctgacctcaggtgatccacccgcctcggcctcccaaagtgctaggattacaggcatgagccaccgcatccggctgactctatttcttaatccactaaaagcccttaataattatccaagtaatggctgagaggggtgggtagatataagttaatcagtcacacagctctgacgtttgtgatttgaagtggttgtctccagtccacaggggccaggatggaaacccagctcaggaggggctgccatgggcagagcctcgccccgggcacaggtgccctcatcctcttctggccactttctgctctggtccatgtcacaaagacacttgtctttgggtaacctggccagcacagcctgactgttgcaggtgggggattaccggaccccagcgaagagaatggcctggacgcctgctccagcccttctcccctccccagccccgctgggactcccactcttccagacaggtgaggctgactccagccagtcctggtgtcagctggcctggcttcgcagcctgcaccggactagccttaccaggcccagaacctgttgggaggccccagcctgacccctgggagccccgatgcctcccccagcatccagccccaggggtgctgcatggcctcacccatagcctattcccggaaccagccggcctccatgcatctgtctgcccacagtgtccactgtgggacgtggccaccgagccccacggtggccaggggacacaggtagctctttctcccgtcagaccaccccttctccccacccccaccaaaccctcaggggacgcacatggggaggcactggaccgcagggtccctcaggcccctcccaccccaggggcccctcgccaggggtggggagcattgttctcctgcacctttgagaaatcatctggtctgaaataaatcccgccctacctcagtggaatctccagagtcggcggatatccacacagcccagggccagcacacctggccgtcagaggcccgccctgggtcaggcggctcatctcagccaggacacacccgagccccagcacgggaggctggagagggaggcagggacccccttcctgggaatttgctggagaccccgagagcggggcacggcctccttccgctgcccgccaccctctcctctgcagggtgctcatccctagggaccccccaagagtccggtctccctgggcctgctgtgctcggacggaaccaggccccaaccccgcctatcgccagaaggagccctgcagcacggtccgccctcggcgaccatgagcgagggcctaattcacactgtgcaggtgcagaagtgcgacccgagagggcgagcgacctgccaacggctacacagcgggcagacggcaggcgggaaggcggcggcggcgagcctcgggccccgagaccgcgcgccccgggctgggtcaccgcctgagccacggctagtgccgaccgggccctcctcgctgcgcgtcctgccccgccgcctcaggtcgccgccgccacaggtcttgccttctaggcctggaggacgccgccgagtgccaggcacgcacgcgcgcagggggcggggcgtcgatccgggggcggggccagaccctcgcacagggcgcgctgcggactcggtgggcggtgcgagcctgggcgcctggaggccccgccccctccgtcggcgcggcgcggctgagggccggcgtggagaaggcggcggctgacgggctcgcggcggcggcggggcgcgggcggccaatgagggcggccggagggggcggggcggcggccgcggttttgttccgccgcggctgaggcgcgtcgccctgagcgagcggggcctgggcggccggcagtcttctcgctccgcacccccgcggccgcgctcaggtaccgagcccgggcggagcgcgccgccgccccctcctctcttgtccacgctgcccattcctcggcgcaccggctccgagctttgcccgcggcacgtggagggcgcgggcggtcgtgggcgcggggccctgcgctccgagctgggcgcgtggactacgtccccctgcctccgccgtctgcgccgcccgtcgaggcgacttttccgcacgaggcgaggcccgccctggtggccccgcgccgtggttcggtggcgcgagaggcggggagtcgccgtggtaaacggggccttggggcgtcccgaaggg

SEQ ID NO: 31447 - DNA, 2300 bp, Homo sapien
ctcgtatttctgtctttttttttttttttttttttttttgagacggagtttcgctctttcccccaggctggagtgatgtgatttcggctcactgcaacctccgcgctccccaggttcaagcgattctcctgtctcagcctcccaagtggctgggattataggcgcccgccagcacgcccggctaatttttgtatttttagtagagaccgggtttcaccatgttggccaggctgatcttgaactcctgacctcaggtgatccacccgcctcggcctcccaaagtgctaggattacaggcatgagccaccgcatccggctgactctatttcttaatccactaaaagcccttaataattatccaagtaatggctgagaggggtgggtagatataagttaatcagtcacacagctctgacgtttgtgatttgaagtggttgtctccagtccacaggggccaggatggaaacccagctcaggaggggctgccatgggcagagcctcgccccgggcacaggtgccctcatcctcttctggccactttctgctctggtccatgtcacaaagacacttgtctttgggtaacctggccagcacagcctgactgttgcaggtgggggattaccggaccccagcgaagagaatggcctggacgcctgctccagcccttctcccctccccagccccgctgggactcccactcttccagacaggtgaggctgactccagccagtcctggtgtcagctggcctggcttcgcagcctgcaccggactagccttaccaggcccagaacctgttgggaggccccagcctgacccctgggagccccgatgcctcccccagcatccagccccaggggtgctgcatggcctcacccatagcctattcccggaaccagccggcctccatgcatctgtctgcccacagtgtccactgtgggacgtggccaccgagccccacggtggccaggggacacaggtagctctttctcccgtcagaccaccccttctccccacccccaccaaaccctcaggggacgcacatggggaggcactggaccgcagggtccctcaggcccctcccaccccaggggcccctcgccaggggtggggagcattgttctcctgcacctttgagaaatcatctggtctgaaataaatcccgccctacctcagtggaatctccagagtcggcggatatccacacagcccagggccagcacacctggccgtcagaggcccgccctgggtcaggcggctcatctcagccaggacacacccgagccccagcacgggaggctggagagggaggcagggacccccttcctgggaatttgctggagaccccgagagcggggcacggcctccttccgctgcccgccaccctctcctctgcagggtgctcatccctagggaccccccaagagtccggtctccctgggcctgctgtgctcggacggaaccaggccccaaccccgcctatcgccagaaggagccctgcagcacggtccgccctcggcgaccatgagcgagggcctaattcacactgtgcaggtgcagaagtgcgacccgagagggcgagcgacctgccaacggctacacagcgggcagacggcaggcgggaaggcggcggcggcgagcctcgggccccgagaccgcgcgccccgggctgggtcaccgcctgagccacggctagtgccgaccgggccctcctcgctgcgcgtcctgccccgccgcctcaggtcgccgccgccacaggtcttgccttctaggcctggaggacgccgccgagtgccaggcacgcacgcgcgcagggggcggggcgtcgatccgggggcggggccagaccctcgcacagggcgcgctgcggactcggtgggcggtgcgagcctgggcgcctggaggccccgccccctccgtcggcgcggcgcggctgagggccggcgtggagaaggcggcggctgacgggctcgcggcggcggcggggcgcgggcggccaatgagggcggccggagggggcggggcggcggccgcggttttgttccgccgcggctgaggcgcgtcgccctgagcgagcggggcctgggcggccggcagtcttctcgctccgcacccccgcggccgcgctcaggtaccgagcccgggcggagcgcgccgccgccccctcctctcttgtccacgctgcccattcctcggcgcaccggctccgagctttgcccgcggcacgtggagggcgcgggcggtcgtgggcgcggggccctgcgctccgagctgggcgcgtggactacgtccccctgcctcc

SEQ ID NO: 31448 - DNA, 2300 bp, Homo sapien
ccaagttactgaaatcagtctcttgtccaatgaaactgtagttatggctggtggaataggggctgggggatcagtcagcatccggtggaactgcaaattggtttttattgttttgagacagggtcttactctgtcgcccaggctggagtgcagtggcgccatctgggctcactgtagccttgacctcccaggttcaaggaatcctcccacttcagcttccgagtagctgggatcacaggcacacaccaccatggccggctaatttttttgatttttagtaaagatgaagtcttgctatgttgcccaggctggtctcgaattcctgagctcaagcgatcctcccacctcagcctcccaaaatgctgggattacaggtgtgagccacagtgcctagcctttttgtttaagttttttgtaaagatagggtctcgctgttacccaggctggtcttaaactctggacctgaagcaatccttttggaggcttcagcctcccaaagtgttgggatcacaggcatgagccatcatctcggccactgcactgttccaatattgcttagctcaaggccagtgcttattgagctactaagaggaaaagaaaagcagtgtggcagtaggaatatagtttaaatgtagggtgtgtgacttaacccttgcctggcatgaccttaggtcctattcataatttggtatcttattgccactggtgtccccttgaccgcaagggggtccattcagttgttgggggcttaggattttaattttttttgagacagagttctgctcttgttgcccaggttggagtacagtggtgcaatcttagcccactgcctcccgggttcaaacaattctcctgcctcagccacccgagtagctgggattacaagcatgcgtcaccatgccaggctaattttgtatttttagtagagacagggtttctccatgttggtcaggctagtctcgaactcccaacctcagatgatcctcccgcctcggcctcccaaagtgttggaattacaggcatgagccaccgcgccctgccaggattttatttttagtttacagtgttgagggttatgggatgcccagggcctggggaggaaggggacaggatgtgtccgtcctagtctgaggatgacttttttgagttcaaaagggggcggtggacgcaccaaggcacagtcctgagggcagcaggtgcaaaagtccggccctcccagaggtgtaaggccttagagggatcccaagcatccctggggctcagcctcctggacctgaccccactgcccactcttttggctggttccactctcccctgcatccctcacgttgtccccaacaggaagctgtgggaacctgttctcaggtgtagtgcacccgttggggttctagttggctggatccgcggggccgtcagctgcaactgtgacggcggggaagcgggacgggatggtgcggatctacaggacctcgcctccaggtggaacctacctgctgagccagggattcttcaggatacaaacccagtcaactccaggcagagggtgggagcgtcatgcaccggcgacacagtggaggacgtcatggacgggcagggaggcagcggcaaccgaaactagcggctcagtcggtggccggtgtgcggtcaacggccagggcagtgggaccggaaagactcagtgtagttgtcaactgttgcgacctaaaaggttactccaaaactttaagcggctcaaaacaatagacggcgcgtacggggcctgcagcggccacgggaccgtgggaagcagtcagtacccgccacaggccgcgccttccgggttccgggttccgggttcccgccagggaggagacacgcccccacctgggcaggaaccaagcagagccgcgctccacccaggccggaaccaatgggagatgcgccacgacccaggccgagaaacgtgccgcttacccttcccccacgacctgcgccgcgtcgcgcgcggccgaatctcccgccaaagctgcccccgcccgccaaggcgcgacctatcagcgtcgcagaggcccgcggcggcccggccgcctcaatcccgcgggtgggggcaaccttttcctcaggcctctcctcagcccacggcgtccatctggctcccgagccgagggccgggcagtcgggcttcgcggctgcccgcggtcccgaggcctcgccctagccccagtcggctcgcgaggcgcgcacagctgagtggacccctgcggcgtggcccgatggtctcgcccgacccggcgcgcgcgggaggccgaggggcggggccc

SEQ ID NO: 31449 - DNA, 2300 bp, Homo sapien
aggcaactgttgattgagtccaacggaaggggtcggaggggctgtgtggagggtggcactgcactaggccttggaaggtgggtgtggagagaacaggcggatttggaggcagttccagtttgggggcgccacaggggcagaggctggggagggcctctgtgcagtgcaggtgggacgctcagagttgtccaggggggtgctgggctgggccccaggtgctagctggggctctggaaggtccctctctcagctgattggatgacggacaggtgggaggtggggtgtgcagtggctggagggggatttcaagggggtacctctggaggacacgggggcagacgcagccctgggaggacagatggccagtggctggccaggtttgccactctggggatacaagaggggtgaccctccacatcctggtttgaggatgcagctgcctgggcccagaagaactggaggcaggtgtcgggtggaggcgcccaggcctgcctcatggagagggtgggctgggggcccacttgagagatggatggggctgagtggggctggggccctgaccaggccactttctagggctactgggtgggtttctgtagcccttccagctgcaccctccccagaggcctatgagggaccacaagtgaattgtggcagccacacctggagcagacagcacagctggcctcacagtcggatgtcaagctctttttatttttaacttagtttgaaagttttcaagctttattaggtattagttacctgttttatttttatttttactttttgagacggagcctcgctctgtcacccaggctggagtgcagtggcatgatctcggctcactgcaacttcggcctcctgagtagctgggactacaggcgcccgccaccacgcccggctaattttttgtattttttagtggagatggggtttcaccgtgttagccaggatggtctcgatctgacctcgtgatccgtccgcctcggcttcccaaagtgctgggattacaggtgtgagccactgcacccggcccctagttacctattgttatatgtcatgttaccttgaaatgcagtgactgggccaactccaaatgtggactattactttttgccaactggaacctgctggtgcaactcctcaccatctccatggcttatttggaccttcaaattgtcctcgatctggccagcagggccctgaagctggctccgtgtcctctggacatgtcccatcattctttgagacttgcttcctttctcgcacataacttttcagctctgggatgcaccacatttgatcagcctcctcagagcgggtgagattgagagactgagatcctgtccaggcagctgccctggcaggccaggggtcagctctgcctgaggtgacacctgattgtgtttatttttccctttctaggcttttgtagttttttcaacacttacgtattgtgtgaaactaaagcagcaaattaaaaaccttttccgctaatatatcctgcctttgccacaggcagggagagagtggccggctggggaagtgcagagtgggtaaagcccaattaccctgggagctgaccctggaacccgggcagagggccaggtccagggctgtcggggggtggacagcggcctgccactcactttcccctgaggctcaccctgtcctttgcaggctactatgtgggcatgtgccttgcggcttcagaaaagcggctccacgccctcagccaggcccctgaggcctggcggctcttcctgctgctggccgtgaccctcccctccatcgcctgcatcctgatctactactggtcccgtgaccggtgggcctgccacccactggcgcgcaccctggccctctacgccctcccacagtctggctggcaggctgttgcctcctctgtcaacactgagttccggcggattgacaagtttgccaccggtgcaccaggtgcccgtgtgattgtgacagacacgtgggtgatgaaggtaaccacctaccgagtgcacgtggcccagcagcaggacgtgcacctgactgtgacggagtctcggcagcatgagctctcgccagactcgaacttgcccgtgcagctcctcaccatccgtgtggccagcaccaaccctgctgtgcaggcctttgacatctggtaagagtgtggtgcctgtggggctgcggagggcacatggcaggccagagccaggctctggtgccacgacccctgggaggtgctgggtgtagctggtgtggactccaacactcctgggcttgtgtgacaccaggcaaggtgtcca

SEQ ID NO: 31450 - DNA, 2300 bp, Homo sapien
tactcaggaggccgaagttgcagtgagccgagatcatgccactgcactccagcctgggtgacagagcgaggctccgtctcaaaaagtaaaaataaaaataaaacaggtaactaatacctaataaagcttgaaaactttcaaactaagttaaaaataaaaagagcttgacatccgactgtgaggccagctgtgctgtctgctccaggtgtggctgccacaattcacttgtggtccctcataggcctctggggagggtgcagctggaagggctacagaaacccacccagtagccctagaaagtggcctggtcagggccccagccccactcagccccatccatctctcaagtgggcccccagcccaccctctccatgaggcaggcctgggcgcctccacccgacacctgcctccagttcttctgggcccaggcagctgcatcctcaaaccaggatgtggagggtcacccctcttgtatccccagagtggcaaacctggccagccactggccatctgtcctcccagggctgcgtctgcccccgtgtcctccagaggtacccccttgaaatccccctccagccactgcacaccccacctcccacctgtccgtcatccaatcagctgagagagggaccttccagagccccagctagcacctggggcccagcccagcacccccctggacaactctgagcgtcccacctgcactgcacagaggccctccccagcctctgcccctgtggcgcccccaaactggaactgcctccaaatccgcctgttctctccacacccaccttccaaggcctagtgcagtgccaccctccacacagcccctccgaccccttccgttggactcaatcaacagttgccttctcctggccactgcccccaaccacgacaagcaagggctgcttggccttgcaacccccaggcacgtgacggttcaggacttggtgggccggagcatcccttgcccaaggttctgaacttgggttcccgtcacctgcaagtcagtgccggcggcgcccctaagcgcgctcagcccacgccgcggtccctctggatgaggaccggcgcctctccccagctgcgcccaggcgctttcggggcctcggggagctggcggaggcctcctcctgacctcccagcaagccctgcgcaggagaggatgcggccggccggcccgagcagcctcaccgagcggcagcagcgagtggcacaacagcgtggcggccgtgcggcgcaagtggaagggcacgaaggcggcgtcctcgctgcccagccagcccgacagcaggttctgcaccgtgagccccgccgcgtggaactcgttgggcgtgaacacgaagcacacggcgaacaccagataggcgagagtgaaggtcacctcggggctgtccatcgcgcagccgccgggaagctgtcgagctaggcccccgccccggcgcgcggacgaggccgcagcgcccagtcccggacctgtcggttgcggcggccgccgcccggccgcccgcggggcactctaggacatggagtcccgccgcccggccgcccgcggggcactctaggacatggagtcccgccgcccggccgcccgcggggcactctaggacatggagtcccgccgcccggccgcccgcggggcactctagggcatggagtcccgccgctcggccgctcgcggggcgctctgggagatgcagtccccgtgcgggtgcggcctctcttctcggccggccctggaggcggcaccgcacctgtgcattgagcacaggtggggaaacttaggcctgagcgaggccctggccatgaagccccgcccagtagcgtcagttgcggaactcgaaattcatggggcgactgcgagcccggggtctcagcttcagacaccctggcgtgccctccactccggaaacggaaccgtcggcgcccgagcggggggtggggggggagggagggcggagccggcgaggcacagcttcccattggacgcccgccctcctgcggtcctgcccccggccgcgcgctgattggccgcgcgaaggcaaccgtcggcgtttgaaactccggcgcgccggcggccatcaagggctagaagcgcgacggcggtagcagctaggcttggcccccggcgtggagcagacgcggacccctccttcctggcggcggcggcgcgggctcagagcccggcaacgggcgggcgggcaggtaggagagcggctacacggcgcggggaggctggggtcctgggggcgcgaggccgtcccgccccgccccgccctcggccctcgccctcccgcccc

SEQ ID NO: 31451 - DNA, 2300 bp, Homo sapien
gctgacatttttgtcgtttaagacctgcagactcattctggaaaagcagaacatgtttgtgtcagtgtgagggcaacactaccacattgtccagacacagacgtgacagctgctgcaaggggcacgaccacttcccacacaggtgtgctcattgctctggaactcacacctcccacacgtgtctcttggcagagaaagcctcagactgagtccccatcttgcttcagagactcactctccagcctggcagggggagccatgggcagcactgctgcttcctgggaccaagagctaaagggccttcaggctgagatggtgagaaagaaaacccaagcctgcataatctctactgctgtattactatatcaagcagaagtcaagagacggaaaagcccgggccaataagaaacccggatgagccagaggaagccctggtctccccacaggcctctgcgtgtgacgtgaggcaggaccgggcagtagagggcagaaaagcaggacagcggctctggtctgctctctcccaccgggctaggcagcgggacaagaccaggctgagagggtgaaggcccagaggaggagctgggagacgatgcgcaaacaagggaagcccagagctgagcaacaggtgccaaggaacttccacatcagagcctccagtcagtcccaggttccagggctgcccaggtcctcacgccggtcacccacacacttgccaccctttctgtctacagcgttcccagtctagggaatgacgtagggaaaaaggctgccagagagaaccgagtgtcgaccagggcaggaaccccacaggcacctggtggtggagggggacctggggaggctttgatttgaagaagagcaaagttggggagggtcctggagaagagagagggggcagccccggcaggtcggtgctgcagcttgagaagcccactgtggtgctgtgtgtgggtggggaggttaagagcagaagggaagcagggaaaccacaggcttctggagcccaaggagtagatgccagaccagacccgggcctggccactggcacatatgggacttacggacgacgcttaggttttcgccctgaataactgggtacagggcaggggaaggggtgctggatcgctgggggacccgcaagcctcgaactcagggagaaagtgactcggaggaagccttctggcggcctggaggagctcgggagagcagcagacccagccttagtcaggaggggcctttactgactatggaggcccgggaggggctctgggcagagaagggaccggccccaggctggtgctttggtgctactctggtgcacaagagggatgcggtgcggggggaaggtggagcggcgcagcaggtgcggggaagcggtaggggcccaggtgtccgccgcaggcggcctagatggagttggccccaggacggaggccggaagggaccaaagaacaacaggagggtccgcgtgctgggagccaacaaagagccaaggtgggcgaccgagagacaggagagggtcgaggagagcaaagcacctcggggcgcccgctccgccgtcggtcttggcccagctctagccgcccctggccaccatccagggggcccagcccggcggtcggtctagggccgggtcccatgacagggcgcggtacaggttctggcggcggccccaggaggagccgtgggggacgcttcccggggaaagcggcggccggggcgggagggcgagggccgagggcggggcggggcgggacggcctcgcgcccccaggaccccagcctccccgcgccgtgtagccgctctcctacctgcccgcccgcccgttgccgggctctgagcccgcgccgccgccgccaggaaggaggggtccgcgtctgctccacgccgggggccaagcctagctgctaccgccgtcgcgcttctagcccttgatggccgccggcgcgccggagtttcaaacgccgacggttgccttcgcgcggccaatcagcgcgcggccgggggcaggaccgcaggagggcgggcgtccaatgggaagctgtgcctcgccggctccgccctccctccccccccaccccccgctcgggcgccgacggttccgtttccggagtggagggcacgccagggtgtctgaagctgagaccccgggctcgcagtcgccccatgaatttcgagttccgcaactgacgctactgggcggggcttcatggccagggcctcgctcaggcctaagtttccccacctgtgctcaatgcacaggtgcggtgccgcctccagggccggccgagaagaga

SEQ ID NO: 31452 - DNA, 2300 bp, Homo sapien
caaggacaaatgggagaggggctggggaagggacacatggggaccagacccctactgggcatttctgccaaggagaggatcctggtgaggaagaaagcagaaagctatgtgttcacagatgcacggatgctcccctcccagagacccgtggccgtgggtgcagagggagtcagtccttcttggaggtactgggaaaggagcctacagctccactgagcccttctgcctacaggaggggccccactcagcagctgttccctgagggagacctgtccacgcgtgagctccttcccacagtcccatccagtcccccaggggaaggggcaagacggtcaggtcaggacccacacgcatgctggtgctttcagaacctgatgacttagttggttaagagagctcacacctgcaatcccagcactttgggaggctgaggcaggtggatcagttgaggtcaggagttcaagaccagcctggccaacatggtgaagccccgtctctactaacaatacaaaaattagccgagtgtggtggtgcacacctgtaatcctagctacttgggaggctgagacaggagaatcacttcaatcagggaggcagagattgcttgagctgagactgtgccactgcactccagcctgggtgacagagcgagactccctctcaaaaaaaaaaaaaaaaaaaaaaaagagcagggccaatgtgctgctgtgccttggggaacggtgtcctgggagcggacctggctggcagtgacctggggctgtgcactggagggggctggacagtgcacttggaggtgggtgagcctgggccccaagacggtctggggacatgggcttggccagagcaggaaatgagggtggccaaggacaggtgctgagccaccgagtcggcacagaggggtgggcatgagggcttcctgggagcagggcccttccaagtccctgaggtcagcccagggacaccctggcctctgggagattcatggtggggctgtgcatgggctgggtggggtcagcaggcagccagtcactgaggggctttcagcgcccattttcctgatgagcacctccagtcctggaagccacaagccaggcacgcagcccacccggccggccctcccggccagctcactggctcccatgggccccggacctccttgggctttgcctgaaggtgggagcagatggccttttccttgtgagggtggacacagaagccaacagtcatgtggggtgaggggacccaggcacctccagcgtcccccgcagggcagcaccttcccctcctgggaacccacccctcttcagctggactctgagcccaccccgtggagcccagaacctcgggccagctcaggctctgccaccagctctctgtcatcctccctcagagccgggctgtgctccccaagccaggggtatccagcccccgctcttcatcctaggccgggcaggcagccagccccaggcctgtgtcctccttggggggcggggggtagggacccctcgcgcggggctctcaggcggcttagctgcgtgcggccccaggtcagtcaacgcagcctctgcacctcgccggtcaggtacgcaggccgcgccgggctgccccagacctgcggcgcacacgggaggctcagcctggaatgccgtcctgccctcctccacctgaggaattgccgctcacaccacagggttcagctccgcggcatctcggcgaagcctcctgacatcccgacccccgccgagacctcccctctgagctcctgagcacagccccaggggacccgagctgcgcgctatgcaaacacaggcctgccctcgccctcggtgcgccccgtgcccgccgccccctgggccgccccgcggtgcgactaggggcctagcccgcctgccccggctcccacgccctcgagaccgccgggcgcccccgcccggccacgccccctcggatgccccgctccgccccgagggggcgtgccctgcgcccccgcgagccgggcggggaccgggcgggagcggggcggggccggggcggggcgcggaccgtcccccactggctgcggcgcgcggggcagcccaggctcagtgcgcggtggcggcggcgtcgcgggcagctggcgccgcgcggtcctgctctgccggtcgcacggacgcaccggcgggccgccggccggagggacggggcgggagctgggcccgcggacagcgagccggagcgggagccgcgcgtagcgagccgggctccggcgctcgccaggtccgtgcttggggccgggcaggctcgcggaggggtccaac

SEQ ID NO: 31453 - DNA, 2300 bp, Homo sapien
ggaggcagagattgcttgagctgagactgtgccactgcactccagcctgggtgacagagcgagactccctctcaaaaaaaaaaaaaaaaaaaaaaaagagcagggccaatgtgctgctgtgccttggggaacggtgtcctgggagcggacctggctggcagtgacctggggctgtgcactggagggggctggacagtgcacttggaggtgggtgagcctgggccccaagacggtctggggacatgggcttggccagagcaggaaatgagggtggccaaggacaggtgctgagccaccgagtcggcacagaggggtgggcatgagggcttcctgggagcagggcccttccaagtccctgaggtcagcccagggacaccctggcctctgggagattcatggtggggctgtgcatgggctgggtggggtcagcaggcagccagtcactgaggggctttcagcgcccattttcctgatgagcacctccagtcctggaagccacaagccaggcacgcagcccacccggccggccctcccggccagctcactggctcccatgggccccggacctccttgggctttgcctgaaggtgggagcagatggccttttccttgtgagggtggacacagaagccaacagtcatgtggggtgaggggacccaggcacctccagcgtcccccgcagggcagcaccttcccctcctgggaacccacccctcttcagctggactctgagcccaccccgtggagcccagaacctcgggccagctcaggctctgccaccagctctctgtcatcctccctcagagccgggctgtgctccccaagccaggggtatccagcccccgctcttcatcctaggccgggcaggcagccagccccaggcctgtgtcctccttggggggcggggggtagggacccctcgcgcggggctctcaggcggcttagctgcgtgcggccccaggtcagtcaacgcagcctctgcacctcgccggtcaggtacgcaggccgcgccgggctgccccagacctgcggcgcacacgggaggctcagcctggaatgccgtcctgccctcctccacctgaggaattgccgctcacaccacagggttcagctccgcggcatctcggcgaagcctcctgacatcccgacccccgccgagacctcccctctgagctcctgagcacagccccaggggacccgagctgcgcgctatgcaaacacaggcctgccctcgccctcggtgcgccccgtgcccgccgccccctgggccgccccgcggtgcgactaggggcctagcccgcctgccccggctcccacgccctcgagaccgccgggcgcccccgcccggccacgccccctcggatgccccgctccgccccgagggggcgtgccctgcgcccccgcgagccgggcggggaccgggcgggagcggggcggggccggggcggggcgcggaccgtcccccactggctgcggcgcgcggggcagcccaggctcagtgcgcggtggcggcggcgtcgcgggcagctggcgccgcgcggtcctgctctgccggtcgcacggacgcaccggcgggccgccggccggagggacggggcgggagctgggcccgcggacagcgagccggagcgggagccgcgcgtagcgagccgggctccggcgctcgccaggtccgtgcttggggccgggcaggctcgcggaggggtccaacggtgctcgcggaggggtcggggcgcggctgtcgcggaaccacagaggtccctgcagcgggccgggccggggcgcgggcttcccgctccggaaagtttgccgccgccgccgccctgggagggctttgcagcagccagggagggaagggggaggagggagggaccgcggcggggaggaggcggccggcgccaggcggcccgggagccctgggcggcggcggcggcgggcggggcggctgggggtcggaggggtcgggacgcaggagccggccaccgccgctttcgtccctgtccgcccctctaacgagctgccttcctcctcctgtagtctcccgagcggcgcccgcctcccgccggtgcccgcgccgggccgtggggggcagcatgcccgcgcgcgctgcctgaggacgccgcggcccccgcccccgccatgggcgcccctgcctgcgccctcgcgctctgcgtggccgtggccatcgtggccggcgcctcctcggagtccttggggacggagcagcgcgtcgtggggcgagcggcaggtaagaagggacccactaggcacgggagaggccggcccgtgcgggcagaggc

SEQ ID NO: 31454 - DNA, 2300 bp, Homo sapien
aaatggtaaccatttacattagtttttgtaaacagttattttacagatgcaggtaatcctcagatgaaatggcccagatctctgagggtgagtaggtggatcatttttttcggggggtgcgggggacagagtctcactctatcgcccaggctggggtgtagtggcacaatctcagctcactgcaacctccgcctcccaagttcaagcaattctcctgcctcagcctcccgagtagctgagatgataggcgtgtgccaccatgcccagctaatttttgtacttttagtaaagacggggtttcaccatattggccaggctggtctcaaactcctgacctcgtgatctgcccgcctcggcctctcaaagtgctaggattacaggcgtgagccactgtgcctggcctttttttttttttttttttttttctgtagagacagggtctcactatgttgcccaggctgggttcgaactcctggacttgagcagcgctcctgccttggcctcgtgcagtgctgggattacaggtgtgagccatggtgcccagctgatagagcatttttttttttaagacagtctcactctgtcacctaggctggagtgcagtggcacaatctcggctcactgtagcctctgcctccctgcagcctccacctcccggcttcaagcagttctcacgcctcagccctccaagtaactgagattacaggtgtgtgccaccacgcctgctaatttttgtagttttagtagagacagggtttcactatgttggccaagctggtcttgaactcccagcctcaagtgatccacccacgttggcctcccaaagctctgggattacagatgtgagccactgcgccctgctggagtattttcgatccaagagaacatcgtggacattatgtagcagcttccagccttctttctcatagaaacaaaggcagagaagcagcacccagactttgggtaagcaaactgtaagacagcagttgtgagacccagcaaacttgaatctcactcagtggggaaacctcagctgatgtgaggctatttttatttctaaatctgtacttagcgtgaatgctgatgggatttgccgggggatgttactgtggtgaggaccaggcccctgcaggtgtgcccaactctggatggctccctgccttcactgagtccatcgtgtgcttctctgcctggtctgtttttccgagtcttcgtctttgcctgtcgacaccccgtgactgctggcatcatgccttcttgtggaagccaccatcgtccttgctaactgagggttgtggagttgtgtaattcagcttgatgcagggaggaggtgtattcccatgtgtgggcactgtcatcacccacacagggaggtgagcccacctcacagaaggaacacagcctggccagggggcagtctgagcctgcgtgggctctgctgcattctgtgtggctcggctctcggcacgccttgactcaagactgcatggattcaggggccccttcctggctcagaggtgaccccagagctgaggagaacctagagacatggtggctggggctgggccagcgcctggagagagtctgaagctgccctcacagggattggggaggtgaccgaggtggggtgcctgtcccccttcccacccctcccaggcctcattggtgtccaccaggcaccttccacgtgtctatttcccgtattcttgagaacctctccgtgaggttagtgttgggtttgcatgtctgtaattgagggaagattttgagcctgggagagtttttgggggaggtccccagaccattactggtgcagagtggagcccctgctgctctggcttctgatcctggtgtgtgctcgctctaagctgccctgggctgacagtgccctgcaccagccgcactgccctctctgggctgcaagccgaggatccccatctgagaaacaagcagcgggtccagagagttccccgcctggcttccagccctgattggtggcttctccgaggctgcaaggcggtggtaatcacgagagccacgtcgttggtgggtgttcccatgttgcaggtaccgtcctggtacttagtatctgttaacacacaaattcacgaggaatgctcccaaagcacagagaggttaaattactcagtctaaggtcacgcagcagtaagtaatggagctggaatttgagctctaacagtctgctccggagctcgggccttgctgctggcgtcaggccatgcacagagagctgatggaagcaggaggagctgatgtgaagttatgcgacacacatggcc

SEQ ID NO: 31455 - DNA, 2300 bp, Homo sapien
ttgggcagggtggagactgcggggagggcttccctcctctttcagtgtcattcaaagtcctgtaaacaggcactagcacagatggggcagtcaccacctcctgcctggccttgccgggacacctgggaccccacagcattaacgagaggagcactgtttcttgcaccctctccggggtcaccctccctagccagcatcgggcagggtcatctggtgctcagaaccaatgtccagaccaggactaggacatacagtcctacagctgggccataaaaagtcctacagctgagccataaaaagtcctacagctgggccataaaaagtccagttctttctgaccctgaccaactgtccactccagctcaggtccaaccctgggtggggaggcaaggactatccttctgtatccccctcttgcctcctgggggatgggtggaaaaggggccccttcatgtctgttggcagcacaggcctaggttcaggcctagttgtgcttaaactctgtctgcatttgatgtctgcagtgcccactgaccggtgtggacacagggacttacagacggcttcaaagtgccctgcactaaacaatgcccccttctcccactgagatggggaattcaagcccatccaggcccagtacctggcagttcctgatggggaaaaccacccaggcaagcaggctacgttttcctgacgggtgaggaccgactgcatggacagcaggggcagaggggaccctggggagggagcctcctagggagatgtgccattcaaccagcctctcaagactggggagctggctggcatcaggcgtttcacaccccatgcgctccagggaacagagatgctgagtgtgcactacaagaccctccccaggcggtgccctgaggtgccgcggagaagcaggaggaggcaggttacatccctgaacaagacagagggcagggcaagtgctgtgctggggatctcctagctggagatctccaccagctgggcccccagcgccgcaggtccccatttttctccctgcctgctttctctgccccaactcagggatcctcatcttagggaaggaaggggaaggtggagctcagaggtcacggtctgctgggaggctgcacggtctctctcccctggactggtcagggccggctattaaactgggctggggggaggctcctgggagacggcgcatgagcggtccgcgagcccagcccagctctggcgggaattctggagacttcgagccaggtccttggcgtcctgggcttcggctgttccttcttggactgggaagtggagcggacagggtatggcccaggttaggaagtctggcgctcttgcggcgcgcgggaccccaggggctgcttaggccagagcgaaacgaggggtccccccgcgccaacgcaggacccatatctacccctcccgctcagacgggaggacgcggtgtgccgggatggggggccgctatgctggctgcgccgccacccggcctagtgccctcgcctccaggggccggcatggccctgtccttcggggcgggaccctgcgctcccgtccccccagtggtgacggggactcccgacgccgagcagcgccgtatctggggagcgccgcccggtacgcagggaagaggcactcagagctgcgcgcgccagagtgcagaccgccgagggcagagccacagagcaggggggccggcgagggaccgcggccgagggcgtcgagggcgcccctccatccccagcgtcccctgacttgcccttggagccccaagctcccaggagccgttttctactcgtgggtgcaggacttagtcccagaaaagttccggacacacgcgctgctgccgccgcccggagacgaaaagacactccccgcgcaagcgcggccgactccctcagctcctgcggccgccacgctgcgagccccggcgtccacggtacgacgggaaccaggatgcagcgagccccaggagccagccgccccggtgcacgccgggaccggtagtccgcgcctcagggtagtccgccgctccggtgcacgccgggatcggtagtccgcaccccagcgtgcaggccgtcccggtgcacgccggaaccggtagtccgcggtggcgcggtccgcccctcacctggccagcggcgggcgctgaggggcccaatgggagccgcggcctggccgccccgccccgcgcctccggacgtctgtgccgggacaaggccgccgctggtgccgggtccttgaggagagcgcctcccgtccgaggccagccgcctctgtcagccgtccgcgcg

SEQ ID NO: 31456 - DNA, 2300 bp, Homo sapien
attttttattttttgagacagtcttgctctgtcacccaggctagagtgcagtggcatgatctcggctcactgcaacctccacttcccgggttcaagtgattctcctgcctcagcctcctgaatagttgcgattacagatgcccgtcactatgcctggctaatttttgtatttttttttagtagagacggggtttcaccatgttagccaggctggtctcgaactcctgacctcaggcgatccacctgtctcggccttccaaagtgcttgtattaaaggtgtgagccaccatgcctggcactggccgtaattttaaaaattcatttatttgtttggtgatagagacgaggtcttgctatgttgcccagtctggtctccaactcctgggctcaagcaatcctttcactttggcctcccacagtgctggctcacacttctcacaggtgtgagccactggccttggctccattttgaattaatttttgttaagggtgtaaagtctgtgtctagcctgatttttttttgcatgtggacatccagttgttccagcaccatttgtcgaaaagactgtcttttctccattccatttcctagagtcaagctcagctgactccattatgtggtctatatccgggttctctattctgttcatggatctatttgtgtatttttccaccagtaccacaatgtctcaattactgtagccttatagtaagtcttgcagcaacccttgtttttttgggggggccacaactcaacccatacaggggcccagcacctgtgaagggacagcagcggaggcggcgcgggagaggaagaggaggtgaactgtggccactccttggtggctggaggtgggtccggggaggcaggacctgggctgaggtgtcgttctatagcccgggtagcgcactttcacaaagctctccttgaccaaactctcgccaggctcccctgggcccgcttctcagcgagggctcaagctgggcctgtaaagctcgagcagacactaaggctcaaggccgaaggtgttcccggctccctgaacctgcgtgacagaaaacccaaggccgccggctccggcagcacctggaggcaggagccgaacttccatgggcggcgggcagcaaatcacaccggcttcaaccgcccggcccgcccactttttgcagcgtctgacttccccgctcgcccgcgccgcttcctcctcctccctgtgccgcacgcagtcgcccgcgccaccccctgaagcccggctctaccgcagcggcgctggggtagcgcccctggaccaggcgtcctcccctcgcgagcggtcctcccgcagccgcgcccagctccgggtcggaccctcgcccgggggactcgttcacgccctgcggccgttaggcgggaagagcacgacgccctgccctgccccgtcgtggcgtctgaccctctccgccacgtctgttctgaggctccgggcccgccacggcggggcctctgcggcggtttccccacccgtccccgcactgccgctccgcgaggcggacgccgctagcagcctcccgcgggccccaggccccgcgcccctctcacgggacaggagcttggggacccgcgcgggcgggccgcgcgcccaacgccagcctccgcggccgcgcgcccacggctcgggggcgccggctccggacggtgattgggcgcggatcgtgacgtcactgagcgcggcgcccgcgggcgccgggtctgggccgggtgcgcgccgccgagtagcgggagcagggcgcgcgcccggcgctactctgaggcggctcgcggggcccgcggcccggccctcccggcgctgccagccccgcccgcccgcgcggcccccacccgccgcgtgcctgcccgccccgcccgtgcgcggccccggcgcggatttgaaaagcccggtccgcgggccccgcgagcgcggcagccaatcagcggcgcgcacttttcccgcggcttctgcgaggcggcggcggccccggctgcggcggcggcggcgggcgggaggcgcgggggcggggtcggcgccgcgcgcgagagcctcggcctggccgcgctgcgcccgccgccgccgccgccccctccccgcctgggccctaccgccgcacggccccggccccctcccagcctgccgctccggagagccgcccgccgaggatgcgacgcaccgcaggtcactggggcgcccgcccaacagtcgcgggccgccaaccgccggggctggggccgggaggccgggctgtgggaggcctgaggggcggcggggaggaccgcggaggcctga

SEQ ID NO: 31457 - DNA, 2300 bp, Homo sapien
taaatggaatcatacagcatgtggcctttgtatctagcttctttcacttagcatcatgtttatctatgttgtagcataaatcaggacgtcatttctttttgtggctaaatatccatcgcatggatagatcattttgttcaaccattcatcagttgatagacagttgggttgctttttgctattacgaataatgctgctgtgaacattcttgtacaagttttttttgttttgttttgttttttgttttttttttgagatggcgtctcgctctgtcgcctaggctggagtgcagtggcatgatctcggctcactgcaagctccgcctcccgggttcacgccattctcctgcctcagcctcccgagtagctgggactacaggcgcccgccaccatgcccggctaattgttttttgtatttttagtagagacagggtttcactgtgttagccaggatggtctcgatctcctgacctcgtgatccgcccacctcggcctcccaaagtgctgggattacaggcgtgagtcaccgcacccggcctatacaaggttttttattgagatggagtttcactttcgttgcccaggctggagtacaatggcatgatctcggctcactgcaacctccgcctcctgggttccagtggttctacctcagcctcccaagtagctaggattacaggcgcccaccaccacgcttggctaattttctatttttagtagagacggggtttcaccatgttggccaggctggtctcgaactcctgacctcaggtgatcacctgcctcagcctcccaaagtgctgggattacaggggtaagccaccacgcccggccttttttttcttttgtgagacaaggtctcactctgtcacccaggctggagtgcagtggcgtgatcttggctcactgcagtctccacctcacaggctgaagtggtcttcccacctcagcttcccgcgtagctaagaccacaggcacatgccaccacgcccagctaagttttgtatgttttgtagagacaggattttgccatgttgtccaggctgatgtcgagttcttgggctcaagcaatccttctgccttggcctcccatagtactgagattacaggtgtgagccactgtgccccgcctacgtggaattgttttatatgagaacagaggttctaccatcattcagtgatagcagggctgaaatatatttcaggcagactagtgtgatatattagaaaatgagggtattttaggtatgtgtaaatcatatttgcaaacttgggttttccatttcagtcttttccgcccccggaggaatgggttggagcttggtccgtctcacggcctggctctggggaatgtcctgaatatctcactgctgtcctagggttgagacctccttctgctcagttggattcacggaattatcagagtgggctttagctgacatctaagccagtgggcaaggttggagcagtgaggcctactgtgtctgaagtgttaaagctccccagagaaccgggcacggtggctcatgcctgtaatcctagcactttgggaggctgaggcgggcagttcacgaggtgaggagatcgagaccatcctggctaacatggtgaaaccccatctctatcaaaaatacaaaaataaaaattagccgggcgtggtggtcggcacctgtagttccagctactcggcaggctgaggcaggagaatggcgtgaacacgggaggcggagcttgcagtgagccgagatcgcgccattgcactccagcctgggcgacagagggagactccatctcaaaaaaaaaaaaaaacaaaaaaaaacaaacaaaaacgaaaaaacgaaaaacctcaccagaaatgcacactagggcttacccagccccagtccaggaaggaatagtcttcctgcctccccattgccctctatgctttctcttttcctagcatatctactcttcctattttctgcctctctcctctagaatattagcacctcaagaataaggaaggcattttgtttgttgctctatttccaagtgctggagaacttgggtgggactcagtggttctttatttttatttctttatttttattttaattttagagatgggtctcgccatcaccatgttgcccagtctggtctccaactcctgggctcaagcgatcctcctgccttggtctcccaaagtgctgggattacaggtgtgagcccccacacccggcctgagtgagtgggttctgaatggtgactgttgttgtccatagccttccccctgcttctgagagtggagtccctcccctc

SEQ ID NO: 31458 - DNA, 2300 bp, Homo sapien
acctccgcctcctgggttccagtggttctacctcagcctcccaagtagctaggattacaggcgcccaccaccacgcttggctaattttctatttttagtagagacggggtttcaccatgttggccaggctggtctcgaactcctgacctcaggtgatcacctgcctcagcctcccaaagtgctgggattacaggggtaagccaccacgcccggccttttttttcttttgtgagacaaggtctcactctgtcacccaggctggagtgcagtggcgtgatcttggctcactgcagtctccacctcacaggctgaagtggtcttcccacctcagcttcccgcgtagctaagaccacaggcacatgccaccacgcccagctaagttttgtatgttttgtagagacaggattttgccatgttgtccaggctgatgtcgagttcttgggctcaagcaatccttctgccttggcctcccatagtactgagattacaggtgtgagccactgtgccccgcctacgtggaattgttttatatgagaacagaggttctaccatcattcagtgatagcagggctgaaatatatttcaggcagactagtgtgatatattagaaaatgagggtattttaggtatgtgtaaatcatatttgcaaacttgggttttccatttcagtcttttccgcccccggaggaatgggttggagcttggtccgtctcacggcctggctctggggaatgtcctgaatatctcactgctgtcctagggttgagacctccttctgctcagttggattcacggaattatcagagtgggctttagctgacatctaagccagtgggcaaggttggagcagtgaggcctactgtgtctgaagtgttaaagctccccagagaaccgggcacggtggctcatgcctgtaatcctagcactttgggaggctgaggcgggcagttcacgaggtgaggagatcgagaccatcctggctaacatggtgaaaccccatctctatcaaaaatacaaaaataaaaattagccgggcgtggtggtcggcacctgtagttccagctactcggcaggctgaggcaggagaatggcgtgaacacgggaggcggagcttgcagtgagccgagatcgcgccattgcactccagcctgggcgacagagggagactccatctcaaaaaaaaaaaaaaacaaaaaaaaacaaacaaaaacgaaaaaacgaaaaacctcaccagaaatgcacactagggcttacccagccccagtccaggaaggaatagtcttcctgcctccccattgccctctatgctttctcttttcctagcatatctactcttcctattttctgcctctctcctctagaatattagcacctcaagaataaggaaggcattttgtttgttgctctatttccaagtgctggagaacttgggtgggactcagtggttctttatttttatttctttatttttattttaattttagagatgggtctcgccatcaccatgttgcccagtctggtctccaactcctgggctcaagcgatcctcctgccttggtctcccaaagtgctgggattacaggtgtgagcccccacacccggcctgagtgagtgggttctgaatggtgactgttgttgtccatagccttccccctgcttctgagagtggagtccctcccctcatgttggagacctcccaaggtccatgtggtcctataggggctgttcagcctccctagccccttaacgtgtcaggtaatactgtatatattccatgaaatgtgaataattagttatataattcctaagcacttattttaaaaaacagcaatgtgatgcttaactcttcccacctctgttcctgtcccccttagaaaaccactgataactctttttttttttgagacggagtcttgccctgtcgcccaggctggagtgtagtggcctgatctcggctcggctcattgtaacctccgcctcgggtttgagcgattctcctgcctcagcctcctgagtagctgggattataggcgtgcaccaccacgcctggctaattttttgtatctttagtagggacgggtttcaccatgttggccagagtggtcttgaactcctgaccttgtgatccgctcgcctcagcctcccaaagtgctgggattacaggcatgagccaccgtgcctgtcctagaaccactggtaactcttaactggtaatttttgttttaacctctgtatttttatttttcacctgagtgctcaaatattttcatcttttttataatggtcatgttgcatttgta

SEQ ID NO: 31459 - DNA, 2300 bp, Homo sapien
tggtggtgggcgcctgtagtcccagctactcaggagggtgaggcaggagaattgaacccgggaggtggaggttgcagtgagctgagatcgcaccactgcagtccaacctgggtgacagagcgagactccgtctaaaaaaaaaaaaacaaaaaacaaaaaacacacttttttttttttttttgtccagcagctggaatctcttttcagttatttcataaactaggctgcttggaatcagcctggaatttgggcagagtttataggcagaatttgggactcccctctgagactctctccttgagatttcccccctcattttatagttgttacagttgcttcaaactctcctcagtcacacatttcaaaatggagttcacccagtgctgttccctttctttcaacagttggttccgtccattttctctctgcttttggttgctctcagttccttcaggaggtggttttttatgttttgtccagggttatagtttttaccttgggacagttggtatgatatgagctggaagaggaactgactttgatctacctttttaagaaattgtgcgggtcagacagaacacatttgtatgtgttttggtgttaaagagttgtccagagcacatgaagctgaactgggacttcaacattttttcaaggttttacatttgctctttttttcctgtctccttcctcagctgtctgcttttctgtggagactgcgggttgcagacaccagcagccccctattgctgcacgtcaggtgtcctccacctcagtactgtggacatctcgggccgcatagccctgttgcgcgggcatcctgtgcgttgcaggagatgcagcagcatccatgaccgcaacccatcagaggtcagggtccgccccctagtggtggtaataaaaaatgcttccagatgaggttaagtgtccctggggaacaaaatcctccccatttgagaaccgctgttctagtccacgggcatctctggtccttactgtactcagattttccctagtgtctgatgctattgatttctggcttctcagagggctgttgttggagcttgtgatggtgtactcctgagagatgccttcccagctggggcgggtgcctacctgtttcttattcctagctgtgttttggggctctggccccttcactagatgtctcagattagggactgtagctttgcagggaagaccccacaccagcatgctgcagcgagttaccttcctaaactgccccttctgcacgtgggcctcactggccagtgtggtgcactggcaaagtaacctgtgttgtggctcagcagtgttgttctcaagtagttaatcttcaggtagtagctaaaaaatgtgaccttactgctgtgttctttcttgtttaatttaggcctgaacacggaggggattagtggactgagataagaatactgggttgagcatagccagacctgactgggattgctttcacccttggagactcttggctttttgcttcttattttcatcaacctggagctaatcctgtgcttggagttggaatatctggttttagactttgctgaccaggtcatcttgggcacattctgagcctctgcctgatacctcagctgtaacaggagggattgggatgagctcttttcctgttagtgttgattttgcttttatgctattccctgttgtccttttgcataggcctggcattatgccagctgcctcacacatattagctcttttaagtatatgttggtggacaggtggaaatctgtgtttcagggatgattggcaagttaagttatgtgtccatggccacactgtagattattagtggtatgactggagtgtgctgtcttgactgactttcatgttcttcctttaaaaaatgattcctttttctttcagctttatcattttgtgattccgtgtaatttttgtgatactaaaactgccttctgtgacctgaattattataaaaacatcataaattgcttacaaagaaaatcagaccccacaaagctgtagaggtcctggcatacctatcctaggttttaaatgtaattgctttttctttcttttttcttttttttaataccatagtgttctaagaacggaagcatctgggctggatggaatttagcatcaagcagagtcccctttctgttcagagtgttgtaaagtgcataaagatgaagcaggcaccagaaatcctcggcagtgccaacgggaagactccgagctgcgaggtgaaccgcgagtgttctgtgttcctcagcaaagcccagctctccagtagcctg

SEQ ID NO: 31460 - DNA, 2300 bp, Homo sapien
ttgtgaggcgtggtggctgtcttgtgaggcgaggtggctgcagggcgcttgtgactctgctttgacgaagcagtaaaggacactgttagcattcatcctaactgggggctctggagtcatggtgggtgatggggtgccaggggcagaggtgggtgggagggcagcaggcccgtgaaggaatgtgctgtgtttgaggaggtgagaggcagatgtgttgtggatccgaagccctgtgcagaaacttccactggttgaagagctgaggcccttggagcttgaagagttgggagtgagtgggctcatggagtgagtcatggcagcaatcagggtagggcctgctgggttgggaggggtgtggcaggagtaggcatatgcagggctggggacagggaccccacagggaacactggtggagtgctgggggtcagagccagacccagaactgcagaaggtgtcctcaaggtgggaggtcccaggcagttaggctgggggtgtctgcaggttgtctagagaggtggtgggtgggcattggtgggtgttggtgtccaggccagggtgaggacaagagggagtggagcacatgactcatccaggcaacaagagggcaacaagagcctcccatggtggggccatgggaggctataagaagccgtctgtggtgactgtcttgggaggaggggtttgggtttgggggcagaggttacctgtattggctgggcaggtggtaggtccaggtggtaatggtaaccaaccaacattaacctgatggttccttaccactgccaggtggagtgttactgcccccgtttcacagagtggaggcagagacagtgccttcacttgccgaagtccacagaactacccagtagaggagccagcatcagagctggttggtgccgagccagtcagcagactttccaaagggctggtgagcagtgagggctctgttctgactgctcagctctgctgttgtggcaggaagacagccatgggcagcatgggaacaaatgcatggggctgacatccagtaaaactttgtgggcactgttgtttgaatttcctgtaatttttgtgtcatgaaatattatgatgtttttcagacattgaacagaaacaggtggtgggttacacctggctggctggcattagtgtgtcagccctgtgccctgctctcgagatccgtggctctcggacttggggacacattagcaacccctgggaaacctttaactcactgaggccagacccggtgggttgggttgatcttgggtgggacctaagcaccataggatttcaaacccccaggttattaccaggtggagcgaagtccccaggatcagacttcggtgtgtctgcggatcatcctagagaccttgtgaaagtgcagattcctggtaggcaggttggggtggggcccgggagtctgcatttctagcatgctccgggtgctgatgctggcagccctggtgtggctggagggtagggaagcctcgtcttttggctgtgcaaggttgtctccgtgtgctggcctgggctgtgacagaagccagctcgcactccttggtgtgtgccttcacccctgcccagggcctgtacctgaaagacgagggtaggtgctgcccagtgaggacactgagctgagcccacctccatgttcaggggcagcgttcctgtggcactggctctacagctaatttttcaggggtgcctagaggctgggtcttaagtgagttagtggttttggaaaagtatatatatatttttatcatttatcatttccaacatttacagaagtagagttgaattgttttcactggcactattctaatttatgagttttcattgagtcacagcatcagttaagcactacttttctttgaagcttttatggacatagttccacgatgtgggaataaaaatgcgacacactaagttctaaagggccgtgcatttgatttcatgcaaaacaaaacccaatgagttttacggatttaacttctcattgcaccttctcccgttcccacaggtggtagctgagcacccagatgcttcaggtgaggagattgaagagctgctcaggtcacagtggagtctgctgagtgagaagcagagagcacgctacaacaccaagtttgccctggtggcccctgtccaggctgaagaagactctggtaaacatagcattatgctgatgtcctctgcttgggttgatgtgtgtagtgtagcaagctgagctctgatcttggaaccgtagggaagtgtgtccactctccctgtttctgacccgtggggtttgggcc

SEQ ID NO: 31461 - DNA, 2300 bp, Homo sapien
agctgggattacaggtgcgtgccaccatgtccagctaatttttttgtatttttagtagagatggggtttcaccatgttggccaggctggtctcaaactcctgacctcaagtgatccgcccacctccacctcccaaagtgctgggattacaggtgtgagccactgcggctggccaggttaccttctattaaagcagccctttgctggcaatcatactgaaactggttgttttgaaatatttgtgtaaatgttatacctaaaaaatacatgaccctagacactcagaataccaaaattcacattaagtggctagtaatgttttattagctcctatctcaggagatagcacatgataaaaagaagtaatggtgtcttgtctcttcagatttgggttttataaacctgagccaaaccacatatgacacccaatgtgcactgagcacttctgacatgctaggcactgtcccaagtgcattctcctgtcgccttgtccatgatcctctggattccacctcaccgcatcctgtctcactggctctggttccaggcaggtgggtgagatggagtatgagtgcaggagtggcaagtcattccctgggcagcgctgctctagtgctatggggacaggacagttttcagccacacctttcagaatctcagcccttgagaaaagcttcatgatcccttctcccatttcttgcttttctcagttgtgacatgttttactgatgatctttgttcattaggtgtatctggtgtttgtctaaaaattggaaatcctcagtatagtgatactagtaatgttggtcctgacttagcagggctgagtctaacttgattgggcacctcttgaatggaaggatccatttttctcatgttcatcctctgctttgggttcagtggagagtctaggtgcatgttcaataagactcgtatcaggtgtcttaaccacatgactgcagcgggtcttggcgtggccccacccacctcgccctcctgacagatgcgagagcgggaggtgcgaagaaagaatcagtccagattgtgaaaaaagtctgagattgggcaaccatggatgacttatgtgtggaacacatttccaaaggaagaagtttctgccacgaaacttttcagcaacctgtgttcattcacatgaggagattttttttcctttcttttccttttgttgttctttttctttttttttcctttttttcttttcttttttttttctttctttttttttttttttttttttttttaaataatagagagacacaatcactgacaaaacggccagaacaagctcttacaaggccatggaggcagcctcctcgctcaagagccaggcaggtaatgtggtcagcgccctttccttcttggcttctgggtgcccaggctgggctgggtgggtgggctgagagtgtgaaaggggaaggctggggctggtgaaggggaacagggcaggggaggaatccacaattaagctaggagtgaaaaagaaggaaaggaggttctcctgtggttgaaaactaaactgttttaatgtgtatgttattttgaagggtttggctaaattttattgaagttactttttacttggctctattatttgcaatttaaaattttactagaaaagtgatttcaaccagaagttttcaggtttcttacttgatggtgccagttgctactgtaaattctgtcacccttcagtaccctgaccctctgcatgtaagctaacagtaagggctcgttatttatatttcacatgctaaagaaactagcttaaaacctttatgaaaaataattgtcaaaaaaataagaggggaaattacacttccttttaccttttagttatctttttgaaatacctgtttgatcccttattgaagaagtcataccttctccaactcttaattaaaaggaaaacaaaaccctggggaggagagtggcaatggctctgtttttcttgttttgcatgaggtgcttgactggcttttaaaaatcagttaaacagactttaaaaaaaaaaaaagacatgagcaattggacatttgaacgctagctgatgatataagagcattgttacttttaagtgtgggagtagcattgtggttatatgtaagactttatgtttagagatttgtgctaaacttcttatggatgaaatgatatgtctgggatttgcttcagaataatctggcagggggacgtggaaccaggtatggatagagccacgctggccccaggttgatgtttttgggggccaagtagcgaggacatggggttcattgtacagtt

SEQ ID NO: 31462 - DNA, 2300 bp, Homo sapien
gggcctccccagccaggctgcctagtaagattctcctgtatttcaggtgaagctggagctcagatcgcagcaaggtaatccttgatggctggatctttttgctggagaatgcttggactagtgagcaaggttggaaacagggccaggtgctttagcagcatggctgcctctgaagaggagttgcttgattttagtggctcagaactgcaatttaattcttgttctttgcacctctctctccaccccttctttaactttttgttagggattcactcatgtttcgtgtgtaaagagagcaagacagatgttaagcgctgtgtggtaactcagtgtggaaaattttaccatgaggcttgtgtgaaaaaataccctctgactgtatttgagagccgaggtttccgctgccccctccacagctgtgtgagctgccatgcttccaacccttcaaacccaaggccgtcaaaaggtacaggtgcacctgcgcagccttgctgtgggttcagatgcaggccagacgcaggcccatgggcgcttgggaaggtgggctgttgggattgtcaccaaagagcattaattatcttgagtgactaactggacatcggctgggttgggttttctttgacaaaggacctgtctcccttttccttctttccatcctaaatatcaccctaaagatgcttaactataggagaggggcaacctttggaccatttgatagattttgtttaccctggcttttttttttttctttatagagatagagtcttgctctgttacccaggctggagtgcagtgcagtcacagctcactgcatccttgacctcctgggctcaagctgtcctctcgggctcaagctgtcctcctgcctcagcctcctgagtagctggaactacaggcacatgccaccacacctggctgatttttgtaaatttttttttttttggagaaaaaaaatctccctctgttgcccaggctggagtgcagtggcacgatctcagctcactgcaacctctgcctcccaggttcaagcgatcctcctgcctcatcccttcagtagctgggattacaggcacgtgccaccatacctacctaatttttgtatttttagtagagacggggtttcatcatgttggtcaggctggtcttgaactcctgacctcaggtgatccacccgcctcagcctcccaaagtgctgggattacaggtatgagccaccacgccttgccaatttttgtatttttttgtagagatgaggtttcaccatgttgcccaggctggtcttgaactattaggccactgctctgacctcttttcttttttttgagacagggtctccttccgttgctcaagctagaatgcagtggtgtgatcatggctcactgtagccttgacctcccaggctcaggtgatcctcccacctaagcctctcaagtagctgtgaccacgacgcctggctaattttgtttatttttttgtagagacgaggtctcactgttgtgttgcccaagctggtcttcaactcttgggttcaaagaatcctcccacctgagcctcccaaagtgttgggattacaggcatgagccaccacacccagcctgtttgctctggttttaatggcccattatatgtaagaaaacatctttaaatcaaattacatttggattttctaatgttaggtgtgtgggatgagggtggcaggttttctgtacttcttgacaccagtggttctttatcgggcaattttgtcctccaggggacatttggcaatgtctggggatattttggggatgtgctcctggcatctagtgagtagaggccagggatgctgctccacactgcacaatgcccaggtcggctgcccacgtgccccaggtgcctgcagtgcccaggctgagacacgcggcattttagatgtatgaccattttctcaaacatggttttgaagcacctttgctctgaaagctttttttaaatcaaatacctccatttcattttagcattaacttttcaaattcatggaggctgagtaattattagttgctcttttcactatgactggagtcagtgtttggggtccttagggtgtgtttctttgccttcaggtaaaatgatgcggtgtgtccgctgccccgttgcctatcacagcggggatgcttgtctggcagcaggatgctcagtgatcgcctccaacagcatcatctgcactgcccacttcactgctcggaaggggaagcgacaccacgcccacgtcaacgtgagctggtgcttcgtgtgctccaaaggtgaggggcctgggggtg

SEQ ID NO: 31463 - DNA, 2300 bp, Homo sapien
ttctcctgcctcagtctcccaagtagctgggaccatacgcacctgccatcatgcctggctaatttttttttttttttttgtagagaatggggtttcagcatgttggccaggctggtcttgaactcctgacctcaggtgatccgcctgcctcggcctcccaaagtgcttcgattacaggcgtgagccactgcacccggcctcaggtgcatttttattttctgtctgagaacagcaagtcccaggctttgaccctggtgctttgtccttaggccatagtggaggacagggagctcccgacagaactctgccctgggcctgtcttgtagagaggtgatggctgttctctgagcactcctttgcctcacacacttggccgcatttaaaaatacctgcccactgacagttgttcatagactctagttttatgggaaccagaaactatacttaacattgaaagtttagagtgaactataaaaatatggagcttgaaaggtagttacctgtatttactaaaatctttactcctatttcattgactttttagcactgcaagaagctgaagctcgttttcgtgaaattaagcttcagagggaagcccgagaaacacaggagagcgagcgcaagcccccaccatacaagcacatcaaggtggcgtgtgggagctgcgtgcacgcgtgtggagggagtcttccccgagggccgtgagaggttcttaggcacacccaggctatggctggggagaggactgtcaccagccaggatctgtggtgcctggcatggatggccacacaagagaccatgagcaaatggcatggggggatctgcatgggggttcttggatccgccttggagtgtgaggcttggcttggtagcttagagaagggttggggtgacagtcctgaccgggctgcttggagcaggaggagctgagggatgagcctcccacctgcaccaggctgttgccaagtgctgggagtcagtcacatacggccagggctcagtgactgagccccaaacacgtagatcctgtacctcagagagcaagatggcggggcggcaggggagcttgccagttctgtgtttattccagtgagctcgagagccccagcaggaggaagtgcagccagggcagggctctgtgagagctccaggcccctcagggctgcctgcgctcagagctggtgcggcaagccgcatccccaggagcctcgtggccgttcctgacgagtgtttgtgataagtgtgtgccggaggtcaggtgctctgcctttgcttgtaaaatgtgggctgcagtcaatatctttgtatgtaaagaaagtgctctgtattcatctttatataatattttctttgggatggattcccagaaacagaatcacagggtcagagagtatgaaatgtttagattcttggggaatattcccagattgttctccaaaatgtacagtttgtcataccacagcagtgaaaagagtgtctttcgccacctcttccctaagattatgcatttctaccccagctgattttcagctgtctctactgctttgttatttggttgcttgtctttcactaatagtaaaccacaaggtcatgagagcagaggctatgccctcctgcctagcactgctcctcctggggtggactcccatgtggcttgctgctggtgcttggtaaaggaagagtcagagagatgggtcgggaagctgctcagaagagctcttaccagcgtttgctggacaccctgcagtgtactaagcaatcaacacgctttttctctcttcatcttacaatggcctggctggatacgtgtcagctcttgttcatcagcgatgtgcacagacactaagataaaataatgtgagggggcgttgtgttgccctgcctgcctcttgtgctaagaaggcagaggagagctcctctgggatctggggagggctgttctgagtagtgtgtcctagccaggactctgaagctttctaaaaggccacctggaggctgggtaaggagaggcagtggtgggtgtgcaagggtattcggaaggctctcatgtgtggaccaagacagcttactccttccctgcaggtgaataagccttacgggaaagtccagatctacacagcggatatttcagaaatccctaagtgcaactgcaagcccacagatgagaatccttgtggctttgattcggagtgtctgaacaggatgctgatgtttgagtgccacccgcaggtgtgtcccgcgggcgagttctgccagaaccagtgcttcaccaagcgccagtacccagagaccaagatcat

SEQ ID NO: 31464 - DNA, 2300 bp, Homo sapien
tgtgatccgcccacctcagcctcccaaaatgctaggattacaggtgtgagccaccatgcccggcttttttttttttgacagactcttgctctgttgcccaggctggagtacagtggcgccatcttggctcaccagaatctctgcctcccaagttcaagcaattctcctgcctcaccttccccagtagctgggattacaggagtgcaccaccatgcctggctaatttttgtattttcagtagagatggggtttcgccatgttggacaggctgatctcgaactcctgacctcaagtgatccacccgccctagcctcccagagtgctgggattacagacgtgagccaccgtgcccagccaatttttaatttttttaagaaatgaaatcttgctctgttgctcaggctggagtggagtagtgccatctttgttcactgcagccttgaacccctgggctcaagtgatcctcctgcctcagcctcccgagtagctggaaccacaggcgtgagccactatacccggccctattcctctgaaaagcttagtaaacagcagttctttataccagggaagaggaagagacattttaatgatgtgatagtttattcagtgaagagtacagaaatgagttagggcccctgctctctaagaattacagaccttacaaggtaggcctgggccgggcgtggtggtggcgcctggattcccagcactgtgggagcatgaggcaggagaatcgctggacctgggaaggcggaggttgcagtgagccgagatcctgccattgcactccagcccgggcgacgacaacagcgagactctgtctcaaaaaaaaaaaaaaaaaaaggcccaggggagctcgttcccaccttccaccagcaaaaggcaccttccatgaagctggaaggggcccccaccaggcggggaatccaccagcgccttaattgatcttggattcccacctccagaaccgtgagaagtaaatttctgttgtgtgtaagccaagcattttcttttttctttctttcttttctttttctttctttctttcttttttttttttgagatggagtttcgctcttgttgcccaggttggagtgcaatggtgcgatctcagctcacgcaacctccgcctcctgggttcaagcgattcccctgcctcagcctcccaagtagctgggattacaggaatgcgctaccacgcccggctaattttgtatttttagtagagacagggtttccccatgtgggtcagtctggtccccaactcctgacctcgtgagccgcccgcctctgccggccgaagtgcggggtctacagacatgagctaccgcgcccgggaaagccaagcgttttcctacaagaagccccagtagagcgagccaggcttcaacatgcgcgttctggagagaaaacattgactccacaacagtggtcctttttgttttaaattaacatccccgactttttttatccttaccatttttataaaatgccgcgcgcttgcctcttggcaggcgtagggtttccctggggctgctgtggagaggccgcactggctggaaacagccgggctgtgcggctgccagaggcagcgtgtgcgcagcgcttcctgcagccacgtagcatcttctgccgcatcgcgcactcagctcgggcgggcgtcgggagtgagggcccggggcgcagggtcagcggccggggcgacaccctccctggttgcccaaggaacagaaggggctgggccacgcggggggttcttgactcctgagggcagctgggtgtcctgcagggcagatgcagaggggcttggcagcaggcaggctcccctggcacgacctctgatctctgcccttcgagccaacttccctcagggcaggaagcccatgaggacagtgagggaagcgctggaaggtcctcccactcagaggccaccaggaggcggcgctcgcggggacgtgatggccgcagccctcgtaggacgggtctctggcgcctgacgcagggagtgggtgtcaggaaggcctggggctggggtttcagccccggcgtctggacagggcagggcgctgttgttcacccccagcgccagccagcccagctgtctcacactgtgagcagcccagtgggcgcatggcagaggcacaggcacgccatggcctggctctctgcgtttcctcgtgggagggggtttatgtggccgaagcaggccctggtgtggatggatctggcctcccaggtattgagggagcacggggtgcgcctgcttcctccacgcacgtcgcccatggcctccccaaggc

SEQ ID NO: 31465 - DNA, 2300 bp, Homo sapien
tctggtggaattcagctgtgagtccgtctggtcctgggcttcttttggttggtaggttgttactgcctcattttcagagcttgttattggtctagtcagggattcgacttcttcctggtttagtcttgggagggtgtatgcacccaggaatttatccatttcttctagattttctagtttatttgtgtagaggtgtttatagtattctctgatggtagtttgtatttctgtggggtcagttgtgatagcatctttattattatcattattattatttggtgtctatttgattcttctctctcttctttattagtctagctagcattctgtctattttgttaattttttcacaaaaccagctcctggatttgttgatattttttgggggggagggtttttcgtgtctctatgtcctttaattcttgtctgatcttagttatttcttgttttctgttagctttggggttagtttgctctcttgcctctctgggtcttttaattgtgatgttaattacatctctgggtcttttaattgagatctttctagctttctgatatgggcatttaatgctataaatttccctcttaacactgctttagctgtgtcccagagattctgctacattgtctctttgttctcattggtttcaaagaaattcttgatttctgccttaatttcattatttgtccaggagtcattcaggagcaggttgttcaatttccatgaaattgtgtggttttgagtgagtttcttaatcttgagttctaatttgcactgtggtctgagagactgttatgatttcagttcttttgcatttgctgacttccagttaattacatggtcgattttagagtaagtgccacgtagcactgagaagaatgtatattctgttgatttgaggtagagagttctgtagatgtctactaggtccacttgatccagagttgagttcaaatcctgaatatccttgttagttttctgtctcgttgatctaatattgacagtggggtgttaaagtctccccctattattgtgtgggagtctaagtctcgttgtaggtctgtaggaacttgttttatgaatctgggtgctcctgtattgggtgcatatatatttaggatagttagctcttgtcgaattgttccctttaccattgtgtaatacccttcttgtcttctttgatctttgttggtttaaagtctgttttgtcagaaactaggattgcaacccctgtctttttgtttgctttccatttgcttgaagtttcctccatcccgttattctgagcctgtgtgtgtctttgcgtgtaagatgagtcttctgcatacagcacaccaatgggtcttgactccttatccaatttgccagtctgtgtcttttaattggggcattcagcccatttacattgaaggttaatattgttatgtgtgaattcggtcctgtaatcatgatggtatctggttattttgcacactagatgcagtttctttgtaatgtcattggtctctatattttggtgtgttttttcagtggctcgtactggtttttctttccatatttagtgcttctttccagagttcttccggggcggggctggtggtaacaaaatccctcagcatttgcttgtctgaaaaagattttatttctccttcacttatgaagcttagtttggctggatattaaattctgggttgaaaattcttttctttaagaatgttgaatattggcccccaaactcttctggcttgtagagtttctgcagaggtctgccattagttagtctgatgggcttccctttgtaggtgacctggcctttctctctggctgctctgaacagtttttccttcatttcgaccttggagaatttgatgattatgtgtcttggggttgatcttctcatggagtgtcttagtggggttctctgtatttcccaaatttgcatgttggcctgtctctaggttgaggaagttctggataatatccttaagtgtgttttccagcttgtttccattctccccgtctccttctggtactccagtcagtagtaggtttggtctttttatgaaatcccgtgttttttggaggctttgttcgttccttttcattcttttctctctattgttgtctgcatgtcttatttcagtaaggtggtgttcaaactctgatatcctttgttccgctttgtggattcggctgttaatacttgcggatgactcatgaggttctggtgctgtgtttttcagcttcatcaggtcatttatgttcctctctaaaccggttattctagttagcaattcct

SEQ ID NO: 31466 - DNA, 2300 bp, Homo sapien
tctcgtcgatttacaagcattccttttttcattctgaatattaatccattgctttctgatgctgtaactaagtcctcctagtggtttgtcttcttggttaagccagatgttaacttggatttttcctgcataaaactgaagactcaagatgcatcaagcactgtatacagaaaagtgctgcgtatcctacagaaagctacagacagttgggggtcagaatcattcggattgtttcaagtttggggctattataaataaagctgctataaacgtttgcacacaggtttctgtgaacaaaaattttcatttcaaccaactaatgtttacggttcaatcatgatttcacaacttgaagtaactttcactcttctcatactaaatttgatatgtcgtccactgttaaactatttcttaccctcagattataattattaaacttttttttttttttttgagagggagttttgctcttgtggcccaggctggagtgcaatggcaaaatctcggctcaccgcagactccgcctcccgggttcaagccattctcctgcctcagcctcccgagtagctgggcttacaggcaagccatgcgccaccaagcccggctagttttgtatttttagtagagacgaggtttctccatgctggccaggctggtctcgaactcccgacctcaggtgatccgcccgccttggcctcccaaagtgctgggattacaggcgtgagccaccgtgaccggcctaatcattaaacttctttcagcactagccccactgatgtcacaacttcacccattagtcaataacttgtctttgctgaattcgacacttttgaatcatttaaaaaatattctcttaaattttatgtgctatttgcaatgtaacggttgtcgacatgacagttttaagtttaatctttatcatcaacattttctctatcactttcttcagtttaagcaatcaacaaaaccaccgctccagcactgatttgtagcatttgcgggtttcccccgtgtgacttccgcaggactgccaagttcaagccgccagggccagggcactgctagcagctgggctgagccctgttctcccggcgttcccaccgcccagtggcaatagctgtgaacggcggcaggagcatggcagtggaacaataaggaaaagatcttttaaaaaaaagatataatacagaagccaagcaaggcggccccgacctgtaaccccagcactctgggaggcagaggcgggcgggcggatcgcttgagcccaggagtttgagaccagcctggccaacataggaaggcctcgtcaaaaagacaaaagggtaaaacgaatttaataaaatgaagtttaacttttactcatgtttgtatctaatgacaagcttttaaaactgaaaagttcactactggctcctgcctggcggctccagcccgactgggggccggggcctccctgcactgtggggtcacgagtgcccctggacagctcccgagcgccctccgacccgcatgctcagcgcagccccgtcggcggcgcgccacgggcagagcgggctcagcgggggacggaagctcagcgctgcgaccgggatcccgcaggctcgctccgcagggccgcggctcctctccgtgcaggtgctgggcccgcgggggcggggcgtccacacggtccgcgccgagacccaagcggggaaaaagcgaagagcggacagcggggcaggtgccacagggagcctccgccccaccgcgcgagcagcaagtctgcggcgcttgacacctgcactgcgaatgccaggccgcagcccgggctcccaagacgcgaatacgcgcgcctgctcgtgacgtcattttttgcggtcttcccgagagccagcagagggcgccgccatgatgttttacggaagccgatagtccttgctcagcggcaccccgtccttccggctctcggctttgccacaaagcttcccgaagacgcggccgctacccggagacgcggtcgccacccagaagcgctctcccgggaagccccgctcgtgggaccgcgccacctgcgccgcctctgcggcccgcagcccgacgggcgccgccatgttggggtcctagcgagggacgcgtaggtgtcttcataagatgccggggcagcggcgcgcgctttcccccaagatggcgtccatgcgggagagcgacacgggcctgtggctgcacaacaagctgggggccacggacgagctgtgggcgccgcccagcatcgcgtccctgctcacggccgcggtcatcgacaacatccgtctctgcttcca

SEQ ID NO: 31467 - DNA, 2300 bp, Homo sapien
agagaaatactatgttcactagacagaagttaccagttctccctcaactgacctacagattcaacacaattccactcaaaatgccagaagcctttttttttttttgtagaaattgacaaacgattctaaaatttatatggaaatgcaggctgggcactgtggctcacctgtaatcccagcactttggaaggctgaggtgggtggatcacttgcggtcaggagttctagaccagcctggccaacagggtgaaaccccgtctctactgaaaatacaaaaattagccaggtttggtggtgcatgcctgtattcccagctacttgcaaggctgagccatgagaattacttgaacgcaggaggtagaggctgaagcaagctgagattgcatcactgcactccagcttgggcaacagagccagaccttgcctcaaaaaaaaaaaaaaaaaaaaaaaaaaaaaaggaaatacagaggacctaaaataacccaaataactttaaaaaaaaaaaagtcagagaattaacactacctgatttcaacacttattttagaaagctatagtaaccaagacagtctggtattggcataaagatagatgagtaagtcaggatagaaaagtccagaaaggatcgtcatttcgacaaataatatgggaacaactggataccatgttttaaaatgaaaaaaactttggctttctaattttgcaatctgataggtgtaatgaggcatcttgttattttaatttgggtttgtcaggttgctgatgaatttaagcatctctccatgtgcttctccggtatttgggtttctcctacgaattgcttttttttttttttttttttttgagacagagtctcgctctgtggcccacgcctgagttcagtggtgtgatttccgctccctccaacctctgcctcctgggttcaagcgattctcctgcctcagcctcctgagtagctgggatgacaggcatgaaccaccacgccccactgttttcgtatttttagtagaaacggggtttcactatgatggccaggctgtgaattgcctattcttatcttctgcacatttgtctattgtcggtctttttctcgtcgatttacaagcattccttttttcattctgaatattaatccattgctttctgatgctgtaactaagtcctcctagtggtttgtcttcttggttaagccagatgttaacttggatttttcctgcataaaactgaagactcaagatgcatcaagcactgtatacagaaaagtgctgcgtatcctacagaaagctacagacagttgggggtcagaatcattcggattgtttcaagtttggggctattataaataaagctgctataaacgtttgcacacaggtttctgtgaacaaaaattttcatttcaaccaactaatgtttacggttcaatcatgatttcacaacttgaagtaactttcactcttctcatactaaatttgatatgtcgtccactgttaaactatttcttaccctcagattataattattaaacttttttttttttttttgagagggagttttgctcttgtggcccaggctggagtgcaatggcaaaatctcggctcaccgcagactccgcctcccgggttcaagccattctcctgcctcagcctcccgagtagctgggcttacaggcaagccatgcgccaccaagcccggctagttttgtatttttagtagagacgaggtttctccatgctggccaggctggtctcgaactcccgacctcaggtgatccgcccgccttggcctcccaaagtgctgggattacaggcgtgagccaccgtgaccggcctaatcattaaacttctttcagcactagccccactgatgtcacaacttcacccattagtcaataacttgtctttgctgaattcgacacttttgaatcatttaaaaaatattctcttaaattttatgtgctatttgcaatgtaacggttgtcgacatgacagttttaagtttaatctttatcatcaacattttctctatcactttcttcagtttaagcaatcaacaaaaccaccgctccagcactgatttgtagcatttgcgggtttcccccgtgtgacttccgcaggactgccaagttcaagccgccagggccagggcactgctagcagctgggctgagccctgttctcccggcgttcccaccgcccagtggcaatagctgtgaacggcggcaggagcatggcagtggaacaataaggaaaagatcttttaaaaaaaagatataatacagaagccaagcaaggcggccccgac

SEQ ID NO: 31468 - DNA, 2300 bp, Homo sapien
tgagaaaaattataagaaaggcacaaatatgtgttatttattgagaaaaaggaataattttaaggttatttcaaatatggatttaggaaggaaacagaaacaacatccaaaggaaccagcaagtatgacagagagagagagacagagatgaagacagtcatgggaatgaagatgcatttttggtaagaaatatacatatatatatatattttttgagatggagtctcactctgtggcccaggctggagtgcagtggtgtgatctcagctcactgcaacctctgcctcctgggttcaaatgattctcctgcctcagcctccccagtagctgggattacaggcgcgtgccaccatacccggctaatttttgtatttttagtagacacggggtttcgccatgttggccaggctggtcttgaactcctgaccccaggtgatccaccggccttggcctcccaaagtgctgggattagattgtccgtgggcgcgactgtccgtgggcgctaggggcaggggtgataggagcaggtcgcgagcgggcgcagcgtgggaccgaaggggagaaggacgcctgcggcccggcgcgtccccggaggcacgtcccccccagggctccgcggccccggcaacagcgcggggctacccctctacggctcccgccccactgggggaccgcgacggcctgctcccgggctcttggctccgagtggagaagagcgcggaagtgcgcactagcccgacactcgggagggccgctgcctccccaggcgcctgggacagcggcccgcagcccccacccggcccctcgggccccgcgtgcgtttcagcgcgctgaggatgcagcacacccccgaggtgcgaccgggtccccgaagcccggcgtcggcccaacccggaggaggcagcggcagtcacgggcacgcttccccaacccaccctcccacccactcttagggtcaggacacccgcgtccggccggggcaggggcggctctgaccacgcgagaagcaggtgcgtccgcagtcccagcttgtgccgggaagaccaccggccagaaccccgggggttgggggtagaggtcggctaggctggggaggggggcgcccgaggctccgggtcctgcacggcgagcggggcggcctccaggtaggggtgcggctccgcccaccaagaagagggtctggcgggaggtgtggttagtccctgagctcccggccacagcgcgggctgctgggtggggtggggggggagcgggggcgccagcacccacgtgcgcctggggcgccttctgaggaggccaccgcctgtgtcggtgtcggcgtgggggcctggctccgacggctgggaccatccctcccagggcgtccggggcccagattcgcacttgccgggcgcccccgggggccactggctgcacggcgctctttaaggccaacagccctgagttcacgggactgaaatcggcacagagaggccgaggacctgtggtcggggctccgcgcaagcggttctccggtctccgaggacaccgagaggcggagaggaggaccctgggttgggggtgggtagccgggagggaccgagcaggctggtgcccaccctgacgcccgaggatcggggagaggctgggccagggaaaagccgggcgagggcggatcccccgagccgatcccccagaccagctctctccgggcggtgcgaccccacactggaccccactcgcccgcggtcggaggccaagcgtttgcatgcgcagctccccgcgcctcgcgagcatcgagcagctccctcaggatcgctcctgacctgctgagctccagccacagatttcccacttcctcagcttttctcccgccggccttgcgctctggaggtctcgccccggcgccgcctcctccaggcagtcctctagactgcatccgccatgggcctggacgctgctcccgggggcagcccccggccagggccaggcacacccgattcctggagcgtcctaggttcctctaaacccgcggccagcgcagtctcgggtttccatgacgacgacgtcggatggggaacccgggcggggtcgggtcggagcgcatgcgcgttgcgcgccggacgcggaacgtctgccggtgtccccgcgctgctggtcccggggtccctgaaccgcggtaagggcggtggtgcgggcgtccgaatgggcgttttctagatacggggcgcggactagaggctcgctgggcccggagaccggcggactggagtcggggaaccggaggtggggagggggctcccgggcccggggtgggtggg

SEQ ID NO: 31469 - DNA, 2300 bp, Homo sapien
atctggcccagagacacctgagtacagggcctcagtcccgcctccccactcacgcccggggcaactgctggaaggcattttgttctttcttttctttcctatagtgtccgcctggccgcctcagcgtcatcttcatgttcctggaatttgtgacaaataatgtacaccaatcaatagcttatgccattttaatgcaaattcttggtgaatttaggagctgcgtcttcatttttcctttaaaaacgcacttgcaactgctgcgaatgagagcgcgtgcattcagaccaacctgagtctgtccttccacgctgcagtcctcaaacttggccccaacaaactatttctattcgttttgcctgttttctcctttaggttgaaaagctgacagcgggccccagacactgagggggcgccttcccagcttggcttcccctcccccccacgcccccaccccgtcccctgcccctctccagggcccgttctctggcggacggggctgtggaccagttcagccgcccctccccaccccaccagggcgctgcggcctcactcccacgtccacgggcaggcccagcccctcctggccttcaggtgacctcagctgcccggctggccccaactccaccgcacaacgcagactgcgggtccccaggcctggacccctggccccgtcccgcccgcgcatgtcggggaagctctgctccggcagccctcggggtggtgctgggaggtcgcgcagaactgaagggggctaggttcgagaagcgccgaggatggggtctgcgaccgcctccccgcacctgagcttctccgccccagcctgcggcgtctgcaggtcctacaaggcgcagagcccccgctgcacctgcaccgaggccacggggcgcatgcgcggccgcggggggcgggggccgggccgggaggggtcctgcgggccccgcatccccgtgcccactgcggggctcggacaggggggcgccgcgccaggccgcagaccccgcccttccgcgtccccactccggctgcccgtgcggctccggacgaggcttcccgggggctccgggccggggcagccgcggcgccctctccccaggtccaccgcgggcgctgctttcaaacaaaggcaggagacggagcgggagacgctgccgtgactgctccgggcggccgcggaggaggaggaggaggacgtggcgccgcgatcgccagcggtcgggcccggggtcggggcgctcccaggcgcgcggcgtgggagcggggggcggggcgggcggcgcccatcacgcgctccgcggccgggtcccgagccccgccggacgcccccgggccaggagcccccgcccgcgccgccgcccccgcccgtgccgggcccctcgcgctgcccggccgccccgtcgcgcccagcgagccacccggcgaggcgggggcggcgtctcccccacccccgcgatcacatggtgacccccggcagccaatgcagtggacgctaggaccctgcgggccgcgggcgccgcgactgcaccggcgccgccgcattataaatacttctccaaaatgcggcgcagctccctgcgcgcgccccggccgcccgccgcctccgccccgcgcccctgagctgccgccgccgccgccgccgctgccgccgccgccgccgccgccgcgggtccgagggcgccgcgcccttgccctgggcccggccgtgcccgccgccgcccggccgcgtccccgctgccgcgccgcccggccgggtgcatgcattgtgggcctcccgacatggtctgcgagacgaagatcgtggccgccgaggaccatgaggcgctgccgggggccaagaaggacgcgctgctcgccgccgccggcgccatgtggcccccgctgcccgccgcgcccgggccggccgccgcgccccccgcgcccccacctgccccggtggctcagcctcacggcggggcggggggcgcggggccgccgggggggcgcggcgtgtgcatccgcgagttccgtgcggccgagcaggaggcggcgcgccgcatcttctacgacggcatcatggagcgcatccctaacacggccttccgcggcctgcggcagcacccgcgcgcgcagctgctctacgccctgctggcgggtcagtgcgccgggcccccggctgccgcagtccctcgggccggcgcggagctcccccgccccggcgtccacgcggaccccgcgcccggctcccggggaccagcctgggaagccccccgctttctgccgcgccgggccccgcgcagggctggctatgggcgtggggatgggcg

SEQ ID NO: 31470 - DNA, 2300 bp, Homo sapien
ggcgctcccaggcgcgcggcgtgggagcggggggcggggcgggcggcgcccatcacgcgctccgcggccgggtcccgagccccgccggacgcccccgggccaggagcccccgcccgcgccgccgcccccgcccgtgccgggcccctcgcgctgcccggccgccccgtcgcgcccagcgagccacccggcgaggcgggggcggcgtctcccccacccccgcgatcacatggtgacccccggcagccaatgcagtggacgctaggaccctgcgggccgcgggcgccgcgactgcaccggcgccgccgcattataaatacttctccaaaatgcggcgcagctccctgcgcgcgccccggccgcccgccgcctccgccccgcgcccctgagctgccgccgccgccgccgccgctgccgccgccgccgccgccgccgcgggtccgagggcgccgcgcccttgccctgggcccggccgtgcccgccgccgcccggccgcgtccccgctgccgcgccgcccggccgggtgcatgcattgtgggcctcccgacatggtctgcgagacgaagatcgtggccgccgaggaccatgaggcgctgccgggggccaagaaggacgcgctgctcgccgccgccggcgccatgtggcccccgctgcccgccgcgcccgggccggccgccgcgccccccgcgcccccacctgccccggtggctcagcctcacggcggggcggggggcgcggggccgccgggggggcgcggcgtgtgcatccgcgagttccgtgcggccgagcaggaggcggcgcgccgcatcttctacgacggcatcatggagcgcatccctaacacggccttccgcggcctgcggcagcacccgcgcgcgcagctgctctacgccctgctggcgggtcagtgcgccgggcccccggctgccgcagtccctcgggccggcgcggagctcccccgccccggcgtccacgcggaccccgcgcccggctcccggggaccagcctgggaagccccccgctttctgccgcgccgggccccgcgcagggctggctatgggcgtggggatgggcgcagggccccgagcgggccggagccggggagggtccggggtccgcacctgcgtccccgccgcgcagccccccacccccaccgcctcccctgtcccctcccgggcatcctgggtgggggcgggtgccagggcaggtagcgcccgccgcggctgggccccggcgagtgcctaaatataatctgcgggcgggggaggccgcctcccgctcggtgctaatttatgaggggaagacagccggcgccgcggggggtgcgcgcgcctggcacagccggggcggtcgcagagggcggccccttcagcgtctttgggtgcccttcccctcagagcttcctgccggggtgagggggttcgctcccattttacagatgaggcgcttgaggccgcgtagggaggacgcgactcccccaaggtcacggcagccgaaatgcggctggaagcggtgtggggcctccctgccctgtccctgccctcagagctcccggacgctggccaggaagggctcttgctggggccctgggaagagggggtcctggagcccgaggctggaacgtgggacaccccccttcctcctcccccctcccccctcccccgcgcggggcctggtctgcggggcagctccctgccaggatctgcccaccttggcttcagtaggccagcgtgggcagagtccttcccggcccggccatcccgagggtgtcctgccgtgtttggaagctcagagacccgccgaggctcattccaggcggtgggggtgggtggggtggctgtcttcaccgcaggaagcttggaaatagggagaagtagaaagcacccgagatgaccccggctcctccaccaggagcgcggccgggcgcggcgtccctagcgggcttcgccggggtggcgtctctggggcctggggacccccgccgcgccgctgacccgcgccctctgcccccagcgctgtgcttcgccgtgagccgctcgctgctgctgacgtgcctggtgccggccgcgctgctgggcctgcgctactactacagccgcaaggtgatccgcgcctacctggagtgcgcgctgcacacggacatggcggacatcgagcagtactacatgaagccgcccggtgagtcccgctcccgccgctccccgacctccgccccagacagccctcgggggcacgcactccagcgacctcagggcaggcctgggcgagggccggcgtgggtgggcctgagccggggcccctgt

SEQ ID NO: 31471 - DNA, 2300 bp, Homo sapien
atgaaacctgtctctacaaaataaaagctggccatggtggtgcacacctgtagtcccagctactcaggaggctgaagtgggaggatcacctgagcctgggagttcaaggctgcagtgagccatgatcataccactgcactccagcctgggcaacagggcaagaacctgcctcaaaaaaagaaaaaatcggttcactttcagcccttgtggaattgataaaggaagttggcatgtgaggagctgaggtctctctctgttgctgactgagtccttctgaaagctggacacagacacttttactcaggaacgcagttactcgctggtcatccttctgtcatcagccattggctgtcacgaggaaatgcttctcatagcaaaatgcaaagcagactcgtgtggaatattgggcacatggtctgtgttttgtgaacgtgatttgttcttccaggagtaatgtgaaaggctgtggatggcgtctggaagggacgggtgcaggctcagtgtggccaggcatctctcgctgaagcagcaggcatgaaactcgatcactgggaggcacacggtgcccctagagtgagctgagatcgcaccacttcactccagcctgggcgagagcgagagtctgtctaacaaaaaaaaaaaaaaagaagaagaagattcatctggccaccccaagggtctgcccaggtgggctggggccacaggacagtctgcattcaccacccacagtccctgtgacagggaaatggcattcgtttgtgcctcttggtccagatcctaaaaagaccagagaggttgggctcagagcaggaggccggtggccagcgttcacaggcctctgtgccatggctcggctgtcctgtctgtctcttctggtgcaggccctttatgaaaaggccttcctgggtttcagaacgtgtcagtgctgtgacggtccctcccctgggccttctcaaggcgggtctgcatgaggccaccatgcgcccacactcaggatgagtccacagagcagttcagcagggctgggggcatcccttgcaagggagctgcccctgcaggccccagacaggcaacacggtgaggctcttctggaacattctcctactggtgcagtgatctcagtcaggccatccagatgcagaacacagcagctctgtggccgacccctctcaggaacagggatgagaagttgcaccagaggtccactcccttccggaacacaacaggatccaaggccctgcattcatccaccccacacggagacgacagacgtccttcttctttcacctgtgccccatttcccagttagaagcgcggtcatgtctcagtggctgcgagaatgatgtgtgagtgactgacaactgcacctattcttaggttcctgccacaccagcagctcagaatttcacaatgtaatttcaagaagtgtgaaaactgcttctgctaaatctggaaaaagttacaagtgccttttctgaggtttctgcccatttgaaaagtaagtcctcttgggagacaaagacttctgcctgaggccttgaagttagttgaagacaagcttgctggtgctgacagcctggggctctgtcgcccctctgacttctggaagggcagtgcccacggcccctggccagaggctgcacatgaagcacaggcccacctccccctccctgggggcagcctgctcgagggtgtgagcaccagtgtaccgctgtctgggcccacgtagtgtcctgtggatgtacacccaggagggtgtgcacttggccgtcaggaacacaggcccaagctacagcagctcagactccagaaggcagacttttctcccatcacgagaagtccagagaacagtggttgctttgtttcagaggctcagagcagcaggaccgaagtccctctggctccctggccattccctcctggtgctgtgatggaggtggctgctccagccctcacaccttgcaggcaaaggagaaagtcatagtggtcagaagagcatctgcccctggcagccctttacagtcagccgtttaaagagccttcccttttaggactttcctggagtctcttttccttcccactccttacctccctccctgctaaggaaaaaaaaaatagcctccttggaagttgaagggaatgcagtcctgggccaccctgcctgagagagagcctgggaaatgtcctttgtagctgaggacacagccccacctccaccccacccagcaacaaaggggccaacatgaagaaagagaggaagggcggattggggcaggtcaccggaaatctctgttgcaaag

SEQ ID NO: 31472 - DNA, 2300 bp, Homo sapien
cttgtttactcctccatggaatttttaatgtaattttatgcttgaaagcctactcttggaaaccatatatttctctgcaataaaaatacaagtataaatttaaaattttcataacatgtgaccaagtgttaaaacattttctttcaaaattattttaaaggtaatgttaatatagttattcaaagccatatatatatatatataaagtaaatttatatatatatataaagtaaatttgaaaataagccttggctgggtatgttggctcacacctgtaatcccagcactttgggaggccaaggcgggcagattgcttgagtccaggagtttgagacctgcctggggaacatggtgaaaccccatctctactaaaaatagaaaaattcgctggatatggtggtgaacccctgtagtcacagctacatgggaggctgaggtgggaggattacttgagccggggacatggaagttgcagtgagctgagattgtgccactgcacttcagcctgggcaacagaacaagaccctgtctcaaaaaaaaaaaaaaaaaaaaaaggaaaaggaaagaaaccttaaaaataaagtgttatcgtaaataagtcctataatgaaatggataggattgctttccccaccttgattagtttgtggatctatgaatgcatattgcacattgatggaatgagagaactgctattgagctgggtttaatttttttttttttttttttttctgagacggagtcttgctctgtcgcccaagctggagtgcaatggcatgatctcagctcactgcaacctccaccttccaggttcaagcgattctctgcctcagcctcctgagtagctgggattacaggcatgctccaccatgcccaactaatttttgtattcttagtagagacgaggtttctccatgttggtcaggatggtctcgaactgttgaccttgtgatccgccagcctcagcctcccaaagtattgggattacaggtgtgagccactgcacctggcccaaaaacattttttcagtagatagattaacatattgttaaatagttttggtgatttcatttttctctgcaaatggcttttacttggaagttgtaaattattaatcttctctcttatgcacatatgcaacataatcctatccatgacatgtctcattacatgcactgattcccagaacaggggccagttggaggcttttgagcttttttttcgagacagagtttcgctcttgtcacccaagctggagtgcaatggtgcaatcccagctcacttcagcctccacctcctgaattcaagtgattctcctgcctcagcctcccgagtagctggaattacaagcgcctgccaccatgccagctaatttttgtatttttagtaagatgaagtttcaccatgttggccagactcatctcgaattcctgacctcaagtgatccacccacctcggcctcccaaagtgctgggattacaggcgtgagccaccacgcctggctggtttttgagctcttgatccagatatgcatgcctaccttggttgagaaaaatcactgctctagaagacactatagggtttccttagaaggtttgatcataggtaatatgaagattgtgtctccatattaccttagacaagtttttaccagaaattagtttagtttatagatctgtcttatgagtccatattctaatgaaatattttccatttttctgtaggatcttaaatctttaagaagtcagacatcaagaggttctgccaagctgtctcctcagtccttcagtgtcaggctcacagatcagctgtctgctgaccaaaaacagaagagcatcagctcattgactctttcaagttgtttaattccacagtataatcaagaggcttcagttctacagaaaaaggggcataaaagaaagcatttcctaatggagaatataaataatgaaaataaaggaagcattaatcttaaaagaaaacatattacatataataatttgtcagagaaaacaagtaaacaaatggcattggaagaagatactgatgacgccgaaggctacctaaattctgggaactcaggagcattgaaaaaacatttttgtgatattaggcatttggatgattgggcaaaaagccagctgattgaaatgctcaaacaggcagcagccctggtgataactgtgatgtatactgatggttccacccagctaggagctgaccaggttagtaaacagtgatgtttttatttgctgtcttgacaccataaaagaagcccattttcttagtgtcagattttg

SEQ ID NO: 31473 - DNA, 2300 bp, Homo sapien
accacgctcagccgctattaaatattttaaaatgtgtagaacttctagtcagcatttttaaatctgtagaccttaatatgtgaaatagccaagtcccctcatgtttgactgtcaaataaaattctgctgctcaaattgtattcctccataattccctgctatagacctttaggctgttttaatgtccctacttgtaccacagagtattaggacttccttggcctgcctgcattcattttagagtctgaattctggggactcaaaagtttctacaagacagctgagcagtgctttgactttaatgtgacttacacatcataaatgactttcaaatgaaatttgaatttcaaaattctgtaaaagtggttgctcaaaagatgtatgatactattttaatcagtttaagagcaaaaatgtctaattgtatttaacaatggtatttgggcagccagaaaatattttaagcgttgctctaaaataatttgaagtagctcatctgttattacatcagatgcttcttgagtgcccaatttatacatggcctgtggtaaataccatgtgagctttgtaggaatacctttaagaatattcctcacctgttcgtaatatggaatgccaatctaaaaactacatgttttgggtggtctttatggaattttttagctataaccatcagaaaacaggcatacctagatgacagatgaaccttcttgatttttgaaacccattgaacaaaaatattttgccaattattgtgtttatgttatttaaaattttatgtaaaccttaattttgtagcagtaaattttgtttaagattttgctatcagctccctatcacctgagcaactttttttttgttgtatatgtttttttctattctatttcggaatagagaatttacttaaaatttttattttctccaaaaatgtggaaaatatgtcacctggtttcctggtttatggtagcatattctgtttaaattagtgtcacatatttagatgtgtggccagacgcttgatttattagttaatttttgagacagagtctaactgtgtcactcaggctggagttcagtggaatgatctcggctcactgcaacctccgcctcccaggttcaagtgattctcctgcttcagcctcctgagtagatgggattgtaggcgtgcaccactgcacctggctaatttttgtattttcagtagagacggggtttcaccatgttggtcaggctggtctcaaactcctgacctcaagtgatctacccgccttggccttccatagtgctggcattacaggtgtaagccaccatgcccctgcccagatgcttgatttatactgtccccacccaaaccttgacttgctcagcccagggggccagcagggcagatcaaggcacggatggtagttgtgtgtctgccgtaattacccaagttacttataatcgttgtgttactaggtaggtttatttgaagatttatttatttatttatttattttttattttttgagacggagtttcactcttgttgcccaggctggagtgcagtggcatgatctcagctcactgcaacctctgccttctgggttcacgtgattctcctgcctcaggcctcccgagtagctgggattacaggtgccaccatgcctggttaattttttgtatttttagtagagacggggtttcatcatgttggccaggttggtctcgaactcctgacctcaggtgatccacccgcctcagtctaccaaagtgcagggatcacaggcatgagcttccgcgctcagcctatttgaagatttaataacatttttcaaacctcaggatgtatttgagtagattgcttctaaattggtcacctagaaaataagttatctatttactatgatacctggattaagcctctagctattttgcttttttctttctatctatattattggatgattgatgcctattttctgtggttatgaatatagacattttaaatgaaagttggtatataaatttttgaaaataattgtatttcctgttttatagtcttaggattaatatatgggatttatcttatgttaatcttacatttaggattttgtgaaaatggaaaattatgaggcattggtaggctttgatctctgtaatacaccgctctccagtgttgctcagaagattatgtctgctatgcattcaggtgatttagtggattctaagacttggggaaagagtacagagagtaagtaatttttatgaacctttctttctcttgatactttgaatgttaattgttctaaagactaaga

SEQ ID NO: 31474 - DNA, 2300 bp, Homo sapien
aaagtgctgggattacaggcatgagccaccgcgcccggccagaagtcagcttttacatagtgttctggtgagggattagaaattaagtgtttttgcaaaataaagttcattgtaaaagactctaagcgaacaatccctaacccttaaaatgtaccaggcattggtcgggctgctgtgaatgttccgggaactcgtctctctcgggggcgagcgctatcaccgccgggctccagcctgtctcccaaccaccaacctgcgctgctctttgtaccattcaaaagtgccttcagagggtctagattgaagtacggggcagggcaggcctgaagcacaactgacggctccgttgagagcaggcccgcagcttcagctccccagagggcgccccaccgcacccctctgcacccctctgcaccccattcattgcccaggctccgccccctgcccaggccccgcccctgtccaggccctgtccccgcccttcccggcccagaccccgcctctctctgccctgcgccccgcccaggaggcaggatgcccgcagcggccgggggccgagcgccgcctgctcagctccaccccatagtccagcctcgccgactccgcctcttttgacactacgcctgcgcaaacagtcatcccccacgaccacgccgtcgccttgtgcgcttgcgcgcgtccaggcgctcccgtgaggcagtgcgaggcgcgcggggcacggagggcggtggcggcgggctcctgcgagaagcaagcggaacttcctgaggtgactgacgcgggcctcggttctgggcgcaggggtgtggggctggaggagtggccgcgatccccgtctgcacccaggtgcctcttttttttcctgcgctcctgggggctccttccaggtgctccagcagctgcccggggatcagggcccggtccgctgggcgaggagctggggcgggggctgtgcggggcctgtcacccccgtcttctgcagctcggtgtcgacggcgattcggtgggcttgtgcgtttgttttgtcagcgtgcttaggtgtcacagctgggtgaccctccgaaggaaggttttgccgctggcgcgtctggtgtatcgcggccttggggccgcggatccctggggcttgccgctgcctctggggttcgcgcggccctggcgtcggggctgcctcagcgctggctgaaggccggcccgaagcacccttaattgtggccgcgcgcttccctgctgctcctgctgttctccgcgtcgcggtggtggactctggaggtggagccttgcccggcgagacgttgaggtaaatatttagttgatcttcagaagatgtgccatgcttatttgcgtcttcttacgtacggagggcagggaagagaggctgcctagcctcctggtggcttgggtttgtttggatccatttattttgaattaaaaacaaatgctgctctataaagtgtaatgcattttaaaccattttatctttggaaaaaaagataaaatggatccaaatagatccactttcttgttaattacttttcgttactgttgcggttttctgagaactagcctaattgtttctgtttctctttatcatcatcaaacattgcagctacgactacctgtcatttatcccgctctcggatatcatgtgatatttgtctgtgtcttctttttaaaaacactgtcgtcatatttgtggtctaatacttgttttcttcccccctaggaggaatcattatagattctaaaaatatattttcccttctctgtggacttggtataaaacgtagctttttttctgcttggatttattttctaaaaatcaacaccgtaaacccatatcagatacaacaaaattggggtagttaaaaccatgagttgtggaaatgagtttgtggaaacattaaaaaaaattggttatcccaaagctgataatcttaatggagaagactttgactggttgtttgagggcgttgaagatgaatcgtttctgaagtggttttgtgggaatgtgaatgaacagaacgtgttgtctgaaagagaattggaagcttttagcattcttcagaaatcaggcaagcctattctagaaggggcggcattggatgaagctcttaaaacgtgtaaaacttctgatttgaagacacctagactggatgataaagagctggagaaattagaggatgaggttcaaactctactgaaattaaagaacctaaaaattcagcgacgtaataaatgtcaattgatggcttcagtaactagccacaaatctctgaggttaaatgctaaagaagaag

SEQ ID NO: 31475 - DNA, 2300 bp, Homo sapien
ccttgtctttctgccgtctttaatgctgtctcctcagagttcctccttgcagtctataaatatccccgagttcctctcattttcaaacaaaacaaaataaaaaatcctcccctcagccctgcattcccaccccctcagcttgtgttgttttgcatgctcgctctctgtctttctcctctctctctctctctgtgtctctgtctgtctctgtctctctgtctgtctctgtctctatctgtctctctgtgtctctgtctctctgtctctgtctctgtgtctctgtctctctgtctctgtctctctgtgtctctctgtctctgtctctgtctctctgtctctgtctctctgtttctgtctctctctgtctctctgtatctctctctctgtgtcacactcctcccacccagtctttgcctcatcagcaacatttctggaaggcattgcctgcacagctcccacttcctcctgtccaaactggctcaactctgccccctgatgcacacccccaacctccaaccctgggctgcaagggtcctcccaccaggcctccccgttccagcatccctggtttccttgcctgcagattgggcaccactctttgaattttttcccatcatgtttgtttttcagatcattttaggccttattgacttttaaaagaggaggaaaaaaacgtgaaacaagtgaagaatgaataggaaatatctttgactcgatcagattacaatatttgccttagaacattcttatttctctccttaaaaatattaagaaaaactatccaaacgacttctacctagtcaccctggactaggacattgtctaacaagccacctttagggtcatttgacgctgaagggagggagtactattatatttacccatgaccaaagcccctgctaacctgtggaagactgaggagtggcaaaggatttttgtttggtagagatgcaaacgaattctgtccaatagagaggtctggtttcactgggctgtagggcatcagccagattcacatgaaatttagcaatcccgtttcagtcatctttcactgactgccatcctctttggaaatggtgtaccatcctccttgagttaaatatatcgatgtatttaactcaggccattccgtttatttctaacattttgaaaagggaattgtggaggaagtcagctttttttttttttttttttttgagacggagtcttgctctgtcgcccaggctagagtgcagtggcgtgatctcggctcactgcaacctccacctcctgggttcaaacgattctcctgcctcagcctcccgagtcgctgggattacaggcgcccaccaccgcgcccggctaatttttgtattttttagtagagatggggtttcaccatcttggccaggctggtctcgaactcctgacctcatgatcccccccccccccccccccggcctcccaaagtgctgggattacaggcatgagccaccgcgcccggccagaagtcagcttttacatagtgttctggtgagggattagaaattaagtgtttttgcaaaataaagttcattgtaaaagactctaagcgaacaatccctaacccttaaaatgtaccaggcattggtcgggctgctgtgaatgttccgggaactcgtctctctcgggggcgagcgctatcaccgccgggctccagcctgtctcccaaccaccaacctgcgctgctctttgtaccattcaaaagtgccttcagagggtctagattgaagtacggggcagggcaggcctgaagcacaactgacggctccgttgagagcaggcccgcagcttcagctccccagagggcgccccaccgcacccctctgcacccctctgcaccccattcattgcccaggctccgccccctgcccaggccccgcccctgtccaggccctgtccccgcccttcccggcccagaccccgcctctctctgccctgcgccccgcccaggaggcaggatgcccgcagcggccgggggccgagcgccgcctgctcagctccaccccatagtccagcctcgccgactccgcctcttttgacactacgcctgcgcaaacagtcatcccccacgaccacgccgtcgccttgtgcgcttgcgcgcgtccaggcgctcccgtgaggcagtgcgaggcgcgcggggcacggagggcggtggcggcgggctcctgcgagaagcaagcggaacttcctgaggtgactgacgcgggcctcggttctgggcgcaggggtgtggggctggaggagtggccgcgatccccgtctgcacccaggtgcctctt

SEQ ID NO: 31476 - DNA, 2300 bp, Homo sapien
gaagagtcccctgagggatgctggtccttcgctctctcctgacttgtgatcctgtctgtgaaatgggtcagctctgtcctcccttcctagtggggcaggtctgcgtgctgcttgagccccccacagtcccctccagaaagatttggtgctcggccagttctccgcctccccaccatgtctacccccacagcagcaccaacttccgttctcccgggattcaggccgctggctggggcgggcagctgggcagggacagaacgcagtgttctctgaggaactgcacttcctggacaggtcatgtgtgtttcggggggttccctagaggccacagaggtgggggcaggtacagggcccaagagaaccaggcaggcctggaattgttccaggcctaagaagaccagcctagccttgaccaggacccaggagccggggcaggcacgtgggggtgttcagggaaggcttcctggaggcggtccctgggaggacagccccccaatggggacagattaaggggcagtgacattgggggagggtgggtggcaagggcgtggcagcccttggggaggacaggggacccctgcagctgccctttgacctggctttgccctctgtcctctcctcccagaggctgcatttagccagggcctcatggggccttcttgagacacagaggaggggtgtgtgggcagccagggtgtctctgtggactcccccaccccagtgcagggggtctctgtctctggctggccaagaggcggatgtggacagccccaagcacctacaggcctggagcttggggccctggatcacagcctacctgatgccagctgctcttggctgcaggaagggctgcgtgctgtcttgagaaaggaaggaagcccctggctgggccacccagccatccccgggaggcaggccctggacatcgctttgcccggagttgtccccttactggggactgggcagggcctgtgggacttcccctgtgggtgctctgagccaagcctgcccagccctgctcctcatccctttgtagagaggcagctccagcaggtctgaggccgttgccaaccccagggtcctggggaccgtggaggcctcgccttcttggctgctgacctcactggccccactccaggctctgatcttagtgtgttttgggggaaggtcccagccttctttcctggcccttgacagccgctgaatggcaggacccatcccaaaggccagtccagagtcttcagctgagtctctgccccacattcccccaggcacgtccaggaggtccccaggagccccctgcagcccagcctcatgtgctggtgcagcctcacacggctttcacatacctcgggaagttctgttggcaacatctagaaaacgcaggcagagggagtgggaggcacgcttgctcctgggccacccccagctccccggcagcggcagccaggctctctggttggctgggatgctggcgtggagccatgccctctcggtgccctgggtccccctctgggcatgggggtttttgggggagctgggaagtgctgcgtcagaggtggggctgctgtcgataccagcccagcgtgctagtcctgcaggcgggttctgcctcctgaatccacacagggttccttcaggaagtggaggttttaaaagccctttggatgcccagggacagccgtggggtgctggcagggggcccagggcactgcagcggcttcaggaggggagggctcagcaggagcccagtgcagccccgggctgaggggcttcatggctcagaggggtgggtggggatcttcctggggtcccgcaaccagccactgtagagttggctccaggccactgctgctctccagggcaggaatttctgtggcctccagccctggcgcccacactcttgggccaggtggacctgttactgggttttggacagtgcgtgtgtgtggtcagatggcttctgtttgtctctcgagaaaggtgttccgtgatttctaaagcggtctgttcacggacctcccctgcaccccaccccagagaccgcatcccaggcactcagaggctgagccacatcctccactgctccccgcgggcactaacattgccgatgagacttggataaggaggggaccttgttctccatttcctcacttgatctttcacccgacaccacgtacgtaagtcctgtccgcctgcgtcagggcacactcctccaccttctcatccctgatgactgcacaggacacttggctgtgccaccagcgttctttgtgatgaccctctggtttacacaggga

SEQ ID NO: 31477 - DNA, 2300 bp, Homo sapien
tccgctttagctgtcggcagcaactcacccagtggccaaagcagggatggggcaactttgcaaaatgctcatccccaagtggagagctgggtccccagagcccaaacacaccctgctcctccccagacttgggcacctttctttaccatgcacagctctgagcagccatgcagacaaacctggagggcctcagtgctgagttcttgtgaggggctctgccttgggccctggcgtcactgtggggcgggaacaggaagggcccctgctaacatcaagggggttgtctcaatgtccatgcagggctgtctcatagcagtgtccgagttccccactgggtcctgcagggctctgtgggaacacacattattctgaagcccacaccacaggcttacacccagcaggaccagccaggccaggaggctctggcctctgcattcctatagccctgagccgtgtgtggcagcactaatctccattctgctgagatttctgggagaccccagcaaatccctgagcgtctagtcccatgtcctgatctgcaagccgggcatgcaaaacacagggagatgcacacgaagctttcacaggagtcctggtgctgaggttttgcattttttgttcagtttcattgccagcagcagcccctgtgtcccactgagtacttctggaggggtccagccaccttatgcctccacactctccagcctgcggggcctggcccttggcacatccaggccaccaacctcaaaaatcaaatcagtgagatgggtcgggcgaggtggctcacacctgtaatcccagaactttgggaggccgaggcgggcggatcacgaggtcaggagatccagaccatccatggtgaaaccccatctctactaaaaatacaaaaattagctgggcgtggtggcacgcgcctgtagtcccagctacttgggaggctgaggcaggggaatcgcttgaacccgggaggcggaggttgcagtgaactgacatcacgccactgcattccagcctgggcaacagagccgtctcaaaaaaaaaaaaaaaaaaaatctgcgagagggtggggggtgccgaggccagtctgggccagccttagggtcaggggtcactagggagacccgccagctgggatttgatgaagggttcactcccgtccccacttagggcgtcctcggccagaggtggccagcgcctgcctctaggaacgtccctgcccctcaggccagacacagagcatgcagccccccactccggggagcctctcgactctggccgcacgtctgtgtcccttccccagacctgggccctccctcagctccggcgtccactgggcgatctgaggagcccgcccgctctgggcctgtttccccactgacaccctcagagacgcctggctcttaggatcagagcgtctgcgtccctctccgaggtcccggcccttcccggggccactctgcgcccggcggggaggggagtcgttcacggccccacgcaagacccccgggcagagcgcgaggcctcgtccccccacgcagccactgctttcgtcgcgctcagacccggcggcccggcccggcccggcgcacgccccggagcgccctgcttcgctctcgtagcggagacgctcctgcgtcctaacgggcccccaggacggcgggcggtccccgcgcgctgcgcttcctctcggcaacgcgtccggctgcggcgccctcattggccgcgcgccccgccaccggccattggctcgcagtgcctgttttacataggccgctctggccaatcggcgcgcggcgcctacttaacatgcacggcggccgccagtcagctagcgcgggggccgggccaccacgtgctgttgctaagctcgggcttctaaattgttactagcgcggccggcctatcccagcccagctctgcatctgtcaacattctcggcccggcccgaggcgctcgacccgtccccattggccccagcccggcccggcgcccgcccccggggcgcgaacgccgcctcccattggctctgcgggccgccgctctcccttatgtgtcaatttgagggcctgaggcggagggtggcggccgagcgccggagtccgcggagtctggaagtgcggcggccgggcgcgcggggtgggcggcgagcggagccggccggagcgggccgggcagcggccgccgccgtcccggggcggacgggcgcgggcgggaggatggagctgaactccctgctgatcctgctggaggcggccgagtacctggagcgcagggatcgaggtagcgctcgcaccccattg

SEQ ID NO: 31478 - DNA, 2300 bp, Homo sapien
gagccccaagtccacaagtgtcctggagcacgatgcacaggcccccgcaggctgtggtaagctgtgtcacctctgccgtctgggcagggaacttaacctcccagcacctcagtttacttgtctgtaaaatgggaaggtgaggccaggtgctgtggctcacacctgtaatcccattgctttgggacccgaggcaggaggatcaccccagggggcgatggggctgctgacagtgtggggctgcacctggctccgtgcccaccccctgcctgaccctccagagggctggcctctttgatgacagcaggtggcaggaggctgtggccctgaggtctggcccagtggcctcagcctttgtcacataccacccccctcactttggggaggctgtgctacagcctgtgttacgcggcccagggccacacccaggacctgagtgcccacttactccacccctgctgaggggcacccttgttcgaaggaatctgtgtgggcagtatcgtgctcctgttttattttattaatttaatttaattattgaggcagggtcttactgtcacccaagctggagtgcaatggcatgatcttggctcgctgtaacctctgcctcccaggttaaagcaattctcatgcctcagccaccagactagctgggaccacgggcacttgccacccccacagctaacctttgtatttttagaagagactaggttttgccatgttggccaggctggtctcgaactcttggcctcaagtgatctcccaccttggcctcccaaagtgttgggattacaggcatgagccaccatgcccagccttagcactcctattttattaatttaatttaatttttgaggcagggtctcactctgccacccaggctggagtgcagtggtgcaatcatggctcactgcggcctaggattcctgggctcaagtgatcccgagtagcttggaccacaggcatgtgctgccatgcccagctatctttttttttaacttttagtagagacagggtctcactgtgttacccaggctgatctcaaactcctggactcaaatgatcctcctgccttggcctcccaaagtattgggattaaaggcgtgagccattgtgcccagcctcactttcccgttttacagacaagtaaactaaggccctgggaggttaagttccctgcccacatggcagaggtggtgatgcccaagggccttcagctcacactgcctaacctgtgactcaccaacccagcttggagacaccctccccatggcaggacctccccttggagcagcagccacgtgcccaggtcccctcgggggtctcctcttattgccagcccagagcccctcggaggcaggcgctgctgctccactgtggccccagcacccagcccagggcccgatgctcccccactgtgtagcaggtgctcacctggcccaccccctcactgcacagatcaggacttgccctcattagagatgaggttccgttctagtgtcacctgttggttttcctgggagccagctctggggccacaggggggcttaggagatggaggccctgtacccagtgatcatggctgggaggtgatgcaggtcctcgggccttcatggactcagggctgggtagggccatatctctgctcaggccaggccgcctcctccaggaagccctccctgctgtatggtgactgtgccttgctgtcgtgggggtgttgggcatctgaccacaggccagttgcttctgccttccgaggcccactgcacctcgatagggcccggccagacaggagtgggggtggagggagtgtgaaaaacataaaggaattcgtgttcctaactgaatcccaagagacatcaaggcaatgctgctaaattagaggagatgggaaaatagctaattttcagagcattcacacatccatatccagtgtctccttatgttcagtactttggaaccaaactgcgggtcctacggtgactccccctgccccctcagagtgcccccctcgccctgcagcccccactgctgacgcacagcggtgtccacatcacaaaaggcactgggagggcgggggcagggaggggctgtctcccttccagagacctaaagagatcccaagggcgcctgggacaccccttcctccccttagctccagacgtcctggaaatctgtgatgtctgctggcctctgtagagggaacaccagccgcagccacctccacgtcagtcaccgcagagaaaggaagatttgtggaaggaatacagcaaatcaacgcctcctcgcaaagcactttccct

SEQ ID NO: 31479 - DNA, 2300 bp, Homo sapien
ctcaggagggatggtcgagattaaaaattgccaaggtgagagtgtcaattagtgtgctctttctggaaagccatttggcagtatctcattagagcctggaaacgcagtttgcacttttgacattgtaattccatttctagcaatcagtgggtcctaaggaagtaatccacactcggagcatcgtgcaccacagtagtgagggcagcattgcgtggaggtggaggattaggcacatcgtcagtgtccagcagaagacaaaggagtgagttaacaggacggtccatatgctggaattgcatgtcactatccatcaaaaattgtatatgtgacagatgtaataacatgttgcagcagctacaacagcagaaggcagtattacgtacatggatcgtctcaacgttggctgaaaacaggccctcggaagatgagaattagaaggaactgtgtcccacctgcggtcatatttccccaaggacattttccccacttctctcctttcccattggttccagttttcctaggatgaacgtgtattgatttcatatttaacaaattaaagcaaaagttaaacttccagtgtttttgtaacctacagaatgaatagtcaatgtttaaagaataggacaaatttacagaaaaggatggaatgcaatttaagatgtaaaaaaatgggcttcttctccctcatatacacaaagtgttcaaaacactctgttatactttatattttgaacataaggaaataaagtaaaataattttaaagagtctttaaagtagaagctgcttccagggatgctggctcactctggtaatcccagccgctcgggaggctgaggctggaggatggctggagccctggagtttgaggctgtcgtaagctatgattgcgccacttcactccagcctgagtgacaaagccagaccctgcctctaaaaataaacaaaaagccagaagttgctgtgtattgaggcttacagaaggggacctggctgatcagagaggcgaagtgacctgtccctcgttgaacagccatgagggatggagtcagggtctccatgttgtgaaagcagcacccccttccagtgcagactgacttatgcgttgctgtaattgatctgctggttccagaggaggtgggaggggacgccaccctggatggaggagcaggccccagctgtgcctggccttgacgtaactgcactcttctgaccctaagacgtggtctgtgtccctgactctacagaggaatgcactgagcttcagggaagacgagggctttgcaggtccccagccgactgagagtccgtctgagcccatggctcctgcggttgctgctctttattgccctggctggagtgcgatggcaccatctcggctcactgcaacctctgcctccctggttcaagtgattctcctgcctcagcctccctaatagctgggattacaggtgtgcgctaccacgcccggctaatttttgtatttttagtagagatggggtttcgccatgttggccaggctggtctcaaactcctaacctcaggtaaaccacccgcctcggcctcccaaagtgctggcattataggcatgagccaccgtgcctagcctcctctatcactttaataatcctaaaaaacagtcacatgcaccgtgcgtgttttccagcagtacatggcggccgccagctggacacagcgattggcgcactttctcctgtcttctgtttcaggacaatgtgttgaacatcattaaccagatcatggatgagtgcatcccccaggaccgcgcccccagagatttctgcgtcaagttccctgaggagatccggcacgacaacctggccggccagctgtggttcggtgccgaggtagcgggtggccacccgggttcggaggtcctgatgtggggtggcgtctagccaagtccctgcgaaccttgtgcatgggcgcctgcaggtgccgggacctggtgtctcctccaagagctccgtccactctgggttacgtggtgtggtctgagcctggtaggccgtgcacccctggaggatctgggaaagccatgaactggtgcccccaaaactatacatacaaatgaaatttcccatgtggtttttatgaggttcacaggcccccagacagccaggacctaaaagtggtttttaatggcagtaatgcccacatcaggaacaagtgttcccctccggccctgcagcatgggcagcagcaggggctggggagccgtgctgcagccccacgcaggccacatgtggcaatagcctgtcatcttcatcttcatctccca

SEQ ID NO: 31480 - DNA, 2300 bp, Homo sapien
ggtcaaggccagcattatcacctggggtttgcgtggcgccgtgcccagctgtttctcctgtaaggaggatgtctttgcatgataggggatgcctcatcctcagggggccaacccagcctcttcctagagccagggtccggcttctggggagcatctccttctgtgggtgggagggggtctgtttccacatcagagactacactgaggtgataaaggggccctttgccatgccccaaggggcagaggcctctagctgcgtggaactctaccctctgccattggagggttttctctggggccactgaacactccactgagctgagtagacgatggctgtggggaaggctgccagctcttccacccttcacctgcccctccgagctggctgtggcttctgctgcaagtgagagcaacttggccgggagacgggtgctgcttggtgagacagcaggtgcagggaactgatttgttggggtgtctaaaccagtcccccaatctaaagcttcccagggcactgatttaccagaccatctgggaaactgcagaggcctgggcttgcttctgagggaggcccacgtgcagctttgcataagcaggttcttatgaaacatgagcactggtaacagctgtaaaagcattttaaataaaaatttagtgaggttaaaaattccatctcagaatgtacacgtgaatgtttttggtgcgtgtagagttcacgcctatgttttttgctggaataactgggtgctgtaattctgcgtcgcactccccccagaagtctctttgagaggtggcctcctggggacatccacattcagcctcagggtccttccttcactggctgcgctgggggagctgcgctgggccacctgagttcacagtgaggccggctgtatcttgccctggcttcctacgagcaggtcacatgggtcagccttcaccttgcccttagggggcaggggccgtgctctgccacctccacccctcctgtaggtagaggggagcccccagtccccagtgtctgaacctcagggcctggaaaacaaacatgcgtgcttgtgtgctcccttttccttcagaatttattctgcaggtggtccagttggggccttctggtatcaggggtgactctcagagcttgaaaacccaaagtccagctgagggcgagctggagggcctgggagacgtcctccccgtgtagcccagctccaggcacagaacccaggcccagccagtgctggccgtcttccagcatgagtggggcgagctgttccacccaggccggagcgggagcctttgcccccaggttgggccagggctcagggctcccaccaaagggtgggagatttgggagtggacctgaagaagggacaggagagagtctgtgggccagggaggcagggccgggggcatttctgcaggtgggaaggtgggcctgggtgactggcgcagaccctggggaggctggcgttgttgttacccttattaccctgcgtgcactgagaggcccctgctgcgtgcaggtagttgggggggacacgccctttgtgagtgcacgtgcgggcccagaggcagcgctccaggctcgagtgacaggcgccgcgcggcccctcctcacgcccttgtcccctgctgtcccggttgctgcctgtggcctccgcgcactgcgctctcgaaccccgcgtggcccacccggggagatgtggagaccctgacccctgccgcccgcgcctcccctgccccctccccgtccccccgccgcattcagggacacctggcccctctctccccacgctgcccgctgcccactgcctgcggggtggcccagctccactgctcgcccttcagcctggaccgcccccctccacctccctcccccacttccgcgtgcggggcctgacgcctagggagtgacccccgcgtgcgcccgggacaccccggctctgtggctgaggctgcgccgcccctgctgggccccgcccccgcctccactgtccctccgcgccgcctcttccggggtccacggtactctcgcgactttgccgcggcgacgtgggggttttatcgcggtatcgcggaacacagcccccgccattcccagtcacccgctcggaggccgtgggcgccttgacgagggcgcggcggcgggaatgcacaacgttatgctcatcacctgcgtccaccactgtcacccctgacggcgagacgcgaggtgctaagggcttgtccaggctaagcgggttctctgcgtccttaagcccactttgcagatgctaatcagaggggacaggcggccaaga

SEQ ID NO: 31481 - DNA, 2300 bp, Homo sapien
acactccggcaacgacaaacagaattccccgacctcaaaggccgtgaagcacgcgcccttcggggccctgagtgagccctcaaacctccgtgccgatcttccaaacccacctcccgccttcctggaatgggcgcacgcgaggcacggatttcaggaaacctctgccgtgacagctcacccacggtggaggcggaggcctgggacgctggacggagaaaggcggccagtggagggaggaggggtaggtcggcaacgcggtggcctcggacgtccgagctgcccggacgaagcgctggccccactcccgcccttggtcgccgcggtgaccccacccgagccgtgacctcccccaagatctcagggcccgggcctccccgctgcgccggccccagggtgccaccctcggacgcccagatgcgccctggaccctgcgccgggatcctgaacaccgccgcgccttcatcccgcgccgagcgcgcccggccctgctccggctgcagcgggcacgagccccaggcgggcggcggggacgcagcgcccgcagtgcgactggcgcagccgctgaggcacggggcgcgccgcccggaccccgaccccgcggcgctaggagaggcgcgggcgccggctggagagccgcacctcccgccccgccgaggctgctggccacgggcgcgctcgccccaagggccgggcggaggacctgtcccggattccagaggacgtgggtggggaagggacaaggatagggacaagggaggggacgcgaactgggccgaggtgtgggtcagtcctggttcgggaagggaggccgttggcagggccatcaggatcctctctggacatggaaggacgggtctgccctggacccagggattgggaaatgtgggttctctcagaacctggggaagtggggagagggtctgttctggagtgcggagggagatctattccgggcccaggacaatgggggtgggggcaggacgggaatgagggggcattcctggtgcagggaggggagacggagaagtagtagggggtctgctccgggcccgcgggctggggaccacgaagtgtaggagggcaccgtccaggaccgggatgaggagggagaggggcccgttgtggccctggatagagggggagggaaagtgcgccccggcccgagaggaggagcaggagggtcagtcctggacccgggcttaggaagccgggagggaggttcggatccgcctcagagacagggcgatgaagatctgtccaagtcttggagtggagggaaggatgtcggcggtgggggaagaggccggccacggacagggaaagggagtccgtcttgtagggcggacgggcggtcctggggaagggagaggccgcgacgcggggggcgtccggcccgagcggggccgctcaccttgggtttgtagagccactttcggaacctgttcatcatcgccgcgccggccctggccggactccgggcggccctcgccctccgcagcgctgcgcccgggcccggctgaggcgcggggcggacgcggaggcacggccggagcccccgcgctgtcgcagggaggctggctagcgaagcccggagcgccgagcgggcggcgggcaggtgcgcggggcaggtgcgcggccctgagtatgctctgcaagcggcgcgccgggcagacctcagacccgggagtgggcgctcgggcgcacggacagacgcgggcacgggggcgcgcggctcctcgctgctcactgacacccagcgctccgctggtcacggccgccccgcgccgcacatgcgcctagggcgccgcgagccccgggcccaccgcgcgctgcgggcggggcgggcggggcggaggcggcccaatccctgcgcgggcgccgcaccccgcccgaggcgcgctccctgccggcggggcgacccgccgcgcccgggtatccaagaaactacaagtcccgaaaggcatggcggggaggtggcgcccagggcttggcgtcccgggccgcgccgcggcgctgtgtattgtgggagttgtagtccacccgatggcggcggagcgtgccgccggttgctaggtgacgacgccaaacagccgcggcgtcctgcctaccgggagctgacggacgacgactgccaacaccttagccccagctggcccaggaaactgctgcggtggcaggtggcggcggcaggagggctcggctgccccgagcgcccgccaggtacgggggcgggacaggtgcggggcgacgcgccgccgattttcatgacctgccggccggttccctctcgctcgctgctc

SEQ ID NO: 31482 - DNA, 2300 bp, Homo sapien
tgccataccaaccacgattgcctctccatggacctcttttataaaaatatgagtaatattcttgtttaggccactgtgatgttgggatttttcaatacatgcagctaaacctaactgataccccacttccccaagttcagccttcatcccatgcacaatttcaaactataaaacacaggaagggagcctctgagcagatacaactgctccaggccttggagttggccaaggatagacccacagagaacagccattcactcagtggacaagcccatcaagtgtctaccccaagatcctgtgctgaagaaatgatggctttgggagcagcaggttttatgggggaagactgagagtgtggtttgggacacgttaaatttgagaggatctgttaggcgtccaaatggtgaagaacaggtaaacaggtctggagtttcagggttgaggctagagatataggttttgagaagtttgggagaaaatggttgtttataaaaccatgtaactgtaggaaatcccccagggagggagtggatagagtaggttccaaggactgagtccagggtctccagtgttgagaggtcggtgagcaggggaggcatccagccaaggagatcaagcaggagtggccaggagcgaggaggagaagtggacagtgggatctgtttcagccaagtgaggatgctgtgtcacggagagggcacagtcggctgggtcacgtggtagtgacagttcaaggaagagatgagcgctgaccccgatcatcggattttgcaacatcaaggtcaaggatgactttgataaagagcttcagaggagtggttgggtgaaaatctgatgggagtagtttccagaaagaacaagtgggaaggaattggagataaggggaaactccagaggggttttgcccttcagagggtcgactgggtggtaggaagaggagagtagggaaaatcaatcagttactcaaaaataaacatggaccctacccccaactaagagaaatcttagatgccagcgcgcctaggctcacatcgcgtctgttggaataaagtggtcatggagcccacggacctttctgagcacctggcactggccagtgaggacaagcaggaacaggtcagacttctcaattctgaaccgaggggggcatgacttccatctcctgtgtcttacatctgcacgtttcacaacaagccagagacgtggtggtggtgcggcagggaaaagtgcagcgctgtggggtcaggccgacccagatccgccgtgatctggatgcaacccccacagccagggcacgccggcctcgttgtgcctgcttctctggctgtcaatgggaagtttaagtgaggccacgtgtgggtttttagctctctgcttgacacatagcaggtactcagattgaggtgagcgttttaaggtacaaattagggcaccactggggggagtagcgagggcggaagagtatctttttagaacgcaccgctgatagtggtgatttaaaaaaaaaaaaagaggcaccgttcactttcatcggggagctgggaagaagacagaagaggtgtttgggagaagcaagatgagcagcgagcgagagggaaccggccggcaggtcatgaaaatcggcggcgcgtcgccccgcacctgtcccgcccccgtacctggcgggcgctcggggcagccgagccctcctgccgccgccacctgccaccgcagcagtttcctgggccagctggggctaaggtgttggcagtcgtcgtccgtcagctcccggtaggcaggacgccgcggctgtttggcgtcgtcacctagcaaccggcggcacgctccgccgccatcgggtggactacaactcccacaatacacagcgccgcggcgcggcccgggacgccaagccctgggcgccacctccccgccatgcctttcgggacttgtagtttcttggatacccgggcgcggcgggtcgccccgccggcagggagcgcgcctcgggcggggtgcggcgcccgcgcagggattgggccgcctccgccccgcccgccccgcccgcagcgcgcggtgggcccggggctcgcggcgccctaggcgcatgtgcggcgcggggcggccgtgaccagcggagcgctgggtgtcagtgagcagcgaggagccgcgcgcccccgtgcccgcgtctgtccgtgcgcccgagcgcccactcccgggtctgaggtctgcccggcgcgccgcttgcagagcatactcagggccgcgcacctgccccgcgcacctgcccgccgcccgctcggcgctccgggcttcgctag

SEQ ID NO: 31483 - DNA, 2300 bp, Homo sapien
ccagcctgggcaacaagagcaaaactccatctcaaaaaaagaaaaaaaaagaacagcccatgtcaggcctcaggtggtgcagccagcagggaggtggggacacaggccctgggctgatgccatccctagccaggtccagcgtcacagcctctttccctaactgtgcagctaaacccactcacagaacatgccaggtgctcctcctggagacacccccgggagcccctgccctcctgctctgtccttgtcctgccagccagtgtcaccttggggctacctgcatcgcagcctggaaattccccacaacgacagtcacttgggttcagcccctgcttcccagggcacccccagccgagactcctctgcatccctgactcttcctgcactgaacgtgttcggggcgtccctggctctgaaatatcatgactcattccctgtgctaagctgccagtgggccttgtccgtccagaagaccgcatccttcagttctagggcgttttcttgttatttctctctcttgtctctctggaactcctgttaattggggtttggaccttcaggaatcgttccctgattttcttagcgttttcccctactttctatagcttcatctttttctactcagggagatttcctcaactttaccttccgtctcctgtttatgtttttagttctgtcatcgtattttggttttcacgagccctctctttttctccagccattgcttgttccttggacgctgtatctcctcttctcttgcatggcagtgcctggtttctaggctttttcctgccttgtgcatcgttttctcctggttcttttcttatggtttctatgtttcatgtcagagatttctctaaagtgtctggtgacacctggcctccccttctctctgagtcttggccagggagagagtcagggggcaggtcaacatggacccttcagcacggccaggatcggtgtctcaccaaggaccctccagtgtcagtggtggttggtgggggtcgcttgcatgtttttagtcagtccccagcctggagggtccaggtctggggactgctacctggggctgttctagcttgttgcagggtagaggagaggtgctcccactgtccccaactttggtggcccttcaagcccagcctggcccagagcagtgggtcagtcatggagcaagaggagggtgagaagggcccccctctgcccagcgctgccctactgtcctgcgtagtccagctggagcccaggcctgcaccacacccaaggatgacggcctttgctgacaggccccgcctcctctgaggatagtttgggggccacatgttgtccttagagctggttcccagggtcccagcctccccctaggcagcttctccaaggtcccctgggaggggctctgggcaagcctgtcccctggaactgctgcacctctggagtgttcagtgcccccgcaagccctccccagggccctgttcccccatcgtcaggatggcggcgttgaccccagggaccccaggctccttcttgccccaaccatgtgtgatgaggtcaccctcacccaggaccttctgctccccagcagggcctgatgaagaaaccgtcaccttcccgggcaaagctgagggacgctcagaggctgtttcgagaggtgcctgtgctctctgccgtgggccccttgcaggggtcaccccatccaggaggcatggctgtggggcctgaggggcactcggccagcttcggtctgtggtgatgggggtgacctgatggtgaactcacccaggccagcctgggcccctgagccgcagaggcctgcaggagacagtgcaggacatgcaccttggggtacctgccagggccctcactcacatccggccctccccactgctgtaggcccggcaccctagccagggcccccagtcacatccggtcttcctgctgctacaggcccaacaccctggcagactcctgtcgctgctggggagggtcctgcggctacatcccaggtgtggagggcgtgacctgcacggtttgttcttaggcttctgccctaagaagatggcctactatggaaaatgcattgaaactgtgatcgagcaactcgacaaatttacacccaagagggacaaccctgagcagttcctggaggctgcggccacctccctgcaggtaggatctgctgggggctgctgggaggccacgccaatggcacctgttgtgcagctgttctggttaacagcatcaaatgccttcctaacgactgccttccttccacatggggagaagctgaccgtgttttccac

SEQ ID NO: 31484 - DNA, 2300 bp, Homo sapien
aacttttaagttctctttgctccaattataatcacaaacttcggaaaatgttatacctttcaacttacagtcgctatcaaaaatcaaatacttagggcagggtgtgatggctcatgcctgtaatctcaacactttgggaggtcgaggtgagcagataacttgagcccggggcttcaagacaagactgggcaacatggcgaaagccagtgtctacaaaaaaaaaatacaaaaaaattagccaggcatggtggcacacacctgtggtcccagctactcaggaggccaaggtgggttgatcatctaaacctggggaggtcgaggctgcagtgagtgagtcatgattgtgccactgcactccagcctggctgacagagtgacacctcgtctcaaaaaaaaaaaaaaaaaaaaagactgggtgcggtggcccacgcctgtaatcccagcactttgggaggccgaggcgggtggatcacgaggtcaggagatcaagaccatcctggctaacacggtgaaaccccgtctctactaaaaaatacaaaaaaaaaaaaattagccaggcgtggtggcgggcgcctgtagtcccagctacttgggaggctgaggcaggagaatggcgtgaacccgggatgcggagcttgcagtgagccgagatcgcgccactgcactccagcctgggcgacagagcgagactccgtctcaaaacaaacaaacaaacaaacaaaaaacacaaatacttagatattttacatgagaattacatttatctatcagatactctaccatgccagatttccttacaattacgaaaaatagcaaacacatattgtttgtaaatgcaacacaaaaacgttaatgctctggtttctatctgccttgtcattccgttatttgactccattttcgaggttagaaactcactgtaaggtggccgggcgaggtggctcacaccagtaatcccagcacttttggaggccaaggagggtggatcacctgaggtcaggagctcgagaccagcctggccaacatgatggaactccatctctactaaaaatacaaagaaaattagccgggcgtggtggcaggcgcctgtaatcccagctattcgggaggctgaggcaggagaatcacgtgaacccaggaggttagagcttgcagtgagccgagatcgcgccactaaaacaaacaaactcactgtaaggaaacaatgtaacccaaggcatttggggtgaccttcacgttgcctgagggtgccgagggaccagagatgctggccatggactaaggtctgggtattctcaggcagcagggacaaggtgggcttttttcctggttgctaaacccacgtcaaagtcgagctcagggactggagctcaagaaacccaccgcccattctccagtccgaccggggacctgcatgcacctctgccgtgctgccctgagtcctccaatcctccacactcttcctctgttatgtacacgtctccacccaggcctgcaaaagtcccagcttcctcgcaggggcagggacccgcacgccggcccagggcttggcacgcggggatgctgaaacagggccaggcctggtttccagccgatcgtcagagtcccaaggcccagcaaccttcctcacaaaggcctcgttaagaggcgaggaaacaagagccgggagaggggcgcggaacggcgggcgggacgaacgaccagctccgcgcctccggccagctgcgtcgagccaggggcaccgcggctgttgtgcggctggaaatctaggaatgggaaggttcggggcctgctcggctccggaggcagctggcgggtcgtccctggcggcgttggagcggtcagtggcagccgggcacgggcgaccgggtcgcccgggtcgccctcagaccgtgactcccgaaaaaccttgcgggcggggcgcgcccgcgccgtctcttgccggaaggtgcgagttagtgcgctcgattgtgggcgggggcggaaagaggcgcgttttaaagtggtaacagatggttttcttatccaataggattaaaaaatttgtccttacccggccgaccgcggaagtagagtaggcgggcggccaatggggacatgatggggggcggagccgaggcctccgaagcggaagtgggttgctgttgaggcggcggcatctttctcgaggagctctcctgggcggctgaagaaggagcttcttctccggagtgcgccggcggtggcgcctgcggacctaactagctccaggttaggccgagctttgcgggaaagcagcggtaagtcagggccttgcagat

SEQ ID NO: 31485 - DNA, 2300 bp, Homo sapien
acacctcgtctcaaaaaaaaaaaaaaaaaaaaagactgggtgcggtggcccacgcctgtaatcccagcactttgggaggccgaggcgggtggatcacgaggtcaggagatcaagaccatcctggctaacacggtgaaaccccgtctctactaaaaaatacaaaaaaaaaaaaattagccaggcgtggtggcgggcgcctgtagtcccagctacttgggaggctgaggcaggagaatggcgtgaacccgggatgcggagcttgcagtgagccgagatcgcgccactgcactccagcctgggcgacagagcgagactccgtctcaaaacaaacaaacaaacaaacaaaaaacacaaatacttagatattttacatgagaattacatttatctatcagatactctaccatgccagatttccttacaattacgaaaaatagcaaacacatattgtttgtaaatgcaacacaaaaacgttaatgctctggtttctatctgccttgtcattccgttatttgactccattttcgaggttagaaactcactgtaaggtggccgggcgaggtggctcacaccagtaatcccagcacttttggaggccaaggagggtggatcacctgaggtcaggagctcgagaccagcctggccaacatgatggaactccatctctactaaaaatacaaagaaaattagccgggcgtggtggcaggcgcctgtaatcccagctattcgggaggctgaggcaggagaatcacgtgaacccaggaggttagagcttgcagtgagccgagatcgcgccactaaaacaaacaaactcactgtaaggaaacaatgtaacccaaggcatttggggtgaccttcacgttgcctgagggtgccgagggaccagagatgctggccatggactaaggtctgggtattctcaggcagcagggacaaggtgggcttttttcctggttgctaaacccacgtcaaagtcgagctcagggactggagctcaagaaacccaccgcccattctccagtccgaccggggacctgcatgcacctctgccgtgctgccctgagtcctccaatcctccacactcttcctctgttatgtacacgtctccacccaggcctgcaaaagtcccagcttcctcgcaggggcagggacccgcacgccggcccagggcttggcacgcggggatgctgaaacagggccaggcctggtttccagccgatcgtcagagtcccaaggcccagcaaccttcctcacaaaggcctcgttaagaggcgaggaaacaagagccgggagaggggcgcggaacggcgggcgggacgaacgaccagctccgcgcctccggccagctgcgtcgagccaggggcaccgcggctgttgtgcggctggaaatctaggaatgggaaggttcggggcctgctcggctccggaggcagctggcgggtcgtccctggcggcgttggagcggtcagtggcagccgggcacgggcgaccgggtcgcccgggtcgccctcagaccgtgactcccgaaaaaccttgcgggcggggcgcgcccgcgccgtctcttgccggaaggtgcgagttagtgcgctcgattgtgggcgggggcggaaagaggcgcgttttaaagtggtaacagatggttttcttatccaataggattaaaaaatttgtccttacccggccgaccgcggaagtagagtaggcgggcggccaatggggacatgatggggggcggagccgaggcctccgaagcggaagtgggttgctgttgaggcggcggcatctttctcgaggagctctcctgggcggctgaagaaggagcttcttctccggagtgcgccggcggtggcgcctgcggacctaactagctccaggttaggccgagctttgcgggaaagcagcggtaagtcagggccttgcagatgcgaggtttaggcagcttcgcggcctacagaggcctcggcccgcgcctcttgggggagccgcgctgcgcggcttgacccagccgaggctttgcagcccgggacctcgagccagctctggtcgctcgcactgccgtccgcgcgggcgcaccgagcccggcttggcgcgggcaacagaagttaggaggtctgcgtctgggtctcggctcaccctggggggccgcggccatggggcttagttcctagcctaggaagggaaactgagactctgggaggggcaggaacgcccccaaggtcacttggaaagtcgggcaggatgtgctgttagggggaagacccgggcagggtttttgttccccgctgacgacgcctcctttg

SEQ ID NO: 31486 - DNA, 2300 bp, Homo sapien
ttgtaaattgcccagtctcaggtatgtctttattagcatcgtgaaaacatactggtacagtaagttggtaccagtagagtgcgatgctgctgaaaagatacctgaaaatttggaaacagctttgcaactgggtagcaggcagggattggaacagtttggagggctcagaagaagacaggaaaatgtgggaaagtttggaactcgctagagacttgttgaatggctttgaccaaaatgttgataaggatatggacaatgaaatccaggctgagatggtctcagatggagatgaggaacttgttgggaactggagcaagggtcactcctgttatgtttcagcaaagagactagccgcattttgcccctgccctagagatttgtggaactttgaacttgagaaagatgatttagggtatctggcagaataaatttctaagcagcaaagcattcaagagatgacttgggtacagttaaaggcattcagttttataagggaagcagagcataaaagtttggaaaatttgcagcctcctgtcaatgtgctagaaaataaaattccattttctgaggggaaattaaagccagctgcagagatttgcataagtaacagggagccaaacgttaatccccaagacagtggggggaaatgtctccagggcatgtcacaggccttcatggcagcccctcccatcataggcccagatgcccaggaggaaaatatggtttcctgggctgggcccagggttcccctgctgtgtgcagcctaggggcctggtgccctgcgttccagccgtctcagctgtggccaaaaggggccaacatagagtagaactcaggctgtggtttcagaaggtgcaggccccaaaccttggcagcttccacatggtgttgagcctgcgagtgcgcagaagtcaacaatgagggtttgggaacctccactagatttcagaggatgcatggaaacacctggatgcccaggcagaagtttgctgcaggggcgggacactcatggagaacctccgctagggcagtgtggaagggaaatgtggggttggagcccccaagcagagtccctactggagcaccacctggtagagctgtgggaagagggccactgtcctccacaccccagaatgatagatccactgacagcttgccctgtacacctggaaaagctgcagacactcaacaccacccagtgaaaacagccgggagggaggctgtactctgcaaagccacaggggtggagctgcctaaggccatgggaactcacctcttggatcagcgtgacctggatgtgagacatggagtcaaaggagatcattttggagctttgagatttggactgctctgctggatttcggacttgcatggggcctgtagcccctttgttttggccaatttctcccatttggaatggctgtatttacccaatgcctgcacccccgttgtatctaagaagtaactaaattgcttttgatttacaggctcataggtggaagggacttgccttgtctcggatgagactttggacttttgagttaatgctgaaatgagttaagactttgggactgtgggaaggcatgatttattttaaaatgtgaggacataagatttgggaggggccaggggtggaatgatatggtttggctgtgtcccccacccagatctcatcttgaatttccacatgtgggagggacccggtgggaggtaattgaatcatgggggcaggtctttcccatgttctggtgatggtgaataagtctcatgagatctgatagttttataagggggagtttccgtgcacaagctctctttgcctgccgccatccacgtaagacgggacttactcctccttgccttccaccttgattgtgaggcttccccagccatgtggaactgttaagttcattaaacctctttcttttgtaaattggccagtctcaagtatgtctgtctcagcagcgtgaaaacggactaatacaggtgcacacggctgtactgtcccccgtcctgcttttaaggctttctttgtttcctaattgtgactgtttttacttgcaatgtaaaggcttcatttcccccatctctgaaattatttttttctctttcaaaaacactctgccatcttttcaaggtatccgccatctctttcaagcatgtgaggagcttgataacttttgttgggggtcggtgttcagaatgacaagggtcttgcccaggctggagtgcagtagcacagtcataactcactctagcctcaacctcccagggcacaagcgatcctcccatcttagcct

SEQ ID NO: 31487 - DNA, 2300 bp, Homo sapien
gctaatttttgtgcttttttagtagagacagggtttcaccatgttggccagaagggtctcgatctcttgacctcgtgatctgcccgccttggcctcccaaagtgctgggattacaggcgtgagccaccgcgcctggccggtcccctgctgtcttaatcctctgcccacttagcaacgctcaggcttttctgctgcagggtcttacctgcaaggcctgcaccagtgtctgtgtgacccaactccacagcacctgccacaggcccttgggagtttccttgtgcttggctcagcagcagactggggtagtgcaagcatctgaacagaccttgccaagtccagcccagggtgagccccaggctccttgccacaggccaccacccgtctctctgggggcttgtctcagtggcttcatgcttgactgggggaggggttggtgaggagagcacacttttccttgtggggaccagagtgggaatagtgcaatactcaagacttaggtgaattcctttctggaagtctctcttgtgactgtatttcttttcctcatgctgtgggggtcagggggatgcaatgattatggagctggcagcccctgtcatgagcctggggaaggctctctagcaccctgcatcaccctgtgggcaccctcagctctgagacctgagccctgagcccctgttcccaaggagcagagtccttctcagggcctcttctagaaggagccttggtgccgatggaagggtaactgagcgggaggaggaacctagggttgtgttgtgttctctagttgttgttggtgaaatccttttggcgtgggacataggaaggtctttgcccaatgttctctctctctttttttttttgagacaaagtctcggtctgtttctcaggctggagtgcggtggcgcgatctcggctcactgcaacctcagcctcccgagtagttgagattacaggcgtgccccaccatgcctggctaatttttgtgtatttagaagagacggatttcaccgtgtgggtcaggctggtcttgaactcctgacctcaggtgatccgcctgcctcggcctcccaaagtgctgggattataggcgtgagccactgcccccggccaagtgttctctttcttaagcctccttgttcctcagagcaggcagtgcaggctatgggattccccaggacggagaggcctctgccccggctgcttgatgcaaggctcagagaggccactaggtttctaccatgtgctgtctcaggcaaccgtgggcatatcactttccagaggtgcccactgaggtggtcattgtgtgtgctgattaggacagtgggagtaaaactgttcctttttaaatttaatataaattaatttttaaactttttaaaaaaatttatatagagatgaggtcttgctgtgttacccaggctggtctcaaacgtctgggctcaagtggtcctcccatctcggcttcccaaaatggtgggattacaggcgtgaaccgccatgcccagccgaattgtttcctttttgtatgtatgtgtgtgtctgtgtgacaatgtctctgtcacccagacaggagtgcagtggggcatgatcacggctgactatagcctcaacttcccaggctcaagtgatcctgtcacctcagcctcctgggtagctgggactacaggcgggcaccaacacgcccggcctattttttgtatttcttgtagcagtggtgtttcaccatgttgcccagcgatccacccacctcagactcccaaagtgctgagattacaagtgtgagccactgtatctggccaagatagtttcttttcaatgtttaggttttacagttttttaaaaggcatttttcctgaacagttaataaaaaattgatgccgtgaacattttaacataactggtctattctgttctctttttaaaacagagccaagattttcttcttcactcctcgcttggtggctcccagccagaggccggcagtggtgggaggctcgctctgggtgcacagacgctgccttcagacaccgcatgctcgtgcgaggcctgcagtgagcgcaggtatgtgacgtgtgtgccacgttgctcacacctgtccacaatgacatgcagacctgcatattggagctggacggagaaactgggctaatgtgacagacagcaacaagagtaaggcagttgcttcgctattgagagaaagaaccatatgagtaagacaaaaactgttgctcttgaggaactggcactaggaagcatcctcagaacaagagaaggagtccttaaataatcagaatcta

SEQ ID NO: 31488 - DNA, 2300 bp, Homo sapien
atttggtgtttttcttctgtaggattgatgctgttcacttgatttatccctggtgtattagtccattcttgcattgctataaagaaatacctgagactggataatttataaagaaaagcagtttaattggctcacggttctgtggctgtgtaggaagcatggctgggaggcctcgggaaacttacaatcatggtggaaggtgaaggggaagccagcacatcttacgtggctggagtaggaggaaggggggtggggaggtgctacacacttttaaacaaccagatcttctgagcactcgctatcacgagaacagcaccttcggggaaatctgcccccatgatctgatcacctcccaccaggccccatctccaacaatggggattacagtttgacatgagatttgggcggggacacaaatctaagccatatcacctggctttcccttcatgtatcgatataagtttctgaggttgtgaataacttgtaaccttcaggtgacttcagaaaaatagtatagttagtgataacatagggaaaaagatgaaagagaaggaagatgaaccgttaccgagtgctgtgccaaaccccgtgtggctagagcctcactactgcttcctggtgttaccacatctgcagatgacaggaggctcccgagggtctcagccaggcaggcctgttggggtttaggtcagcggtgtcctacgtagcataacatcctgcccctaagagcctggggtgctgtccttagttccacatgtgatggaaatggcagataaagttctagtttcagagattcatttctccaattgaactgtaactaaacacaaaaatgcccttagggaaattcttttactaagactgaaaaatcctttgggaatagtaatttcttcaggtatctgtttcttgaaggtaaacatttattttgaaatattatatatggtattattgctgttgttctagggaaaatggtatatatgtaaaaataacacatacatgttctctctagggagaaaataacagtgtcacttaaaaagtaaagtgtatttctttaaaattgcatgttacattgcttttacaaagagaaaaccagtctcttcactaaagcaaccagaagatgctttttatttttatttatttttttttagacagagtctctctctgtcaccaggctggagtgcagtggtgtgatcttggctcactgcaacctctgcctcctgggttcaagcaattctcctgcctcagcctcccgagtagtagggactacaggcgcccgccaccacgcccggctaatttttgtatttgtagtagagacaaggtttcaccctgttggccaggatggtctagatctcttgacctcatcatccacccacctcagcctcccaaagtgctgggattacaggcgtgagccaccatgcccagccaggagatgcatttttattttcactgtcttgtgaagaaaccatgagaaacaatctgccactaatacaattgagggaaattgagccactttagtaacatccagagaataatagtcattctggaaccatgtatgcatgggtgggaggttgtggggagctgaaaacaacagaaatttatgctcacagttcttgaggccagaagttcagaatcagtatgtcagcagggctatgttcccctgaaggctttgggggcaactgcagtgacccctggagttcttggtttgtggccactccactctccactggagctgttttaatgcactatttaatttaaaacctttgaatgaacattggttgcttctaatcaataacattttagaaattttatactgattcaaaggctttaaaatgttgaatacgtgtaaaataattgagtctctgttcacaaataagtatgtatgtatgtggcaagagagttggtaggttttgtttgtttgtttgagatggagtcttactctctcaactaggcggtggtgtcatctcagctcactgcaacctctgcctgctgggctcaagcagccctcccacctcagcctccagagtagctgggatcacagcgcacaccaccatgcctggctaatttttttttttttttttttttttgtatttttggtagagacggggtttcaccgtgttgcccaggctggaagtttgaaatcaattatttttatgtttgctgtctgaaattcattctttctctgttgtttgacacatacataagcctgcaggtacccaaatttgttccaaaaaaaaaaaaatttccctgaggctgtgaggagagagtcaaggaagaggtttttattgatgttatttatcaaacaa

SEQ ID NO: 31489 - DNA, 2300 bp, Homo sapien
gggactacacaggagcatggatattggaaggaggggatcctctttgaaagctggctcccccagttatatgtacctatttgaaatccaaagatcctcatttctaaaatacacatggcggcctggcgtggtggctcacgcctacaatcccagcactttgggaggccgaggcaggcggatcacttgaggccgggagttcgagaccagcctgaccaatatggtgaaaccccgtctctactaaaatacaaaaaattagccaggcgtggtggcgggcgcctgtaatcccagctaattgggaggctgaggtgggagaatcacttgaacctgggaggcggaggttgcaatgagccaaaaatcacaccactgcactccagcctgggcgacagattgagactccgtctaaaataaatcaatacgatacagtacagtacaatacaatacaatacaccacacctgaccccaaggctgttgttggatgagagactgtggattgtcacatgcaccttttacagttgaggcagaggctcaaggtaggtcactggaatgacgtgccccaggccacacattagcctctaacagctctgggtccagttttgttttttccactcatgccccagacaatcaataggcattgtttgtaaccatagccatggggactgtaggcttgctgtgcagcagccactgcactggacaagcattccatgcacactccaccctctagtccccacaacagcccaaccaggtagggtgggcactcgctctgcccttccttctgctgagaggaagcccaggctctgatgagtaagaaggagccttccatagcaaagccaggcctgtgtagcccaatgtccgggccataagcacttgggtggctctggctttgcttataggcttgtctgattctacaagcttgtgttttcccaggctcagctcaggcttggctgtggatcacataagggaagaaagtcaagaagctgctcaggggcggagcctgtgggcaagtgcacacacagggaagacccctgccctatcctgagtagggaaccttggaaagaccccatgtgtgcttgggcatcattgtggggaagactgggctgtggaaaaacactagcgtttgtctgggaattttggggaaggaaagggatggaaaagcgaaagggtgggaaggggctggtttcctgctgcttctgctatataagaacagcatctagcaggaaggttgtcccgtgggcccatactagccaccttacaaagcagcgtctgcagtggctgacgcctgtaatcccagcactttgggaggctgaggccggtggatctacctgaggtcaggagttcaagaccagcctggccaacatggtgaaacaccatctctactaataataccaaaaaattagcagggcatggtggcgggcgcctgtaatcccagctactcaggaggctgaggcaggagaatcgcttgaaactgggaggcggaggttgtagtgagccgagatcgcgccattacactccagcctgggcaacagagcgaaactccgtctcaaaaagaagaaaaaaaaggaaagaaaaaagaaagcggcgtgcggggcagggggttggagctctttctgggctcagtgtccccaggtgacggaacacatgccacgtgcttggtgcgctgcgagctcagctcctggagcttctgttgctgctgtggccgcaaggcctggaccctcgcggggagattcagacccacacttagctccagagcttgggggttgtcgttaagcccttcctttccatcagaggctgatgaatccccaaactcctgggctgagttcgactctccgacaactcctcagaggcggatgtttggggccactggaataagcccagcaccagctggggtgtggacagcctcgggggccaggccaactctcccggacgggtgcggacggcaggggcggggccgggctgtaggcggtgggaggggtggggccgggcgagaaggggctgggcgggctgccgtcgggcggggctgcgcggggaagggcggggctgcgcggggggcggggctgcgtgggggagggcggggccgggctgttgtgggtgggcggggcgcaccggggaaagttccgggaagggcggcagccggcggggcccgggcgcggaagttgccggcggccgcgcggcctcccgggcgggcctacagccatgtcccgggacccggggtcgggcggctgggaggaggccccgcgcgcagctgccgcgctctgcaccctgtaccacgaggccggacagcggctgcgccgcctgcaggaccagct

SEQ ID NO: 31490 - DNA, 2300 bp, Homo sapien
atttagctgaactggacatcagggacatcaagatgtacagccccaaggtcatgagtgttttgtcaggagccttagaccagtctggcccagcctggagctccctccgcatgtggcctcttacaggagtgacgcagccccatgcggtgctaacagtggcagcactgaacgtcggatggggctgagcccagccacttccacaatggctgtagttcctatctcttcctccctgctaggaaaatgtgaaatagcccagagtggggggtgggcagaagagttgcaggctacccaatgctgggatgagcagagttgagacctggggagccaggcccaggacacttacaggtggggatgtgagcaggcaccccagagagtgagcaccccagccagccagcacccatctactccctcactggggtctaagttcagccccgagagctaggctgtaggtgggtagagtcacagccccagcgccggtgtgaggggtggccctgggccaggtagagtgagtatctgcctgctgtcatgccccatccacttctgccgcctccccagtagaggaccccctccatttcacagatggggaaaaggggccctgttgtctgaagactctcccatatcctcccctgcctctgccatcccctgctttgtcccttcccttccagaggccctgccttggtcctggtcacttcctggtaggcactggctcttcctctatgcctgggctcagggcctggccacctagttttctgactcctcccacttactcccctccccagttaacctctctgatcccaagtgtgtctctccagcagggaggagggctattgcagccagggatcccctttctgaggcttgggacccattattgggcagctctgggacaggtggacggtgacttggcccacactcggtccagctgcaaccctgagaacccgcttggtttggctgtgtctcctggaggccctcaggtatttcaacctgtaggacccaaacccagtccttcacctgctgcagggccagccctggacacccctgcccctgcctgatttggagcagccaattcagcccctgtcattggactctggcctcttgtgctcagtacagagggtcagaccttggccgcctgcctggacagggccaggtcaccaccacccacccccagctcccttgggttcccagcaagatcctgtccttcctctactcacagcttcctgggctctgggacctggggtccagtccccactcctcatggggaggagtccccccacgccccaagcagttgactcccgcactggtggggggtccgctcgccctcaagctctgcaggcccagcttggtctccccagcctcttcactttctccacggctccctccacctacctggccctgagagctccccagggaagccatttcctcccaggaagcccctcctcttctcgcccctgcccttacaccaaggcatctgggcctactcttagggagagggtgatggtggaggaaagggagcctcagaggaggccaagtgtaaagcacccggtctcctgtgcctcccagccccaagacgacctctgggccaccggagtccagacctggtccaagaggcgaggtccccctgggaagtgcctgaaaagtaccctggaggacatttggaaacaaagacaaggtttcctggtgcccagcaagccctcccccacctcccctgctcctgtcttggccagggcctaagtcgcactcacggggcaggggtggggccgcccaggatcaggaccacggggctgggggggtggacagcgccctttccacctgggtcgctgggcactggggtgtcactgggagggacacgcaggagggacagacacgctacctcactcacgggcgagaactaagcacctactgtggacccggcgtctaggcccgcgacaacgccagtcttcgccccccaggggcctcgtcccggggccgcggaggccacgtgcagttccccgcccaccctgaggtaccggccccgccccacgcccagctcggacctccaggattgcgggacccgccggggaggggcggggccggggcggggccaggaggagggcggactgggcgggcgcgggcgggacggagctgcggcggcggcgggtcccgcgggcgggagcgcctggcggccgagtcaagccgccgcctcgacccagggcccgcgggccaggagagcgctcggcgggtaagcctcggcggcgggtctcggcgggtctcgggggtctcgcgggggggcggtctccgcgtctggaaggggctcggcgggccttggc

SEQ ID NO: 31491 - DNA, 2300 bp, Homo sapien
attcttgttccccaggctggagtgcaatggcgcaatctcggctcactgctacctccacctcccgggttcaagcgattctcctgcctcagcctcccaaatagctgggattacaggtgcctgccacctggtatttttagtagaaatgggggtttcaccatgttggccacgctggtctcgaactcctgacctcaggtgatctgcccgcctcagcctcccaaagtgctgggattacaggcgtgagccactgcgcatggctattctaataatttttaagtggattccttgggattttctgtatgtaaaataatctaatcagtgaataattgttctttctttccattctggataccttttatttctttttattgcctaattactctggtgagaatctccagtactatgctgaatagaagtagagcagacatcctttccttgttcctgttcttgggggaaaaactttcagtcttttaccactaggtatgttagctgtgggtttttcatagaaccctttatcagattgaggaacttcccttctattcctggtttgttgactcttcttatcatggaggagtgttgaattttgtcaaacacttgttcttcgtctatcaaaatcatgtggttgtcctttattctattgatatggtgtattacattaattgttttgaatattaaaccatccttgtattcctgggataaatcccacatggtcttggtgtagaatcccttttatatgttgcaggattcagttggccagtattttgttgaggatgtttatgtctatacccataagggatattggtttgtagttttattgtgatgtctttgtctggttttggtattgggataatgctgctctcatagaatgagttccctcctcttctattttctggaagtttgtgaaggatccatgttcttttgagccaactcttgatggctgggttagttcagtttcaactttaggctgtggcaacagcaggggctgaggcctgcaagtgggtgcttgctcgattcaggtaactggagccatagggtctggctggcgtaagagcacagaaggtagagggcaggagtggctgaatcaggaagggccaggttggcatgaggaggccctagaggtttagcactgagcagtgatgggaatggtgtgcgtgttgattctgtgctgggtggagggggctggaggcagaggaagcctgaggagaggaagtggagggggttgccaagaggcaatggagaggggcctggcagggcggctggaaggaggtgggatccttgaggcaggccagacaagggcactgagaacagaggcacagagatgggacagagcctcgaaggctgggtgcagtgggaagaagtccagatagcgggcctgaggtggggccttgaaaccagggtgggtgcccaggatggacagctaggtagggtcaggcccaggctgttagagccacacctgcatctggcccatcttggtggcagcttgtttgcaggtggaagatggaggaggcaggatgcctgggaggccagcaagggcctctgccggcctttggccaccccaggggactctcctgggtgaggtgcctgcgtttgggcaagcaggtgggaggtgccaaggaccagacccctggctccttggagaatccggggctggaggcccatggagtcccgcaggaaagtggagaaggtgagggcggggcacgtgcccgatcccttgccccgttgccgccctccatgcaggtgccgttttgcagaggccactttcccgagggagctggttgcaagggcccggcgggatgggacctgggcggggcctcagagccgaggctcccgcgccggccgtggatttccaaccaagctgtgtggactggcaggtgttgggggagtggagcgggaggcctcgtttgcatcgaaggcttcttgattccaggctgcaccaacagatgtgggcctcctgtcccaagcgcccaccaacctccttgcagcgtggggaaactgaggcccgcagggggctcacgtgcctcccgcgcacggtgacgcggcagggggcggggccgggaggggcgcgccgggatcctcacctgcccgcccagtcccccgccgagaggggaggagccggcggctgccaggccagggccggcgggcatggcgggctccgggccgcggccgcggagctggggccggcgggaggcgggcgcccgggacgaggcggcggcggccgggggacgcggcccggggccgtgccggtgctcgcaggggaggcgggcgtggatcgccccggggaagccggccatgcccgccgcgtg

SEQ ID NO: 31492 - DNA, 2300 bp, Homo sapien
ttctattgatatggtgtattacattaattgttttgaatattaaaccatccttgtattcctgggataaatcccacatggtcttggtgtagaatcccttttatatgttgcaggattcagttggccagtattttgttgaggatgtttatgtctatacccataagggatattggtttgtagttttattgtgatgtctttgtctggttttggtattgggataatgctgctctcatagaatgagttccctcctcttctattttctggaagtttgtgaaggatccatgttcttttgagccaactcttgatggctgggttagttcagtttcaactttaggctgtggcaacagcaggggctgaggcctgcaagtgggtgcttgctcgattcaggtaactggagccatagggtctggctggcgtaagagcacagaaggtagagggcaggagtggctgaatcaggaagggccaggttggcatgaggaggccctagaggtttagcactgagcagtgatgggaatggtgtgcgtgttgattctgtgctgggtggagggggctggaggcagaggaagcctgaggagaggaagtggagggggttgccaagaggcaatggagaggggcctggcagggcggctggaaggaggtgggatccttgaggcaggccagacaagggcactgagaacagaggcacagagatgggacagagcctcgaaggctgggtgcagtgggaagaagtccagatagcgggcctgaggtggggccttgaaaccagggtgggtgcccaggatggacagctaggtagggtcaggcccaggctgttagagccacacctgcatctggcccatcttggtggcagcttgtttgcaggtggaagatggaggaggcaggatgcctgggaggccagcaagggcctctgccggcctttggccaccccaggggactctcctgggtgaggtgcctgcgtttgggcaagcaggtgggaggtgccaaggaccagacccctggctccttggagaatccggggctggaggcccatggagtcccgcaggaaagtggagaaggtgagggcggggcacgtgcccgatcccttgccccgttgccgccctccatgcaggtgccgttttgcagaggccactttcccgagggagctggttgcaagggcccggcgggatgggacctgggcggggcctcagagccgaggctcccgcgccggccgtggatttccaaccaagctgtgtggactggcaggtgttgggggagtggagcgggaggcctcgtttgcatcgaaggcttcttgattccaggctgcaccaacagatgtgggcctcctgtcccaagcgcccaccaacctccttgcagcgtggggaaactgaggcccgcagggggctcacgtgcctcccgcgcacggtgacgcggcagggggcggggccgggaggggcgcgccgggatcctcacctgcccgcccagtcccccgccgagaggggaggagccggcggctgccaggccagggccggcgggcatggcgggctccgggccgcggccgcggagctggggccggcgggaggcgggcgcccgggacgaggcggcggcggccgggggacgcggcccggggccgtgccggtgctcgcaggggaggcgggcgtggatcgccccggggaagccggccatgcccgccgcgtggacgccgtgagtaccgagccccggcccccgagccccgggacccgggccgcgagcttccggctctggaccccgcaccccgagcccctggaccagggccgcgagccccgggcgctgctggtcgcccacgcgcttcttgggggaacaaaggcgggcgtggaccgtcccggcgggcggatgggggactcaggccggcacggggcttgtcgatctgcgggcagctccccgcgggcggactgggcacggggctccctcctccatccccactgcggggctccttcgggccgggcgcggttgggcgggcggcggggtgtggcggcgcctttgttccaaaccttggcctgtggttgggggtcctgcggctgggacccgcccctgacccctccctgcccagaggggctgtctttgggtgcagaaggagctggtggggtccagccgggtgacccaggccgaggccggcagaagacagcctgatgccttgaagacttcctcttgcacttttgttggagggtgctggtttgctaaaagcagagagtatttttctttttatttattttgtttttaattttttaattttagctccagctcagttgcccagactggagagcagtggccaatcatagcttactgcc

SEQ ID NO: 31493 - DNA, 2300 bp, Homo sapien
ggctgctgctgggcctcaggggcacggagccctgtggggtaccccagggaggccaagcaggcctgggcaaatggggccagaggtgggagggtggcgtccatgtaaagtggcattggcgggcatcgaggcaggtttgtccttgtctcctgtgcactgctgctcccacgaagcccacccagcacccctcttccatgcccctccatgcccccttacgcctgcctgggcatgaagctcactactgggagcatcagcagccagggcccacccgatctgccctcttccgttggggcgtggtgctggtgccgagacgtgttcacaggggggtgctgtgggaaggccatccctatagctgtgaaccaggccgtgacccctggcgctgtgcccccagggtgatgcgggcggctgaggagaccacgtccaacaacgttttccccttcaagatcatccatatcagcaagaagcaccgcacgtggttcttctcggcctcctccgaggaggagcgcaaggtgactgggggtccgaggacgagtgcaaggtgactgggggtgtgggcctgcaggcaccaggctggacctgccttgggggctcgctggtcctggggcgctggcctctcagccccgggcaaagagaaggtgtggctgggacacaggcagctgggtgggtgctgccccagctccatccccatgcccagagcctggtgccagcgcccacacaaggaacatgctgtcctgggaggtgcccctgtgggctgaggggagccacacagccatgttgtatccagccgggtcgcctcctctgaccttgggagtcacagcagagcaggcagggcagtgaaggtggaggggtgcggtggggcccaccctggtggcaccgtgcccaccacagccccgctgacctgcagagctggatggccttgctgcgcagggagattggccacttccacgaaaagaaagacctgcccttggacaccaggtgagcccgggcccagggcataccgggcagtgagggtccctggggcgcctgggcctgacccgggtgtccgcctcccagccccgggcttggcatagaattccgtccttaaaggtttcctggaggtgccagctgggctgcgtctctctgctcctgtctacagataaacacagatacaggacaagcacagatgttcacacacagacgagcgacacgcggacacgcacacacaaacacaagcaacacgcggacatgcacacacacagagcaacacgtggacatgcgcacacacacagagcaacacgtggacatgcacacacacacagcaacacgtggacatgcacacacacacagcaacacgcagacatgcacacacaaacacagagcaacacacagacatgcacacacacacagagcatgcacaggtgtgcatgcatctctctgctcctgtctacctccagccccatctgtcacatctgtttctgtgttgccgccatgggtagttcctgttaggggatcatgtgtgtttatacgcctgccaccagggaggcctggcatggcagcagctgggcactttgggttcccagccccctacgcccaccctggctcactcagagtgagaccagaatgattctcctggcggggcgccactgggcagtctgagccttggcagcctcccccgtgagctggcccgacgtgcagcagatactctctggattgggacttcctggcccgagacgatgtggagggaacaaaccttcctgtcctttcacaggtggggacaggaggcccagggagggctgggcacagccaaggctgccctgcaggtccctgcctgactccgggctcccgtcccctggtccaagctgttcagcctcgggcccagcccagagtcgcccaagccctcttgaggcaggagcaggtggagacgtgggcacagtcagggcggccatccttgtgggccagaaggggcacctagtggaggcaccacagcctccagttcttctgtctgtccttgtaactgtgtgtgcatgtccgcgtgttgctccgtgtgtgtgcatgtccgcgtgttgctctgtgtgtgtgcatgtccgcgtgttgctctgtgtgtgtgtgtgcaatgtccacgtgttgctctgtgtttgtgtgtgcatgtctgcgtgttgctctgtgtttgtgtgtgcatgtccgcgtgttgctctgtgtgtgtgcatgtccacgtgttgctctgtgtttgtgtgtgcatgtccgcgtgttgctctgtgtgtgtgcatgtccgcgtgttgctgtttgtgtgtgcatgtctgcgtgttgctctgtgtgtgtgtgca

SEQ ID NO: 31494 - DNA, 2300 bp, Homo sapien
attgttttattatgataaaattttcatattataaagtttatcattttaattattttaaagtgtacagttctgtggctttgcgaatattcatattattgttcagtcatcaccaccatccatctccagaactttttcatcaccccaagcttaaactctgtacccattaaacactaaatccccattcctccagccctttgcaaccaccattctacctcctgtctctctgaatttgactactctagacacctcatacaagtggaatcatacatttatctttttgtgattgggttatttcacatagcatgtcttcagtgttcatccatgttgtagcatgcgtcagaatttcctttcttttggccaggcatcgtggtttatgggtttatgcctgtaatcccagcactttgggaggctgagtttggatttgggaagattgcttgagcctaggagtttgagaccagccctggcaacatagtgagatcccgtctctacaaaaaataacaaaaattagccaggcatgttggcacgtgctggtagtcccagctacttgggaggctgaggcaggaggatcccttgagcctaggaggtcaaggctgcagtgagccatggttgcaacactgcactgcagcctgggcgacagagaccctgactccaaaaaaaaaaaaaaaaaaaaaaaaaaggcacaaaaccccaataaatagaatttccttctctgcataatgctgctatgaacatggtacaaatagctgttttcatttctttggggtatatatccagaagtggaattgctggattatgtggtaattatgtttaattttttgaggaaccactctacggttttccacagcagccacaccattttacattcccgtcagcgatgcacaaagggttccaatttctccgcatctttgccaacacttattttctttttttcctcttcttcctccttctccccccttgaaactttttgttttcttctcgtttttgtagagaacagggtctccttatgttgtccagtcaagtctgccaactcctgggctcaggctatcctcctgtttctgcctccctaagtgctgggattttaggctgaagccactgcgcccaactccctgcttcttcaactgccatcctaatgaatgttaagtggtatcccacagtggttttgatttgcgtttccctagtgattaactatgggaagcagaagtgaatgagacagaattgtgatcttgtcagaaaaatcgtcttggaaaagccaacgtccaacagaaatggttagaacaggggtcgctggcttccatccagacagtatccctgacccttgttggggcaatgtcacagaggctcctgctgagcagggaggtctggattccacactcttctgccactgcccagctctggacctaagctttctatgggtgtcaagaggacaagcagccgtgcccatttgtctcgctgcttgtttttttgggtgtcagatgcgccagcaggagggacagtgtgcgggaaggtgctggtctgaggctggtcctgccaaagccccgcaggctcactccctggtcgtgcggaggtggctggtgctcgctggtctcctcagcacccgcaggccgggcccgggggccaggcagttgtcctctgtggagccttatcggggcccacaggccctgctgccttgaccccacccgggccccaaaactcggcctggggactgcacaaggcggggctacgcggggcagggcccgtctgctgggggagtgcgctgggcggcggcgggagggcagggtccctgggctccgacagcccctccggcggaggtcaatcacaatgaaaccgtgtccagcggacccggcaggggctcgccgcagtctacctggccaccgtgaagccatgacctggcgcccgaagctgccggccggggtgtactccgcgcgggaccctgggcctccgcaggccccggcggggtcgccccgaggcgggcctggcgagtccaatcgccctgcccgcaggggacccgcccctcatgggtcccgccaatcgcagggtacgttgctcggcagtgctgcgcggcttggcctatgggacggcgcgttgttgggctgcagcgccgcaggccgcacccaggtcgggcggtgggggcgagcggaggggctgaggggcggagaggcctggcgggccgctgctgcgggccaggggacgggggcggagccggagccggagccgacgggcggtggccgcactgggaccccggaatcccgcgcgctgcccacgattcgcttctgaggtgaggctagctagcgggggcggcg

SEQ ID NO: 31495 - DNA, 2300 bp, Homo sapien
catgtcttcagtgttcatccatgttgtagcatgcgtcagaatttcctttcttttggccaggcatcgtggtttatgggtttatgcctgtaatcccagcactttgggaggctgagtttggatttgggaagattgcttgagcctaggagtttgagaccagccctggcaacatagtgagatcccgtctctacaaaaaataacaaaaattagccaggcatgttggcacgtgctggtagtcccagctacttgggaggctgaggcaggaggatcccttgagcctaggaggtcaaggctgcagtgagccatggttgcaacactgcactgcagcctgggcgacagagaccctgactccaaaaaaaaaaaaaaaaaaaaaaaaaaggcacaaaaccccaataaatagaatttccttctctgcataatgctgctatgaacatggtacaaatagctgttttcatttctttggggtatatatccagaagtggaattgctggattatgtggtaattatgtttaattttttgaggaaccactctacggttttccacagcagccacaccattttacattcccgtcagcgatgcacaaagggttccaatttctccgcatctttgccaacacttattttctttttttcctcttcttcctccttctccccccttgaaactttttgttttcttctcgtttttgtagagaacagggtctccttatgttgtccagtcaagtctgccaactcctgggctcaggctatcctcctgtttctgcctccctaagtgctgggattttaggctgaagccactgcgcccaactccctgcttcttcaactgccatcctaatgaatgttaagtggtatcccacagtggttttgatttgcgtttccctagtgattaactatgggaagcagaagtgaatgagacagaattgtgatcttgtcagaaaaatcgtcttggaaaagccaacgtccaacagaaatggttagaacaggggtcgctggcttccatccagacagtatccctgacccttgttggggcaatgtcacagaggctcctgctgagcagggaggtctggattccacactcttctgccactgcccagctctggacctaagctttctatgggtgtcaagaggacaagcagccgtgcccatttgtctcgctgcttgtttttttgggtgtcagatgcgccagcaggagggacagtgtgcgggaaggtgctggtctgaggctggtcctgccaaagccccgcaggctcactccctggtcgtgcggaggtggctggtgctcgctggtctcctcagcacccgcaggccgggcccgggggccaggcagttgtcctctgtggagccttatcggggcccacaggccctgctgccttgaccccacccgggccccaaaactcggcctggggactgcacaaggcggggctacgcggggcagggcccgtctgctgggggagtgcgctgggcggcggcgggagggcagggtccctgggctccgacagcccctccggcggaggtcaatcacaatgaaaccgtgtccagcggacccggcaggggctcgccgcagtctacctggccaccgtgaagccatgacctggcgcccgaagctgccggccggggtgtactccgcgcgggaccctgggcctccgcaggccccggcggggtcgccccgaggcgggcctggcgagtccaatcgccctgcccgcaggggacccgcccctcatgggtcccgccaatcgcagggtacgttgctcggcagtgctgcgcggcttggcctatgggacggcgcgttgttgggctgcagcgccgcaggccgcacccaggtcgggcggtgggggcgagcggaggggctgaggggcggagaggcctggcgggccgctgctgcgggccaggggacgggggcggagccggagccggagccgacgggcggtggccgcactgggaccccggaatcccgcgcgctgcccacgattcgcttctgaggtgaggctagctagcgggggcggcgggggcccggttcgggctgaggcggcggcgggggcgcggggaactgggccgcggttgcggcgggcgggggccgcggggcctgcggcggcccgggcagcctcgggggcggggaggccgctgcggcgccgagggcgtcttggaggggtccccgcggggccttcggcctgggccgagccggggagcgagggcgccgcagatctttcatcgggataggaccccggggactaggcttttcccgggccgctcgttcctggccggcttgtgggctgcaggggtgggggcggaggaggacgaccctggct

SEQ ID NO: 31496 - DNA, 2300 bp, Homo sapien
cttcaagtgattctcctgcctcagcctcccaagtagctaggattacaggcacaagcttccatgcccagctaacttttgtatttttagtagagatgaggttttaccatgttggccaggctggtctcgaactcctgacctcaagtgatccgcctcccttggcctcccaaagtgctggaagttacaggtggaagccactgcgcctgccctatctttatttgcacatatctccctttctctctcattgcattgtgctttgatgacaaagatggctaaataatcaccatgttttgtttttttcctttgtttatttcttgcttgcagtcagagtacctctcagcttttcccttcctcacggatgactacaaaatatgatctgcaacattatttgccatggtttggtaaatagggggtcctcagagggctcttgacagacattctattctacccttaattaacagcaatacatctgtctgttgtgtgcttcccccaagtgataggtactcttagactgtcccttggcaatctcctgcaatatgttttcagctcaagcagtgacaaactagaagtaaatttgatgtggattaacatccagtgaacttaaattttcataccggatatcatttataattgtttgacaagatatttctttctttcttttttttttttttttttttttttttttttgagacggagtctcgctctatctcccaagctggagtgcagtggcgggatctcagctcactgcaagctccgcctcccgggttcacaccattgtcctgcctcagcctcccgagtagctgggactacaggcgcccaccaccacgcctggcttattttttgtatttttagtagagacggggtttcaccatgttagccaggatggtctcgatctcctgacctcgtgatccgcccgcctcggcctcccaaagtgctgggattacaggcgtgagccaccatgcctggccgatatttatttctttgcagggtatgtgaaaaaattattttagtgcaggttgggaatataaattatctgtattgttataatagtgattttctattaaaatcaccatcaatccaattgcacttttttttgcctgatttagtattatttgataaaggatggatggttagggttttttccacatttaaaagtaatttgaaaagtattttgaagaaagtactgcaaaggataaagtagaatatgaaaaattactaataatcctatcactaaaaggattacaatgaacattttgatgtatttactttttttttttttttttttttttgagacaaagtcttgctctgttgcccaggctggagtgcaatggcccaatctcggctcactgcaacctctgcctcctgggttcaagcaattctcctttctcagcctcccaagtagctgggattacaggcgcccaccaccacgcctggctaattttttacatttttagtagagatggggtttcaccatgttggccaggctggtctcgaactcctgacctcaggtgatccacctgccttcgcctcctaaagtgctgggattccaggcatgagccactgtgcccagccaatgtatttacttttaatctttttctatgtttaggtatgtatttgctgtaataaggactggttatactgcttgataacattgtcactcaaacatatatcaagagcaattttatgccatttaagtttttttagcttttcatgttgaatgcatgcgtagaattcccagtgtatttgatcagtcctctgttgattgaaacgtaggatgtttttcccttttatcaataatactggaatgaacatacaaatgaatcagtctttgagcacttccttgaatgtttccttaaaatagattcctaagagtagaattcctgttcagagttttaagcttttattgtattaaattactttctagaaaagaatgtaccagtttatattctcagcagtaatgtgtgagaatatccgtttgcctttccagcactggatgaaaacaaaaattggtctatgtgatagctacttctgaccccctgcccaaggaacagaaaataaatggtatctcagtgttttaatattttttattaggctttctgtgaagaattggaatcaatgatacaggagcaatttaagaaggggaagaaccccacaggcctattggcattacagcagattgcagattttatgaccacgaatgtaccaaatgtctacccagcagctccgcaaggagggatggctgccttaaacatgagtgagtagttcctgatttttaatatatgttctgtagttttcaggtaaaa

SEQ ID NO: 31497 - DNA, 2300 bp, Homo sapien
caaccttactaatatttaagccttctctactatctttgagactcctgacctccttcttccaccaaatgacctcatcatgtcacagaaaaaatgggtacccttactgacatttgtagccattctgtactcttgaccacctgttataatgtcttgccttctgcctgtggccagactttgctcacctggcttggaattccacccttcctgccttcttttttttttttgagacagagacttgctctgttgcccaggctggagtgcagtggtgcaatctcggctcactgcaagctccgcctcccgggttcacgccattctcctgcctcagcctcccgagtagctgggactacaggcgcccgccaccacgcctggctaatttttttgtatttttagtagagacggggtttcaccgtgttagccaggatggtctcgatctcctgaccttgtgatccgcccgccttggcctcccaaagtgctgggattacaggcgtgagccaccctgcccggccccttcctgccttgttagattcacagtgcattgccagggttcttctgttccttcactcttttgtagagatagcttcttcctttgaactgcttccttcctttggttttgaaacttgttccagtcttctgtttttttcatgtaatttcttttaaaggatattttaaattgttaatacagtgcctgctttttgtatcaagtgtaccttatgcagatgtctaaagaaaaagtaattccaccaatacttccatctctcttgaggcaagcagtgtgtgcgctgttcacgttgctgaaatgtttcctccatactcacacacacatgggtttttctgcacatggactcataaccagcggtgcttcgttaagctccattctggactcagaggaatgctaagcctcttgaggtgacggtctggagctcaccttgtgattagtgtgttgtgcctctgggacttgatattggtctctgccagagagactgagttgccttctatccatctgttcttgtttccgcttaaatgaacttttcaaaatgtaagccttaccatgtcatgctcctgtgtgcggcacggtcactctgtgtagaatgtcatcgctgctttattcccctgtagcagttacccccattcattctgtatgtttagctgttgctgtccctctctgcccacaggaatataaattccacagggagagcgtctgttgtggtccctgctgtggccccaggacccgtggcaaagagtaggcatgcagtaaacttaggtgaaaaactgaatgaaacccccggctgaactgaaattacctcagtgaaattgtgaacaagagctcgctgggaccttttgacatttgattggtgggtccagttagcctagcacaaatgccagctcccttcctggtgcctgcagggaaattgctggcctctgtcatctaattatacttgacagaatgctgtggtggagattagtgctaagtggttgcctgaagatcagtgcggtgaaaatgttacagctgtgattggaaacgtaaccctaactgtgataacagcttcaccttcttcgcaggttttaaagtgctgtttgcctagtcctattttgaatgctgattaaataagtttgaattggttaaattgcttgttttctcctcctttaattgtttaagaattggcaaaattaaaaaagtgttttctgtaaattatctccttggggcttaataccgagtaaaaagaaatgcaagttacctaaaatgtttcctatgtcttataaactagaactagagaatctttaaggaagaaaggttttggtttattttgttttactattatggcatccatttcttatttactatctaggtatggtatagacgcttaacagaaaagcaaatacagtgtcaacaaaaagtgacagcaggtcattctgccctttctttgaaagggggtcatagggattttctgctaaagggatttaaaattgctaacaggtgttagaagattggagatgattgtctgaaatagatctttaagattgcattggatttggagaagtgtttgtgggggctggggggagggggacaagacggggtggcccagttagcacagtggactgggcttcctctctcggtggcacttagctgatggcttggcctgcccattctgatgtcagtggaatgctgtcaaggctttgcacctgcagaacctggcaggtgcttgttcaactccattctggattccagagaatgctaagcctctgaggtgatggtctggacccacctttgtgaccagtgccctgtgcttcagggacgtgat

SEQ ID NO: 31498 - DNA, 2300 bp, Homo sapien
aaggccaggagtggctcagagtagggcttggcaacccagacaacacccctcaaccctgccctatttcgaagcatctgagggccacttgcgttctcagtgccttcctaggggccaggagcagctccttgaaagcctggctctggaacaggagccactggtcccccgagaaccccctccaggatgcgatgagggccaaccagtggccatgaggggcccacagccacctccctctccccacctaaccccatggggctactggctgggtgggaggaggcttccccatgggcacccaggcccaggaacataccaggcacagcagcatcaccgggcgcctccccaagcagtcagaggtggccccagtgagtggcgcacacagaaactgcaggacagagaatgccgagccaatgagacctgagagacagatgtcaccatcatggggctgcctggcaccatgagctgtggtcttggggccctcaaggccaatgtccagccccgtcctgagggtccagtcatgctgggccctacactcacaggccatggcccttgagccgagggggccccaatggagagatgaggaaggatctgaacgtgacacgcggaggcaagggatcatgcccagaagccaggacatgtgggcaagggcaccagacatgccagcccagggagtgggaaggcaaggaccgagaattggggaggggcctgggctggaccacgtccaccaaacataggaccgtagagagcccgccaagggcacagagccagccatacctccgaacaggacactgttgtacctcttctccactggcatcccgatggcggtggcaaaccagtccaccccgccctgccaggagccatagagggggtcctaggggatgaggaatcacgataagggctggggaggtctgatgggcctggggggcagggggcactgtgggccgcagggcaaggactcacgtgggcacggccgtggctctccaacagcccgggcagcaggggcagcagcagcgtgaaggccaggaggtccagcaggaggccgagaaagacaacggtgaccacgcggcgctccggcggctgctggtggatgggtgggcgcggggtgcagcctccaccccctccccatcccatggtgggctgctctgacctggcctgggtggggtgcggcgggtcgggttagcggggaagccgagtcctccggggcctggcatacccccacacccgacagccggcgagcaccctaaaggggctgatggcaggggctctggcctacggacgcaggggccgttctggcctgcgcgatgcccccgccccgaacccaggcagcaggaaacgcaggcttcggggattgcacaaaaaatagccgcaaaggcaacggtcctgagagaccagggtgagcacatcgcggacctggccccaccccaccccacggccgcgcctcccacgccctcgtaacagcgagagaaaacttgaagccgcggggaacccggatcccgatcccgatcccgatcccgatcccaaccccaaccccagccccggcccgcgccccgcgattccggcccctggcccggactcggtctccctggcgggggccatggggtgcacaccggacgcaggagcacccccaaccccgcgcgcctcccactccgccatcccgcgtgcgtcccggtcccgcccccaccccgcgcgcccccggtcccgccccccaccctgcgcgtccccggtcccgtcccccaccctgcgcgccctctaacccccacgccgcgcgcctcccaccgcccccaccccgcgcgcccctggtccagccccacaccccgcgcgccccctactcccctaccctgcgcacctctcacccgccccacccccgcgtaccccgggtcccgtctcctcccccaccccgcgcgtcccctgtcccacccccaacccgagcgccccctacgccccccaccccgggcgcccccggtcccgccccgcacctgccgcggctgcgcgctcgggacggacggtcgcacagacgcggaacagggcaccaggcacgccgccaggggcgggacggccacgcccggccacgccacgccccggaagtgacgtacatctctgcacgttctcttccggccggagtcagtggcggggttctcgccggtcctgcgggtcgctgcttggctgtgggttagcagcaccctgagcggagcggaagagctgcccgccgccgcgtaaccccgaggccgagactcctggcctggcctccttgggcccacgacgcctgccccgcggagcggacccatgggcctgaggtttgtgtgcgg

SEQ ID NO: 31499 - DNA, 2300 bp, Homo sapien
ttaggctttacgatggtgatgttatcgccaggagcagtttggggagggtcagaatcctgtagcctcccgctgcgtgactcttcaaccgtagtttctaatcttgtggctaatctgttggtcccacaaaagcaggctaatccccaggaaaggtttcctttgggaaagggctgttatcatctttgttttaaactaagttcctcccacagttcaacctgcgtgcagcagtaaacaaggagggcatggaggttagaagcaaaatggagctggttatctcactgtcggcaaattttgcaatggcagtttcatagagatgcctgtcctctgggaaaaaagctaataacaggttgtctttttggctgcaggtggaaaactgcatctattaggaagaggtggggctttgttcttacccacaattggaagttctctatggagtaaaggcggtatgtgtgccacctgattcctttccccatgtgtatctggttagggtcggccacgtgagatccgcaagcattttagaaggtgggaggggaggtgggagctggctacaggccaggcgttggcgtggttccgtgagtgtgctccagccaggcccaaagcttctcctgcccagagggaccgtttcctccagcgtgggtcgggtgcttctgcgcccggaaagagcgccagctcctccttcgggtgacccagggagcggggctgcaggcaaaggcgcaggcggccaaaaaggtgccaaccgggtcctgtggctttcagttgtctctgcccacccaattcacaccatctttccccctcagccgcctgtcctgggacttcaggctcagcaccaaacgcagcaaaagtaggtgcacagagagcggggtcagctcacgcagcccgagcagaatggctgtgctgccgccccaggcccgcggccaccgctgtgtgtgtggcaggagtcagccccccagcgtggggccccgaagcccgcggtccttccacggggagggccaggcccgcagggcgcagacgatgggggacaggctgcgccagcgctcgcctgaggccccgcacacaaacctcaggcccatgggtccgctccgcggggcaggcgtcgtgggcccaaggaggccaggccaggagtctcggcctcggggttacgcggcggcgggcagctcttccgctccgctcagggtgctgctaacccacagccaagcagcgacccgcaggaccggcgagaaccccgccactgactccggccggaagagaacgtgcagagatgtacgtcacttccggggcgtggcgtggccgggcgtggccgtcccgcccctggcggcgtgcctggtgccctgttccgcgtctgtgcgaccgtccgtcccgagcgcgcagccgcggcaggtgcggggcgggaccgggggcgcccggggtggggggcgtagggggcgctcgggttgggggtgggacaggggacgcgcggggtgggggaggagacgggacccggggtacgcgggggtggggcgggtgagaggtgcgcagggtaggggagtagggggcgcgcggggtgtggggctggaccaggggcgcgcggggtgggggcggtgggaggcgcgcggcgtgggggttagagggcgcgcagggtgggggacgggaccggggacgcgcagggtggggggcgggaccgggggcgcgcggggtgggggcgggaccgggacgcacgcgggatggcggagtgggaggcgcgcggggttgggggtgctcctgcgtccggtgtgcaccccatggcccccgccagggagaccgagtccgggccaggggccggaatcgcggggcgcgggccggggctggggttggggttgggatcgggatcgggatcgggatcgggatccgggttccccgcggcttcaagttttctctcgctgttacgagggcgtgggaggcgcggccgtggggtggggtggggccaggtccgcgatgtgctcaccctggtctctcaggaccgttgcctttgcggctattttttgtgcaatccccgaagcctgcgtttcctgctgcctgggttcggggcgggggcatcgcgcaggccagaacggcccctgcgtccgtaggccagagcccctgccatcagcccctttagggtgctcgccggctgtcgggtgtgggggtatgccaggccccggaggactcggcttccccgctaacccgacccgccgcaccccacccaggccaggtcagagcagcccaccatgggatggggagggggtggaggctgcaccccgcgcccacccatccaccagcagccgccggagcgccgcgtggtcaccgtt

SEQ ID NO: 31500 - DNA, 2300 bp, Homo sapien
gctggtggcagctgggctgaagccagcagcttggagatgaggctcaggccctgacgggggaaatcttacccagcctccccagatggctcagagacaggtctggcaggtgcacggatccacaaatctagaagagtctggggttgtcacatccaccaactaggctggctgtctatatacactttgtcactgtgtaggcccaggatttcacccatctacaaattttctctgccacacggctactgccactttaattcaccaagccaagcctttgcactcaggaccctggcccaaccctctttggccaagcaaagaggaaacgagaacaggacagaaaaaaaagtgggaccggaccaggcacctggctgtccattgaggccttgctatgcgatccaggacggaaggtgccggcagcaagctcatacactctagctgcgtgtcatgtcattgaagagggcgcgtgatccagctggaagggtggataaaagtgtaactgcccagtgggttcaccttccctgttacctagacagccaatttatcaagaaagggcatttgcaacagagaaaaggtaattcacgcagagctagctgtgtgggagactggagttttattattactcggtctccctgagcatctggggtttggagtttttaaagataagctggtgggtggggggcagccagtgagtcagaagtacccattggtcaggtcagagatgaaatcacagggagtcgaagctgttttcgcactgagtcagttcctgggtgccacaacatcagatgagcctgggtggtgccaggtgacccaccaagtgctgatcttaggctttacgatggtgatgttatcgccaggagcagtttggggagggtcagaatcctgtagcctcccgctgcgtgactcttcaaccgtagtttctaatcttgtggctaatctgttggtcccacaaaagcaggctaatccccaggaaaggtttcctttgggaaagggctgttatcatctttgttttaaactaagttcctcccacagttcaacctgcgtgcagcagtaaacaaggagggcatggaggttagaagcaaaatggagctggttatctcactgtcggcaaattttgcaatggcagtttcatagagatgcctgtcctctgggaaaaaagctaataacaggttgtctttttggctgcaggtggaaaactgcatctattaggaagaggtggggctttgttcttacccacaattggaagttctctatggagtaaaggcggtatgtgtgccacctgattcctttccccatgtgtatctggttagggtcggccacgtgagatccgcaagcattttagaaggtgggaggggaggtgggagctggctacaggccaggcgttggcgtggttccgtgagtgtgctccagccaggcccaaagcttctcctgcccagagggaccgtttcctccagcgtgggtcgggtgcttctgcgcccggaaagagcgccagctcctccttcgggtgacccagggagcggggctgcaggcaaaggcgcaggcggccaaaaaggtgccaaccgggtcctgtggctttcagttgtctctgcccacccaattcacaccatctttccccctcagccgcctgtcctgggacttcaggctcagcaccaaacgcagcaaaagtaggtgcacagagagcggggtcagctcacgcagcccgagcagaatggctgtgctgccgccccaggcccgcggccaccgctgtgtgtgtggcaggagtcagccccccagcgtggggccccgaagcccgcggtccttccacggggagggccaggcccgcagggcgcagacgatgggggacaggctgcgccagcgctcgcctgaggccccgcacacaaacctcaggcccatgggtccgctccgcggggcaggcgtcgtgggcccaaggaggccaggccaggagtctcggcctcggggttacgcggcggcgggcagctcttccgctccgctcagggtgctgctaacccacagccaagcagcgacccgcaggaccggcgagaaccccgccactgactccggccggaagagaacgtgcagagatgtacgtcacttccggggcgtggcgtggccgggcgtggccgtcccgcccctggcggcgtgcctggtgccctgttccgcgtctgtgcgaccgtccgtcccgagcgcgcagccgcggcaggtgcggggcgggaccgggggcgcccggggtggggggcgtagggggcgctcgggttgggggtgggacaggggacgcgcggggtgggggaggagacgggacccggggtacg

SEQ ID NO: 31501 - DNA, 2300 bp, Homo sapien
gaaaagaaaaagggacagcaagccaacatgcctcagaaaggctttcggcctccatcaaaccaaacggccgggcggcaagttcactaagaacagcacatcagaaagcacgagtggcttctcctgcctctggggacgctgtagggcacaggccccaaagcggggtcccctcacataccggatgtgattggcctctgtcgaagttggggccctcagtctactcgcccagcggagggagaggctgctctgctgccacgtggccacatcctctctagcagacaccacgagcagttccgagttcttcccaagcgctctgaaagggtgcaccagagtggaacctgaattccaagtgcgacaggacagagatggcctgaacattactgggctcccagcaggctctgcggcaccgagcctgtggaagttcaccctctaacagacgcacaccgatttttatgtttctgggttgtgccagacactgagggtttcagcgtgggcagggacacctcaggggaggggaaaagctttggcagggggcgcggtgagagccaagtgcctgatcctgcctgagaggcctgctggccacagacttcctggggcctactaggcacacatggggctgatgaggcgctcaggccacatccgggaacagactgaagtccctgcccctgtcggggagacaggcagtgcacagcacccagaggagcaaatggaccagacagaacacgagaaaggaaagtggaggggcaggagggagacaggagagtcagtcgggggtgacggtggagggcgggagaggcctgaggggcagacgtcagcaaaggcctgtaggacgcaggagtcaattcactcgccacggagaagggcaatccaggccgagggtgtggctacacggggaggggtggagagtgggtacagtggggcagaggtgccgggccaagcgagaggggaaggcgtgggtcaggccccgccccacacttccccaaagccgagatgcccaccccttccttgactccacctgtgcccagcctgttccgtcacagcccttcacacgtgggactgcagctatctacaggtggctctcccggaggcagggagcatgtgggcggccgcgcccctctggcgcccagcaccgagcctgacagacaggagccttgggaggcaggtggtggcagaatgggagcactgaaccggaagagtgggccagacccctcttggaagggactctgctggtggtgtgaatgatgccacagcacctgctcctcaggtcagtcccctggacatgcaggcgcttagcactgcacggtgagctggaaatagaggacaggggtctgagccttgaggtccaacctctggtcaggctgggagaggcgtccacagacatggaagagctcaggaagaggctgtgcagctcctcaccccccagagggaagcagcaagtgctgaggaagcatccaggagcagggctggcatcaggggaagggggaggagcacaggggctggggtgagggcccaggagggcagccagtgtgcagactgctcctcatcccaacactgctcttgccgccctcgctcctgaattcagagcgttaagagaagcgacacagcagcgcggcctgtgtgagctgcacgagaactttcacactgccttgtcgtcacgtgagaaaaagtaaaaagttaagattgattttaacaatagaccttatctaaccccaaataccaaaatattatgattttaacacataatacaaaaaattaagatattttaagtatttctgacactaagtcttcgccacttgggcatatgtcacaggtagggtacgtctcagttcagactctggcccctggcaaccacgctggacagcacaggtcaccggtagcactgcttttccccatgtggcgcgtgcacacgctcacacagagggacagacagtgcggcgggtggcaggttgtgtgtttcctctactttcgcatattctaaactttctacaatgagtatgaactacttaaaaaaattctaaagtataacatatttgtaggaacctccctcaaatcaactcaccttggcttgctttgtttggagttgctatgtaaagaatcccaagaagaaaattaataagctcaggtataaacctctgggacaaagccacatactccaggaacaggcagcacacgaacaggcccttcaccacgtcctggagggacaggatggggcactggaaaggaacatatggggggttactgtcctgggacgatgtcatgccatgctaggccgaccaccgggcttccctgatgaaccacgcacc

SEQ ID NO: 31502 - DNA, 2300 bp, Homo sapien
tctctactgaaaatacaaaaattagccgggcatggtggcgagtgcctgtaatcccagctactcagcaggctggggcaggagaatctcttgaacccaggaggcggaagtttcagtgagctgagattgcaccactgcactccagcctgggcaacagagcgagactccatctcaaaaataaatatatatacatatatataaatgttaaatgtgcagtatgttttgtgtttttgatagcccctgaatcctatgaggaactgagatctctgttgttaggaagatcgatggaagagcagcttttggtggtggagagaattcagaagtgcaaccacccgagtctcgcagaaggaaacaaagcaaaattagaagtacgtggattgagtgtgtgtggagcgctgggagtgtcagcatagccccgtatatgaatgccagaattgtgtgaagttgtgcaacggccatgtgtgcctcaggccagatggggccagcccgtcacatggttacctatgatgatggctgggagtacttggtatggcaccggcagaggcctcccttggctttggcccctctctaggcctcgtgccagacccagccagaggcaggcatggggaccttcaccttcatctcacaggggaggacactagggttcacatagccagcgtgtggcagagccagactttgctgtggcagataggtggctgtgatcgtgcctctttcagtgaatggtggatattgcctgtgaggaggacgccgtgctgcccgtgttcctcgtcgtgctttcctagtggtgtgttgtcagctgttctgtagaaggatgcgccttgcccttagctttctcccccctacaccttctagtgcttagcaagttctagcagtgtatttgcttacattttagaaggctgctcgtgtctgtcaccctgggctcccctgccccacctggttgtcaccagaatgtacgtgatccagaagctgtgtgcctgtggctttgttcttggtgctgagcactgagctttatttcccaattcatgttcctgcagaaactgtttggctttcttttggaatacgttggcgatttggctacagatgacccaccagacctcacagtcattgataagttggttgtgtaagtaaaaatggtgtgtcatctgggatgtggggttaagcagaacaatttttctcccatttagagtcataaaaatacattccagagttactaaggtaggtggaatgatggtgtcagcatgccaagtgggcaggtggtcacccagggcttgtgagcctcacagcgcaagccggcttctcacacgtgccgctccagccactgtagagctgggactgacttttaaccacaaacaagttgattttgaaacaagtgaacccctttagatttgtggctgggatggggtggctcattgtaagtttcaagctctgggtgactgagcggtatttggaaagcacggtagacaccccgcccctcacccttcagtgaaacccagttgggtggctttgcatgccagggagtgtgtacctcttgtctgcatggggaccgccagggcgagctcctgccctcgttgccctctaaggctgtgtgacccactcagtggctcctggcccccagggctggtggctggaagaatgccagaggggcagagtcctcagttgagaggcgtgtgttggcttcggatccatgagagtgcacaccagcttcctgccctgtgccgcgcggagctctccacgtcatcttctgcatgcatggaggcactatcaaagaagtacctgtcgtgaggaataaatgagttaatatggaaagtgccttggagctgtcagctgcagctgccacacagagtggtgcccccaacaacgtctgtaccacaaatcgagctgtttctcccaccacctccagtccataatgttatggccgagtttttaggaaatggcagaagtgagtgtagactcttaagaatgctgttagaaaaagcggattcatccagttcttacttgctcagtcaacaggtgactgcataggaaagtggcttgcagggcttttctgtgtttcttatctaaagtcattctctcctgactttacatttctgcttaacaggcacttatatcatctttgccagatgtttcctgaatctgcaagtgacgctatcaaatttgttctccgagatgcgatgcatgagatggaagaaatgattgagaccaaaggccgggcggcattgccagggttggatgtggtaagcagagttcagtctaggcactgcccctgccacagaagttctgtttggcatcacagaaggtggacg

SEQ ID NO: 31503 - DNA, 2300 bp, Homo sapien
ttcagggtggacacgttagaataggtgtctgaacttccctgtgacatgtttgtctgttgatacataatacatacatttaatatacatttacttatttttgcctctgtaaacagttgtttcctactgcattctctttagtcgaaactattggaaaatgctgcatttgtttaagaaactgcgttctcagagaagtctagatcccagcagattagtgtcatgtggtcatctgtgcatctttgtcagtcagccttgatgttaccgttactttacttagtttcccacgtttagggcgtaatgcctggataagtagcgtttttgttgttgtttgagacggagtctcgctctgtcacccaggctggagtgtagtgcaacctccacctcactgcaacctccacctcctgggttcaagtgattctcttgcctcagcctcccgggtagctgggattacaggcgcgtgccaccatgcttgactaatttttgtatttttagtaaagacagggtttcaccatgttgggccaggctgatctcaaactcctgacctcacgtgatctgcccaccttggcctcccaaagtgctgggattacaggcgtgagccactgcacctggcctgttttcgttaaagcagatgtattctgagaatttttctaggggtaaacaaattctttgtgaccgaatgtccactgatttcgcaatcctcagggcttatcagaacagttttctctctagaagaaaagacgtagatgtggcttagctacttcaataacattatctagccattactagaatgtgccaggaagctagatcttttctttttgtaaaataagaaataaatatatttttaaaatgaagaatttcttctttctaccttagcccgatgcatatgacatgatggttcgcgagcttggctttgaaatgaaggcgcagccctctaacaggatgaagacggaggcagaattggcaaaggaagagcaggagcacctcaggaagctggaggtagggtggcagcacctcaggagcagggctgtgctgctgtccgtccacagccccttctgctccattttgcaggatgggctgaagagaatactctgtttgatcagtggaatattttagtctatttaaagtttatatttattcatgaatacctttttttttttttttctttgagacagagtttcgctctgtcacccagctagagtacagtggcacaatcttggctcactgcaaactccacctcctgggttcaagtgattctcctgcctcagcctcctgagtagctaggattacaggcgcctgccaccacgcccggctaatttttgtatttttagtagagataggatttcgccatgttggccaggcggtcttgaactcctgacctcaggtgatccagtcacctcggcctcccaaagtgctgggattacaggtgtgagccaccgcgcctggccccagctaattttcaaaaattgtttgtatagatgagcatctccctatgttgcctaggctgttctcaaactcctggtctcagctgatcctcccaccacggcctcccacagtgctggggttacaggtgtgggctgccatcacagctggctcagctggctgttttgacataaccacatcactagcttcttcccgtgtccagtgtgtggtcaaatagtggaggccgtggagctgcttgctcttggcgtcctggctcctattctctcggtgcagggggtgatgagtcccagtcggggctggccagcagaattgggctgtgaaggcctcagaataataggcttgcctggtgactggagagtattggccacaaagtttgaacagttgattttgttaaatgaggaatgtgctgcttagctagtgtttgcatgcctgattgaaaactgcaggcagaaagcaggctggatgcaccagcctcagagctgggaggaccgtaggcccagcccgctgcccagggcaggactgcacggccccctcaccatatgttggaagagtgtgctctaagacatctcattccttcctgctcaggctgagagacttcgaagaatgcttggaaaggatgaggatgaaaatgttaagaaaccaaaacatatgtcagcagatgatctgaatgatggcttcgtgctagataaagatgacaggcgtttgctttcctacaaagtaagatgtttgccttcattttctctttctctctctttttttaatttaaaaacatttttttggtattcattttagggatttattacagttgggaattttaaatctttttaaccagtttctctaaagttctttatctgggtgtttat

SEQ ID NO: 31504 - DNA, 2300 bp, Homo sapien
ttgctcttttcattgttcaagacttctcgtggacccttagctataaaacgcattccctggggagatcctaattccccgagactggaggtaactgccttggtgtgagttgggcgagtggccttcccctcattgccaggaggcgctgtggcgcaggtgactagagggggcgccgtggcgtgcaggtgactagagggggcgccgtggcgtgcaggtgactagagggggcgctgtggtgcaggtgactagagggggcgccgtggcgtgcaggtgactagagggggcgctgtggtgcaggtgactagagggcgccgtggtgcaggtgactagagggggcgccgtggcgtgcaggtgactagagggggcgccgtggtccaggtgactagagggggcgccgtggcgtgcaggtgactagagggggcgccgtggcgtgcaggtgactagagggggcgctgtggtgcaggtgactagagggcgccgtggtgcaggtgactagagggggcgctgtggcgtgcaggtgactagagggggcgccgtggtccaggtgactagagggggcgccgtggcgtgcaggtgactagagggggcgccgtggggtgcaggtgactagagggggcgctgtggcgcaggtgactagagggggcgccgtggcgcaggtgactagagggagcgccgtggcgtgcaggtgactagagggggcgccgtggcgtggaggtgactagagggggcgccgtggcgtgcaggtgactagagggggcgccgtggtacaggtgactagagtctccaggccctgcccagggaggtgggagggacacagattgcaccactgatcctgggcgacgctcccaccaagaccctggagtcagcttgctctgggtttgccagtcttcgctagaaccagcacaatcaaaaataggtgctgggtgtttccagccacttgggttacggccagttgggagtgtaatgggtctgggttttctcagagtggcttaccttgggtatttctcaagtgccattgtgcctgtggtctcaggccaggctgttgcgtgtgagcatttttttctcaaatgtggacttttccagaccactatgggggaagcactggcagagtgctacaggaaacacttcccacgccagggctgggcttcactgtggggttttctgccttttgcccccagctgagctgactgctgcccactttggaggaggcggtgggctccttcacaagaagactcaacaggaaggcgaggagcgggagaaaccgaagtcccggaaagagctgattgaagagctcattgccaagtcaaaacaagagaaggtgggttagtgagtgttcttgatcatcttctccacggtaagacaggctcaccaaaatgtgtttgagcttttttttcctgtacctttttaggctgtgtttaatattttatatgagttcagtaaaagcatttattgtgagtaggaattttaaaaatcacataaagcatatacctcggacaggttttggttcttttgcctttttttggtttatgttttgttttattttgagacgtagtctctgtttcccgggctggagtacagtggcacgatcaaagctcactgtggcctcaaactcctgggctcaaggatccagtgatcctcccacctcagctccccaagtagctagtgggcgccaccatgctcagctaattactttttgtagagatggggatcgtgctgtgtcgaccaggctcaagcagttctcccaccttggcctagttctaaagcacagggtgggccactgcacctggcgcggatgggttttttgttgttgctggttttagtatctgacatgtgcccaaaaaatcacttttttattcatttgcagtgaactgctcagagcatctaaattaatggtttatggcaggaaaagatttccgtctgatgagatttggtagctttgcatttaaaatactcatttctcctggcctcttttctgtgttgaaacgtttggtgccaactgagtgatcactgtgtgtgtccttggcactgacattgggcctctgggttgaagtccagtagtaacggtatgtggtgtgtgtctgttattttttccccagagggagagacaagctcaacgagaagatgccctcgagctcacggagaagctagaccaagactggaaagaaattcagactctcctgtcccacaaaactcccaagtcagagaacagagacaaaaaggaaaaacccaaggtgggagccaagtactgaaacaaactcttcactcactgagcttgggtgaccgactttctccagagaaagggc

SEQ ID NO: 31505 - DNA, 2300 bp, Homo sapien
ccacatgaaaagacccaggcctcctgcgccggcctcacggcccctacacgcgttatcaagcttggagtcaactggacgacctgctgtccctcagacagctgtgagtgccacacttcaccataccgggacaatgtgcctttgcatgtgtgtcctctgcccaccctgggcccatgaacagctcactccccttgcaaaacttgactgtaactccctctagaagaatttttggactttcctaactattacactttttcctgaccgggatctcctaaggcactcaggttccatctttgatttcttcaaatatttgtgtttcttccaagggccaagcattggagatccaaaaaggagcagcaattcccgtccccgtcccaggccttcagcacagggcagggaggtggatctgctcaataccagaagtttgagcaacctgtcctatttgggttacatagcttgggtggtgaacctgagctggccctttagagactttcggaggtaaggcagaccttttggacaaactgagttgcaagaggcgaagcaaggacaacagccagactgtgcgggactcgaacgacaagccaagaaggttaagaataacagtatttagagaacacttgctgtgtgctctatgtgctatcttacttaattctcacaaaccaccacgaggggtaggatgtatactatcatctctacttttgaaatgagaaaactgaggcttcagtggtgaagacaaatgtgtctcttctagggaaccacactaccttattctcccaccccggcccgggggtgtgtaatgagggactcctatcgaagtcagctgtaagtctatcttgcctattcattatacaggctgtcgtcttcgcgcagtaaggataatatgtgttttgattcaaagaccatccagcttgcacactgtgatgaacagagatcaggagctcatgaaggcaagggcaagtcttatttacctttatctccccgaacctagaagcgaggtcaaacagaagcgctcggggtagcaagaaggctttgtagatattgaaatgtgaatgcatgcccagcccttaccaggtgcgtgaccttaggaaatgcacttgtcctttctgtgccttaattttttcaccaacctgctaatgtatgttcctcagtgaaaatttaaaaaaaaaaaagttaaaaaaactaggaagcaatgagtttccatagagttacttcccaaggaacaaggttacgcgcttcgggagagagccgatgaaacatcaaacgcagcatcctacacagcccctatccaccgtccccaaacctgcagagctcaaagtaaacgcggaagggttaacaagcagcttggtccagggcgccgcccgaagtgactgactcggcctgacccggttggaggagtcgccgaaataacacgagtgcagggtctccaagacggcgagagtttccaggtcactccagctcagagaacagcagaggctttcggactatcaagtcagtgccgtgtgcctgtcacggcctgtgccgctcaacgaggaaaccgacgcaccgagaaggacgcagccggccgagagcagcgtggggtccagatcctgccttccggctccccgtgcgccccccgcttaccttcctgagggcccgtgcgcgagacaccccgggcagtcccacgtcgtggcgcgtcttccggcccaggatctggaacttctgcctgttaactttcacctcgaacggattggagttggccttcgccgggccccctcgcgctcccgccggcgccccggaggccttccttcgcgccccgaccttcttcgccttcgccatggcgcgcgccccgctgcgcccaagggcccgagacccgaagagagacaggcgcgcgctaccctaagacacgtgccgggccgcggaaccgcttcctcgtctcgcgagaacagcgcagcacctccgactcgcgagaagtaaacaccgcgcccgcaggctcggcttactcgccgataggctcagcgactacaactcccagcaggccacgcgccgcggcccgccgtgtactcttggcgcagggccttctgggagctgtagtgccccggccgcggcggcgaggggcgctccctcttcagctaagccgttagcgccgagcccgcccgggagcgggtcgccggccgcggcgggcgcccctgccagtgagcccctgtccgaagtgagccacggcattgactcggggctgcccgggggcagggcactgaggagggagttgcgcgcgcgaggcgagggcgatggggccaagaagaaccggggcgatagcgcggcagcgg

SEQ ID NO: 31506 - DNA, 2300 bp, Homo sapien
cacagtccgagcagagctgctccatcacgcaaggaaatagaggaaatcagcaattccgtaagagtgacggggtgtgaagaactaccgtggctagcacagggacttgaggtccgaggctctgtcgccagctctcttgagacgcaggcaagggagacatgaggtccgagacagaggattgcacagaggattgtgggggtctcccgctgaagggctggaccaactgatgcttttgtggcgggatgcagaggactagagagaccagcatgggtgaaaacaggaggatatttatgttaaggtacgcaccagctcagtggattcacatccaaaaagctgagccttgaacaaagactaagcaggatttttataagcaaacttacagaagcaaaacaaaggcagttaatcatataatgacaggtcacataatctatagcataactgatgacttggcataacttgtggccttgcatagctggtggccttgtagctgcgttgaaagaaaaaaccaagaactggctaaacacagatatttgtcctcttttttttttttcttcacccctgctctggaaggggggtgtctggagcctattcctttggattcgacttctcaaacagaacagcgttatcttataactgtccttaaagtgagcttgctaagcaaaagaaaacttgttcttcttttctttttaacccttgccttgccacattctgggccttggctttttcttttcttggagtgaatgaatgcagtacttattactatttttaaatttctgcctcactttaataatgataaaaggctgaatttttgccaacttgtccatctgtgaccacgtcgtgctaaagcacacttgacacaccatagagcctcagatcaaacctcaaaaccaagcagctatgttaaaaataacattgccctacaatcattatcggaaggttctcgcccagagtagttcccaggctgctattctttgtcccccttaagaccataaagacgccgttcttttttggtgggacaggttgtccaacacaagcaggacactgcctgccgcatcctgaagcaacactgtcaccgaggtcacaccgagaggacaggacaaggacacagggcaagactaagaagagcaaagcgcagacttctctcatctgggccaggagatggggactgggacctggcccgggcagcctgaccacactgcacagaccccggctccggctccgtgcagatctgggttcccccagtgggaggtgtcggggctctccagggaaatcggggttctccggggatgtcgggttccttcaggggggccagggttccccgggattcggggttctctggggggggggtcgggggcgcctgccgcgcacccaccttgacgcgctttcagcagcagcgagttggccacgatgttctcgagctccatgtcctggcgccgccgccgccggcggattctgcgagaccgaggagactgaggaggcggaacaggaggagacgccgccgcccccgtgcatagctcgccgggcaccaccctctcctcgagctccggacacgatcccgggaggctgctccgccgccaccactgccaccaagggcgccgccgccgccgcctccgcaggccctcaccagcaggggagcggtcggggcgaggggagggggcagcccgaccgcggcgggtcccagctgtcaccgctgccgcgctatcgccccggttcttcttggccccatcgccctcgcctcgcgcgcgcaactccctcctcagtgccctgcccccgggcagccccgagtcaatgccgtggctcacttcggacaggggctcactggcaggggcgcccgccgcggccggcgacccgctcccgggcgggctcggcgctaacggcttagctgaagagggagcgcccctcgccgccgcggccggggcactacagctcccagaaggccctgcgccaagagtacacggcgggccgcggcgcgtggcctgctgggagttgtagtcgctgagcctatcggcgagtaagccgagcctgcgggcgcggtgtttacttctcgcgagtcggaggtgctgcgctgttctcgcgagacgaggaagcggttccgcggcccggcacgtgtcttagggtagcgcgcgcctgtctctcttcgggtctcgggcccttgggcgcagcggggcgcgcgccatggcgaaggcgaagaaggtcggggcgcgaaggaaggcctccggggcgccggcgggagcgcgagggggcccggcgaaggccaactccaatccgttcgaggtgaaagttaacaggcagaagttccagat

SEQ ID NO: 31507 - DNA, 2300 bp, Homo sapien
ctcactgcaacctctgcctcccgggttcaagaaattctcctgcctcagtctcccgagtagctgggattacaggcatgcaccattatgcctggctaattttgtatttttagtagagacgggggtttctccatgttggtcaggctggtctcgaactcctgatcacaggtgatccacccgcctcagcctcccaaagtactgggattacaggcgtgagccactgtgcccggcctgttttgtttttttttttaatttaggattttttccctgtataatattatttgttaagcaacttataacttttatgctttaaataagcttaaattatttcacatcatacttctgaggagactttaacaccgtcttatctcttggagaaattgaaaacaaatgcagagaggaatacgtaatacgtgcatttaatgtgggttttggtcttatatattgcaattctgttctgatttcaggctgcggtgttattgagcagtttctttaacacctgcagcatggttaatatacctgttattattaatgctgtctcttgctgaggcttcctccctagaacttttgctaacttaagcaaataggaaatttatggagaagatattgggtagctcaaagaatcaaagtaagaacctaacaatcagtctggaaagaacaggatgtgggactcattcattcatgcattcatttggcagatgtgtgctcagaatgttccaggtactgttcctatagcaataaacaacatgttcagaaattcctgccattctggagaccacattcttataggggaggcagtcttgaggcacataaataagacgtgtggcatattagcaagcagtgagtgccacgggagactacagcagggatgggggtaggaagcgcccaggtggcattggtagttgcagttttggatagttttagacagggggctgctgattgataatcaggtctccacggtcactcctgtgacagagcaggtatctttttattttatttatctgattttgcctcatgaatttcatgattcttatcctgggagagagcaccaattggctggcttggctctggcccccttcctgcatccgtggctaagggggaaccaggcagctggaatgacagtcccaccaagacatacaccgtgggggagaagtaagggaagggctgcagaagaaaccaacaaagggccattgcaagggcctgtttacatgacatagtaagcaggcataggccatatgcgctagggccagaggggtagctaggagaacggagaggaaagaggagatcagagagatgctgaaggtagaagacactggatagaggagcgattgcagagaatcctcaaagttgcctttgaaattccctagctgaggaaattaaaagactgctctttctagtcttgaactcctgacctcaaatgatccacccgccttgcccttccaaattgttgggattccaggtgtgagccactgtgcctggccaaattttcttttcttttcttttctttctttctttcttttctttttttttttttttaaagagagtttcgctcttgttgcccaggctggagtgcaatggcacaatctcggctcaccgcaacctccgcctcctgggttcaagcgattctcctgcctcagcctcccaagtagctgggattacaggcatgcactaccacgcccggctaattttgtatttttagtaaagatggggtttctccatgttggtcaggctggtctcgaactcccaacctcaggtgatccgcccacctcggcctcccaaagtgctaggatttacaggcgtgagccatggtgcccagccttttttttttttaaagacagggtctcactctgttaccccgctggagtgcaggtggggaaatcatagctactgaagcctcaaagccttgaactctggggccaagcagtcctcctgtctcagactcccaagtggctgggaccacaggcatgcgctgccatgcacagataattttgtggtttttgtggagatggggtctcactatgttgcccaggctagtctggaacccctggactcaagtgatcctaccctcccacttcagcctcccaaagtgctgggattacagggtgaaccactacacccggcctattagaattttcaacagcatgtaagatcaagttttctagaaagagttataaacttagtatttcttatctgtcagatatttgaagtaatctatgtagtagtcagccaaattatttctctgccaacaaaaggttaccccattttccctaagcaataatgtctaccgtctgttactatcatta

SEQ ID NO: 31508 - DNA, 2300 bp, Homo sapien
cctagtcatggggtgacattccatcacctttgcccattggttagaagcaggccaccaggtacagcccaagctcacggggaggggtcatacaagggtgtcaataccaggaggtgaggggtgctggggccatcttatgagtctgcccactgaggtaactaacaaccttgaggcctgacacagtggacaaaggcccttattaacagcagagaactgggaactttatttatttatttatttttgagacagagtctcactcttgtcacccaggctggagtgcaatggcatgatcttggctcactgcaacctccacctcccaggttcaagcaattctgcctcagcctccggaatagctgggactacaggcatgcaccactacacccggctaatttttgtatttttagtagagacagggtttcgccatgttggccaggctggtctcgaactcctgacctctggtgatctgcctgccttggcctcccaaagtgctgggattacaggcgtgagccaccgcacctcgctggaacttaatttttttagagacagtgtcgctctatcacccaagctggagtgcagtggtgcaatcctagctcacttgcagcctcaaattcctgggttcaggtgatcctcccacatcagcctcccaagaactgggaactaacggctgtttctctgctgtccttctcaagaaaagggaggctactgctaccccactggggacaatgctgggtttccctttaggacaggctctgagacaaggcggaggtgctgtttgtggccacagagcaggggactctgggttgcaggtgtggcctggctaaagtaggctttactgggctcctctctgcctgcatcaccccccggctgggcggttgtctctgaggccaaccttactccctgctgggcaggctggacagctgccctctccgtttgcccctctaccacccaaaaggcaggaggctctggagaccaggaccctgcccgccacggcctgtgtcccaggcgtgagggggtgccccacagacctctgctgagctgctgctgaatgacgccccttgggggtcctgccggaaggtcagagcaggggtgcactcccataaagaaacgcccccaggtcgggactcattcctgtgggcggcatcttgtggccatagctgcttctcgctgcactaatcacagtgcctctgtgggcagcaggcgctgaccacccaggcctgccccagaccctctcctcccttccggggcgctgcgctgggaccgatggggggcgccaggcctgtggacaccgccctgcaggggcctctccagctcactgggggtggggtgggggtcacacttggggtcctcaggtcgtgccgaccacgcgcattctctgcgctctgcgcaggagctcgcccaccctctccccgtgcagagagccccgcagctggctccccgcagggctgtccgggtgagtatggctctggccacgggccagtgtggcgggagggcaaaccccaaggccacctcggctcagagtccacggccggctgtcgccccgctccaggcgtcggcgggggatcctttccgcatgggcctgcgcccgcgctcggcgccccctccacggccccgccccgtccatggccccgtccttcatgggcgagcccctccatggccctgcccctccgcgccccacccctccctcgccccacctctcaccttcctgccccgcccccagcctccccaaccctcaccggccagtcccctcccctatcccgtccgcccctcagccgccccgcccctcagccggcctgcctaatgtccccgtccccagcatcgccccgccccgcccccgtctcgccccgcccctcaggcggcctccctgctgtgccccgccccggcctcgccacgcccctacctcaccacgccccccgcatcgccacgccccccgcatcgccacgcctcccttaccatgcagtcccgccccgtcccttcctcgtcccgcctcgccgcgacacttcacacacagcttcgcctcaccccattacagtctcaccacgccccgtcccctctccgttgagccccgcgccttcgcccgggtggggcgctgcgctgtcagcggccttgctgtgtgaggcagaacctgcgggggcaggggcgggctggttccctggccagccattggcagagtccgcaggctagggctgtcaatcatgctggccggcgtggccccgcctccgccggcgcggccccgcctccgccggcgcagcgtctgggacgcaaggcgccgtgggggctgccgggacgggtccaagatggacggc

SEQ ID NO: 31509 - DNA, 2300 bp, Homo sapien
ggggctcagaacaccccgctctggcagtaggtgtcccccacccccaaagacctgcctgtgtgctccggagatgaatatgagctcattagtaaaaatgacttcacccacgcatatacataaagtatccatgcatgtgcatatagacacatctataattttacacacacacctctcaagacggagatgcatggcctctaagagtgcccgtgtcggttcttcctggaagttgactttccttagacccgccaggtcaagttagccgcgtgacggacatccaggcgtgggacgtggtcagggcagggctcattcattgcccactaggatcccactggcgaagatggtctccatatcagctctctgcagaagggaggaagactttatcatgttcctaaaaatctgtggcaagcacccatcgtattatccaaattttgttgcaaatgtgattaatttggttgtcaagttttgggggtgggctgtggggagattgcttttgttttcctgctggtaatatcgggaaagattttaatgaaaccagggtagaattgtttggcaatgcactgaagcgtgtttctttcccaaaatgtgcctcccttccgctgcgggcccagctgagtctatgtaggtgatgtttccagctgccaagtgctctttgttactgtccaccctcatttctgccagcgcatgtgtcctttcaaggggaaaatgtgaagctgaaccccctccagacacccagaatgtagcatctgagaaggccctgtgccctaaaggacacccctcgcccccatcttcatggagggggtcatttcagagccctcggagccaatgaacagctcctcctcttggagctgagatgagccccacgtggagctcgggacggatagtagacagcaataactcggtgtgtggccgcctggcaggtggaacttcctcccgttgcggggtggagtgaggttagttctgtgtgtctggtgggtggagtcaggcttctcttgctacctgtgagcatccttcccagcagacatcctcatcgggctttgtccctcccccgcttcctccctctgcggggaggacccgggaccacagctgctggccagggtagacttggagctgtcctccagaggggtcacgtgtaggagtgagaagaaggaagatcttgagagctgctgagggaccttggagagctcaggatggctcagacgaggacactcgcttgccgggcctgggcctcctgggaaggagggagctgctcagaatgccgcatgacaactgaaggcaacctggaaggttcaggggccgctcttcccccatgtgcctgtcacgctctggtgcagtcaaaggaacgccttcccctcagttgtttctaagagcagagtctcccgctgcaatctgggtggtaactgccagccttggaggatcgtggccaacgtggacctgcctacggagggtgggctctgacccaagtggggcctccttgtccaggtctcactgctttgcaccgtggtcagagggactgtcagctgagcttgagctcccctggagccagcagggctgtgatgggcgagtcccggagccccacccagacctgaatgcttctgagagcaaagggaaggactgacgagagatgtatatttaattttttaactgctgcaaacattgtacatccaaattaaaggaaaaaaatggaaaccatcagttgttgctgtgtgaggcttgctttgcttcatgagaacctagaccttgctgagctggagtcttaggaagcagtctcctaagtgcttctccagcaggggcagaaactgtcccaccagctaacatctggcattatggagggtcccccaggcagctgccagcagggacaggccccgtgttttctgtagccagggatgaggaagtggccccagggcatgggcctggctgggtgcttctgcaagggccttcccaaaccacagtacaggtggtcttcctgccctgcagatgggagctgtgggagctgctggagctgctggagccttcatggtcaagtgacatcataagcttatatgacatacacaagcctcaggacttggcccatggcactgaagcaggtcatcaggcccagcacagagactagagctgtgttctcacagggcccaccacccttccacctccttggccattgacacctgcgtccctggcccagctgctcccaggtaacccccaaagcagctggcacatcccacctctggtgtggccggggctgctgtgtgtccgcagggcctgccccgtctattctagcttgtttgtcctgtctgaaccagcgc

SEQ ID NO: 31510 - DNA, 2300 bp, Homo sapien
ggcagggccctgcctccctgcgcccactggaactcgggcaggcaggggtgtaggtgcctcctctagagccgtccggtgggggcccccggcagtggtggtggtgtccactggccagcagctgccccttcagccaggacagtaggcctgacgctgtccccagcagctccaaggtggatttgtggaagggggtagagggcacgtagaggccccatgacctccccagggttctgggagggctgtgcccccttagccagcaccatgctgggtgatatagtcagatcctgttacccctgttgtggaggtgaggaaacaggttagtggggaggacatgactaaggtccatgctgagtcgctagagctgcacccagaaccactgctgggaccccatgcctttctgcttaccccttgtgccgggagatgccaagagatgctgggagccagccccacctctgcccttggagtcatggctacggaaagggcattcggaccggtccctgacctcaccggggagggccgaaccctgttcctgaggagccagggcttcctagaggaggtaggccttctagtcactccttcatctgcaggcactccacagagctctctgtgccagcccccagcacggagggctgaccttagtcgagtggagatgccccagtgccaggcagtagggatgatgtctcctgaggcccagatggaagggactggactagtctcatggggctgatggtggggccaggccttgaccagggacccagtgtagggggtgcagagacccctctgagttcctcacacatccctggggccctccccatacacttcctatcctgactgcgggcaagagggagccccagttcgccttccctatgctgggcacccacagtggggctgggcacccccgccatgcccctgccctgtccttcccctgagagcctcggtcccacctccaaggtgcctcagaggacagcaggggcagcgggcagaggccgagatgcctcctcattccaggctcagctgcccttcttggggcagcccacacctgagagtctcctgcagttggtcaggcctgaggagggcaggggggtgcctgctgtccctctgctgaccacagtggcatttagcctgggcaccgcgcccagcacagtccatgctgcacaggtgccgtgggctccacagagccctgcctgacatgcatgtgttacgtttcgggtgccgatgcccttgggcggcacttctccgggcagaacccccaggccaccgctccggttccggttccgctgcatctggggctctcggcaggctgtggtcctccggccagcctgggggcatctcagtccctcagccccacaggggcctgccccgcagcctgggcctcgagccccgtctccgcacgctgtgccgaatctggctgcccatcagctccctgcgtacccagactgtgccctgccatgcccgtggctcttcccaggagtgccctgtggcctccccctggcttgctgggctgattccctcctgtgtctcaaacagagctcacctttgccatcactgctgtcctcaccggccggtgccagaggcccgtgtctgtgtaccctgtgtctgcacctctgggcagggcctggctctgaccaacccgggcttccagtgtccacagacctaaggcccagggcgcctgggggctggagcaagagaagcaaaaggagccaagggtgggggtttggggttcttgtgagggcccagccccaggaccccaggaccaggacacccaggagccccagggcccagccccagttcagaaggcaggggccttctgagggagcttaagggtcccacagcccaggacccccaccagggccagtggccagcgttgggggactcagcctcctcgtcgctcgtcctctctgtttctcccaccttttgccccctttctccttgcctgttcccacccgaggccccctcttggcctgcgtgagccggggcggcactgaactgggggccgatccgcctgggcggcggtgagaggcagggccgggagccgggccgctgggtttgggcctggcccgctcgccgcaatattgatggcccgtcagtgcagccctgattcctgtgctttcagttaaaaggtttctgttgttgtagcttatgcagttgctctgttgctatggaaacgtgacatcaaaatgacgtttcccgtttaaaagcttttaactaaattcctgcctgtcagatgtaggccccattttgagcgtggagctgccttcgagcgagcgtgagcggcgcctcccgcccatggtgcgtggggccgg

SEQ ID NO: 31511 - DNA, 2300 bp, Homo sapien
tctccccacttctgggggccctggctttcacggggatggactagggtgcttcctcccacagaaacagcttcttgggccacccccctgctgggcatgagttctctcacaggctcggtgacccctcgtatgagctgctcgtcctcttcccctacccctgtccatgaggcacctggaggccgggcaagtgtagaggaaaaagccaaagggaaagaagagacctgcaggtggtgtttccccatctctcactcagggccacttgtccctgccctggagcctcaggaggctgagctctgcggcctgcttccttctggcttggcgctgctctggaagattccaccatctgcgcataggcaggagccaagaaggtccacagttttgggggggccagggtgggggcagtttctttcctggctcttttttttttttttttgagatggagtttcactctgtcacctaggctggagtgcagtggcacaatctcggctcacagcaacctccgcctccggggctcaagtgattctcctgactctgcctcccaactagcttcgactataggcgcgtgccaccacgcttggctaattttttgtattttagtagagatggggttttgccatcttgcccagggtggtctcgaactcctgagctccggcgatctgtccgcctcagcctctcaaagtgctgggattactggcacgagtcaccgcgcctggcctcttccctggctctctctgctgggtcatcaagggctggctgtgtcccttggccataggtcgcagctcctgttaagtatctctctctctttgtctggcttcctgtaaccgctctggccgcgctccttcagccctgcaggtgaaaacagttccctccctgctgttacctgtcccaattcagcaccgccctgtggcttcccggctcccggaccgcgcctctgccagcgggaaccctgctggactcttaattaattgtcccactgagaatgccattggtttcctcctgggatccaaactaatcacacaagactagatgatggagagctgccaagaaaccatggggcggtggcggggacggaggggaagcgttttgagcccatcaaggcaggtgacaggaaagaagcaaacccgagaggggccgagtccctgggcgggcggcagggctggagcgtgaacagcagcgacggatgcgtctcgagggaaaaacgcggcgggagagaatgaggggaaggcaggaaggaaggggcagggagacccagcgccggggaaggaagacacgaagagggcgaggaaggaactccggcctaaagggtgaaggcggcggctgggacagggccagaggcgcaggccggggccgggcagctcctcctctcgtgccagcggtgcctccggtcccgccctcgctgctgcccgcgctccgggaggggcagacccgctggacgccgcagtcaccgcgccgccttcgcgggcgtcccggggcccggagggaacggcctttcctggctgtccccgtggcttcgccgcgggaactcacgccgcccccgaagctgccgccagctccgggcatctgcccagccgaaaagccagggcgccggggcctgactccccacagccaggtttcccgggcacagagacccaacgggagcgggacttcctcggacaccgacggcgaaggacagagacagcccaggcaggggcggctcctcccggccacaccgacctgcccttcgcagggtgtcccgggccagcggaggcagagaaaaccagcttgcgggaacgcagtcgctcccagcaccagggccgggccagtgcgggtacacaccgtgcgcaccagcgccgccgcgcccccaacggaagtcccgcccccggccgtggaggccccgtccctcgcttcttctcatccctgcttccctggcagtcccgttaccacgctgtcccgacgcgaaggccctcgccccgccccgtgccccgcccccgcatcgccccgccccaaccccacccccttggccccgcctcaccaggttcgccccgcccctctccgtccccgcccctcctccggcctcggccccgccctcgcctcgaccccggggggcggtggctgccgaggcgaccgttgcgcgcgcgggcggtggcgcgggccgaagcgcccggagcgggagcgagcggcgcggcccggtaggtgtgcggggccggggccggggcgggggcagggcgcgccgcctccgctctttctttcgtctccggggcgcgcgcccgcgccctccgcctcccggccgatcccggccagccctgcgcggcgcccgtcccctc

SEQ ID NO: 31512 - DNA, 2300 bp, Homo sapien
ggggaagttggagcttcctggccttgccccagacttactaagtcagagtccctgggaggtgcaggggcttgggagcaggcgttcttactggtagccccgatggtgtaatggaagttcagctggaatccagtaccccatggtcttctaaatttcactgtctgttctgctagctttactattaattgatacagttttaaaaaaaattaaactataagctgaacttatgtgattattttgggaggccaaggtgggaggattgcttgaggtcagaagtttgagactagtctgggcaacatagtgagacctcgtctacagaaaaattaaaacattagccaaggttcactgggtgtcttctccttggcccctttgcccacgtggtgaacactgtggacctgtgagggtgtgagggttgcgttcctgcgttctggactctttacccactactgagaagcagccgtttgaaatatgagttggcaaggaagatcagcatgtaggcttagaccaagacggtatgtgcagcctcctgagctaactgggcctgtgcttgagcccagtgatgagcagcctcagcaagaggaaccaccacctgaaagtcggggtcttacctggccaggagagagaggaagatcacggtgctgctgagattcttgtgcttgaccaggaagctgatctccgggagctgtctcaaagactgggatgaatgtggagatggtcctgatgtccggggaatattctgccgaaatcagagcaatttaaattgccagaaggaggtgaagggcaaccacaggttccaaggaagacaagctgaaacaatgcaaactggttttatattagatacgtgacttaaaatatctcaatacagttttctccaaaaaaaaaaaaatagttagccgagtatgggggtgtgcttggtatggcttgagcccaggagtgagtttgaggctgcaccgagcaatgactgtgccactgcactccagtctgggcaatggagtgagaccctgtctctaaaaaataaaaacaaagaaacgtgattatagataataagatattacttacatgagttacaaaccatttctttttaataagcagaggcccatgacagtaagagtctagtagaaaaattgggtggactgcatagaagacattgtccatcattatgtcacacagtgtgaggcggatggtgcgaataaactgggaagtcatgtctttcattgaggcagcatctattcctgtttggaagagaaagccgagaggtgttctgttccccgaggaagccatcaaggcttcatgacctgctgtcctggggctgttcacagtgatagctggcacttgccgggaacagcagcacctttgttgtgtgacagatgcttttctgagcgtgctttagtgagaccgtttcacgcatgtcctgctttccctctcccctcacccgtgacaaagtgattcccccttgtatttgtttcctggggttgctgaaagaaattactgcaaactggggggcttaagacaacacacattcattctcctgcgttttcgggggcctcgtgtctgcagtcagtgtgacctggctgatggcaggtgtggcagagctggttcctctggtgactttaagtctgcttccttcacctttccggcttctggaggtgaccgcctgcccgtctgcctgggctcgagacccatccttgaatccctgcagtctccgcatccttcctcatgtggccgtcccctctggctctgaccccaggctcacacaggcgcaccccacactctccccatctctagagccttcacgtggtcacgtggatgggaggagccatccaaaagcttgggagtgaggatgtgggtgtatcaggggccatcagccagcctgtcacacctcttaagaagatcgatccccagacgtgtttcttggccaacttttacatttatttatttattttttaatgatgatttttaataatttttaattattaaaaaattataaaataattttaattattttattttttaaattcattttttaatgattttaaatagttaaatgcccagtcctaatatttaaattattaatacagtactacttagatattgagtaatgtaatttatattcattttttactcttttccatcaaaacataattttactaagtacgcatgttctgtgtccgtgttttgtcatcactgaagccacttttggagtcacctagtaatagcctttccactctatctagttctgtagcttttatgtgtgtaaattacttcaaatctgtttatgatcctattgctggaaactttatccc

SEQ ID NO: 31513 - DNA, 2300 bp, Homo sapien
attcctcatggctgacagcggtgtcactggtgggaaggaaaagacccaaagactgggagagaggacgctggggagtcttaacttagacgggggcttaaaggtctcttacaagaggggttgtttgggttgaggggtcaggggagggaagaacatgcacaaaggccatgaggcgggcgcccggggtgtggacccagagcgtggacacggacgccagcctaagcaggagggagcgggggtggcaatttatcagtcaccacagaagagcacgctggcaggacactcaaggtgcctgccatcaggagcagagacaccaggaagccacatctgtgtcctaatgggaccacaggttccctccaaagagtgtcttacaggctgatttacagaaggcaggagctggcgggagcctgagctgagccccatgggagcagcaggcaggtgcaggcaggtgcaggccggtgcaggccagtgcagtccgttctccagcctcggaggcacggcgtgcacgggggcctgctccttagtttgaaaacaagcagttgtgccactagtgccttggagtgagctggcaactgtggcgcctcagcttggagtgtgcttgacacctgtgttggccggtccatctggcacctggccgctgtgcttctaggcctctgcctgccggctgccctctgctgggcatcgccactttcaggatgacagccttagagccttctctcggcctggtgggggcccagtggtggcgtccctccccgagcatcctctcgtgttcccggcagccacagcccctgggtgctggacctctcacctgccaagaggatagtgacacccctctgcccgtctttaggggctgtgggcggaggggagggtggagagatgggggtgtgggcagggacaagggtcgagagatgggggtgtgtgcggtggggaggggacaagggtggagagatgggggtatggggggaggggacaagggtagagagatggggtatggggggagggagggtggagagatgggggtatgggggaggaggggacaagggtggagagatgggggtacggggggagggagggtggagagatggtgtgggcggaggggagggtggagagatgggggtatgtggggaggggacaagggtgtagagatgggggtgcggggggagggagggtggagagatgggggtatggcggggaggggacaagggtggagagatgggggtgtggggggagggagggtggagagatgggggtgtgggcggaggggagggtggagagatgagggtgtggggaggggacaagggtggagagatggtgtggggggagggagggtggagagatgggggtgtggggggaggggagatgggggtgtggggagggagggtggagagatgggggtgtgggcggaggggagggtggagagatgagggtgtggggaggggacaagggtggagagatggtgtggggggagggagggtggagagatgggggtgtggacagaagggagggtggaggatggaggtgtgggcggagggtaggggctgcagaggccccggggtgtggggtggtgtggggctgggccgtgacaatgggtggggtaggaaggacttttcagttgaggaggagcagcgcagtgcagggagacccaggcgggaatgggtctgaggacatgatggggtgtgtcagcgtggtggtcaaggagaggggagaggcgggagggtggcctgctccatctgcttccagaaaggtgcaggcatgctgtaggtttccctagggactctcaaggaattgtggcaaggttttctacaagactcttatgcaggtggagagacaaaagtagctgcagagcctcaaaatcttgacataaacaggttcccttccttcaagcctgaaattggtcacttaggattccaagtcctcaggaaagcagagctcccaactgtgatgctttttgtttttaagaggtggcgactgatttgctggagccagcttctcatctggggaagtgtctagcataatgatgggcacaacatagatgtttgtcgaattgaattaattctggtcatttcctggaggaggagagacaggatgttttaatagccagttatttcctgcgccggagttggttgggtcttcagacaccagctgaatgcttagggattctttcatttcctaaagtgcttacaaaattatgaaaaagcacgactttgctgaaaacctgccttcatctttactaatcatcatactagtcatctttactctcagtgtactgtgtccactttccaagcacccttgcacgtgatttc

SEQ ID NO: 31514 - DNA, 2300 bp, Homo sapien
gcctgggctgctttgtgggctttgcgaataaaccacgtagacaatgtgaaattgtgtttcttcctttccgtcctcgatggaacacaatgggatgaagatgtttctgtctgaaagaactgaggtgaaatcagtttagcacttaggtgataacccctcagcagaaggccccacgcatgcccaggctgccttcggttctcaggcgctggtggctgttcccagggtctgggggccctggggggccaggatgctgttgtcctctgctcccgcctggagaccactgtctcctccaaagctctgtaaactgtcagtagtgcaggcccctcagaagccaatgaggttaacgggcaggtcagcgtcaggggctcacccagccaccccagaaccccttgctgttgttccagaaccttcagattgctttctctgaaagtgtgcctgtgtgtgtgcctgtgtgtgtgtgcacctgtgtgtgtgcgtgcctgtgtgtgggtgcctgtgtgtgtggggtgcctgtgtgtgtgtgagtgcctgtgtgtgtgtgggtgcctgtgtgtgtgtggggtgcctttgtgtgtgggggtgcctgtgtgtgaggtgcctgtgtgtgtgtgggtgcctgtgtgtgtgtggggtacgtgtgtgtgtggggtacgtgtgtggggtgcatgtgtgtgtgtgtggggtgcctgtgtgtgtgcctgtgtgtgtgtgggtacctgtgtgtgggggggtacatgtgtgtgtgtggtacgtgtgtggggtgcatgtgtgtgtagggggggtgcctgtgtgtgtgggggtgcctgtgtgtgttgggggtgcctgtgtgtgttggggggtgcctgtgtgtgttggggggtgcctgtgtgtgtgtggtggggtggatgctgacgggaaggcaggggacgaggatgctggttttgtctgagagatgtggcttagcccaggaatggtgatgtggtctggtctatacgtgctccgccttctgtcatactgcctgccatgcctgtcgtacctaatgtagaccctctggcccagagcccaggggaagtgggtggggccatggtaggtagaggcggggccctgtcgaggaacagggcttctgaggccactccagacctatggggctgaccgggggtcccggtagcttgggcgggagccccttcctgggctggtgacagaagtggaggtggcacccctttcagcgaggagcagctgtgcagagggaggtgtggctgccttggggtgattcctctgcttgctgggggtgtggctgggcgcctgccccccgcccctgcagactcccccacacttttgttacgtgcacagctcctgagaaaagccttctaaggaagcttgagctgctgcgcattctgcaagcagccattgtgcatttctgaaacgaagtgtgtgtccagtgctgtgggttctgctcactgaacactctcgtgcggggaatgctcatgttcctccacagaaaggcagaagcagagctggcacagttccttcccagctggcagcccaaccccagaccccagagccatggacctagcctggtggccctgtgggcattgagtttgcagttcctggcaagaagcttccccaggtctaatggcgaagcttccctcaacctaacgtttcagggttaggactcctagagcccattaggacgagactctaggtggcccatgctgcatgattttgacagcagggaagcactttgggatgagcagtttacccctaaatctctagaaaattaacagatgattttgcagtgatccctaggctttacaaatagttttctttttctttcctccttcctttttagagccaggatccatcatggttcactcgctttctggttgtttcatatatttggagggtgggcagagcagatcacggaatacagatagcactgagagggctttaggcgtgtgccagatcccgctggctgccacccagtaagctggtgcatgtggaggcttagaatagattcattggcagctgtaattaaggttgtgaactgcaccacgatgctaaaaaaaacaaattctctgcagctgttttactgactgagaaattacccctgtcggccgaagttttattcttctgatttggtagaggaaatagtttaaaaatgatctcacagcgtgatttatgtaaacggcgcttctttctttggatgagacaattgagatagagtctgaaaccctggcaagccacagcttcctgcagtgtcctgttgccatgggttacgaagggagcgagagggaacttcatcggaaatgcctttaaacttttct

SEQ ID NO: 31515 - DNA, 2300 bp, Homo sapien
tttggcctctgggacactcctctctcctggttctcaagtttcagctaatttgggggatgtaaatgctgcgtgtatagaggttttctagagcactttgttcggcctgccagattctgagaattgaattttactcatgagcgtgacatgaagtgaaacacctccttcatatttatgaagtttacattttatgatttatctttcagatcttattgacagcatttctgattttgtgtatggccttgtggattttcttctcataatctcaaaggtatagattgcctgtgatattatttatttattttaagacggagtctcactctctcacccaggctggagtgtagtggcacgatctcggctcattgcaacctctacctcccgggttcaagcgattctcctgcctcagcctcccgagtagctgggattataggcatctgcttccacgctcggctaatttttatattttagtagagacgaggtctcttcatgttgaccaggctggtctcgaactcctgacctcaggtgatccactcacctcggcttcccaaagtgctgggattacaggtgtgagccactgcgcccagccttcctgtgatattatttagattgcgacatgattgtggatgatttattgcgggcatggaaggaatgacagccttccaaaatgtgtatgtcagcatctgtgacgtggctgccccagagcctctgataaaaaccagttcctgcggctgagggccaagggccacatggtggcttcaggggtgtgtgctctttccccttcctggccaatgagaggacagtgaagagatggatgcaggctgctgtgtgttttcactactgggaagtgggttggggggcaggaccctccgaagctggccccaggtggtctcacacagtgcctgtcagggggcttactttgggtgccagaggacagactctgcgggggaggaggatgcgcatagctggtgtaggtcgcagggccagggctggcagtggaccccggatggccaggctgcgtcggggcatggttgcccttgccggcaggctgggaggcagggctggggccctgtgccgaggttggggtggtcagacaggatgtgcagaattccagtgggtgtaccgctcgtgttaaaacccatacagtgtgtgtcccggagggccacacggtaggggcagcagctggaagccctggctccttttccttggtcccctcccccttgggaggttcctctgggcctcacttgtttggactttggcgtgggggggtcttaaagccccagtgacctccacttctcgggagtggccaggaggtaccaggttgcccatcacggcagcaccttctcgttcgctcccctggccctggcagccctcgccttggcagagaggaggacagaagtgggtccttgccaggccgtctgggaggtccccgcaggaaggggttcctgcctagatagcagcagagtgcctgcccagggatcagatcaaacacgggtttgtccagcctctggagctccattctgctcaccccctctcacttcctggcatccgtgtcccctggtgagccagcctcttctgattcctctccttcctgggctgagtcctgggcttgtcccgtacctgcctgacggctctgcgccctgggcccttcctgccagtgcagtgccaggtcgccctgatcagggctcccgttggggccgccgtggcttcctgttcttttcggcttcctcctggctcagctgactgtctcgagttctcggcctcctcctggtcacgctggccttccggtaccgcctgccacccctccttcataacttgacttgtctgttcttgtccctggtgcctttaagccagccaccctgctctcctccagccccttccactgttccaagccccttcctcggaggcgtctccccaaccctcctgctggtggccgctcttgcactgcttgggtgggcgggcaccagatccggggcttggctctgggcttgactcctctgctgccaccctgagtggtcattgcgcctctctaggccccgttccactcctgtgggagggcagtgatgctggagagcgtgaggggcggcgagtatggccctgggtggcgtcatggcacacaggcactgagtggactgttggtggctgcccccgagtgtggtcctgggtggcgtcacggcacgtgggcactgagtgggctgttggtggctgcccccagtgtgtgtgtcacttacagggcatgatgctactgaagtttgtgaagttggtttcattgacgctgttactaagactgtaatgtcagacatgtt

SEQ ID NO: 31516 - DNA, 2300 bp, Homo sapien
ctttgattcattgggatttgtttcagtgtgtgctggaaggaagagatccgactagatagtttttcagaggtcatcttccccgtgcaccccactcactaccctgaccgtgacttagacactcagggtttgtttctgtactctgttgtgtcctgcaggtgacaccgatgctgtcccctgcgtgttcgggattgtggtctgtgtgtgttctcgtgttaggcctgtctggctctgcgtgttcgggattgtggtctgtgtgtgttctcgtgttaggcctgtctggctctgcgtgttcgggattgtggtctgtgtgtgttctcgtgttaggctggcctgctctggcgtcttgctcatcttgtttgttcccctcatttctgcttagctttccacgggagctttcacgctccacttgtgtggttctaacaagacacccataggcaagtatcggcgtgatatgtccatttagggagaattcctgtctgtgatgttttgctcctcacttccctggtgacaggatattaggcaagcacaaagagtcagcccactccaaggacccctgccccagagagagtgagtgtgcaagttgagtgtgtgtgagagtttcacacctggcttacatgcagaacggggcacttgccacatgggggggagtcttggatgttgggattctttgagggagcctcacatggcccctgtccttctgtccttggccccagccctcctggcttggccgccctgtcctgcgtgtgagcgctggtgcgcgtcttcttgcagtgcgtgccgccccttccaccgcagctcggagtcagggcttccgtgtgagccccagccgcaggcctctgaaacttcagtgcgtgctggcggccaccgcggtcacacatttgatctataacagatcaacagcatggtggattcaaggaaacattaccaccgtgtttctgatcctatcccagaacttcctttcggtcttcttttaatttttttctatagcagtttacattatttgattattctttaacattttcttttttaatctaaatgctcttcgcactttgaatgactcctgccgagcgtagcctctggctgccatgctgaccatgagggacactgttggatcaaagccctggtttggtctcctgggctctagggctccacttttctctggattagcggggcccacgctgtggcctccttggaagcctcctgccaggcctctgcctgtcgcctacagcacgtctgcagactgggctgaatccataaggtttagtgtcgcttctgcccctgagaggagttgatgctgcctcactgaccccctcctggtctctttctacccctggccccttgctgataataagatgtgttctatttgctggcctggagctggagcccatcagctcgtccgctgggatcagtcctgtggccttgactttacagcagtgccagcctgggcggcttatcctgcgcaccgtgccacaggaggctggtgaaggggcaggaggggaacatagcgtattttattatgctgctgagaacattctgtgaggctgctctgtcagtcagctgcattccataaagctgcagcagaaaaccaagcccaaagcccagggcttcttaacaacacaggtttagtggccaccttgtcacacgtcatctgtggtcagcagggcatggctcagctgcaggctaaggacagcccgtgtgggacaccctatgctcacagaggagacatacgtgctctggcacggtgggcagcggtccctgaagctgggctcacactggcccacatcccttcttgggctcaggccaggccggccactctgggacaggggcgcccccacactgctcacgtcaggagggacgggggcgcccccacactgctcgcgtcaggagggacgggggcgcccccacactgctcgcgtcaggagggacgggggcgcccccacactgctcacgtcaggagggacgggggcgcccccacactgctcgcgtcaggagggacgggggcgcccccacactgctcgcgtcaggagggacgggggcgcccccacactgctcgcgtcaggagggacgggggcgcccccacactgctcgcatccagtggacaagggtgatgaacggggatttcctggggacctcccttctctttattcgagagctcaggagatactgggaaccaaaggctactgagggccgttttgcagacacgtcaggcaggatccggtgtcctgggagcgcgctgtgccatatcccacatcgggtctcctgtaaatgagccgccgagccgacatgcgtggctgagggct

SEQ ID NO: 31517 - DNA, 2300 bp, Homo sapien
gtggtaggtgtgctgtgcatagttgttgactgaatgggtgttggaggggacagagcttgctgcgtgtcccagggtctcctgtgggcgggcagagcagtcactgggccggggcggagggcaggggtgcaggtgctgtctgtgctggtcccgcagagttgacgggcgccgacctgaaggactgcgtcagcaacaacagcctgagcagcaatgccagcctccccagcgtgcagagctgccggcgcctgcgtgagaggagggtcgccagctgggccgtgtcctttgagcgcctgctgcaggaccccgtcggtgtccgctacttctctgtgagtagggaagggcccaggagcagcggagcggtctgtgctctgcagagactaccgagcaggatctgtgggccgccctagagacagcggcaccctgcgggccctgagcagccccgtggcaggggtctcccctccctggaccgccaccctctcaagagctcagaggagggtgggttgaatcctgcccctggttctgcccccagggagcgtccctggccctcccgctctctactggggtctctctgcagcccgcagcactggagcttcctatctgtgttaagaagccaggtgcctgttgccagctcttcaaagagatgttttgcttttggggaaacagctggaagcagcagtgcggttccctaaagtgctgggcagcgatgaggtttctctctccaggccctcgggcagctcactgagcagccagtgaccccgtggtttctgtagaaggggaagtaggaaaaaggaggaccctgtgtcagtgttaataaatggtgtctttgtctttcttaggattttctaaggaaagaattcagtgaagaaaacattttattctggcaggcctgtgaatattttaatcatgttcctgcacatgacaaaaaggaggtaagtccacgcttgggaagtgggggctgtgtgagagtggcgtgtgagagagacgcatgtgaggggtgtgtgagagggccacgtgtgtgaggggcatgtgaggggtgtgtgtgaggggcgtgagaggggcgtgtgagaggttgcgtgtgaggggcgtgtgaggggcgtgtgtgagaggggcgtgtgagagggacgtgtgagagggccacctgtgtgtgaggggcgtgtgaggtcgcgtgtgtgaggggcgtgtgagaggtcgcgtgtgagagggccgcgtgtgtgtgaggggcgtgtgtgagagggccgcgtgtgtgtgaggggcgtgtgtgatagggccgcgtgtgagagggccgcgtgtgtgtgagagggccgcgtggcctcattggaggctggctcggtgcagggagcatctagagcagttggaaagtggatgataaaatattttcacatggcttgaaaaaaatcatttctttttcagaataaatttttaaatatacatgatatttaattttgcctaaacctggtttgtataacgccctcagccacagctttcacagcagatggggtgtctttcagtgtgctggaattctgaggaaggaacgtgtatttaggggaatttgaaagcaaattggaggcaggagggcatcccgggccgtgctttcgcagctcctcctgcgcctcgtgggaggtgcaggagaagcctgggagagacgccttggcctggcccggcctggctgctgtttcctcagttggcctgtggcctggcttccaggcttcggggctgctttcgtctgctcgcaatgctcagagggcgctgctctcctgcactcccaccttgccaagaccaggtgtgtggcgacacacggcagtattgcccctgcgcagctgctgctgggctagcatcgcccgggtctttgggacactttaagtatccgtttaaacaatcgtagaggagcccgcgcagtgctgctgcattctggccacacttttatttatttattcaagcaagaggtatttactggggcccgtgagaacacatctgtagagcccgggggtgtcgggccttggcaggcagcaggagtgcggggagaggaagccttgccgggctgctcaggtgcctttcctgtcagctttcctacagggcccgggagattttcagtaagtttctctgcagcaaagccaccaccccggtcaacatcgacagccaggcccagctagcagacgacgtcctccgcgcacctcacccagacatgttcaaggagcagcagctgcaggtaaccgcaggctgtgggagcttgtggggagtccaggctagggctcggggtatagggtccaccttcaaagaacacgtgctatcaggcaggccagtgg

SEQ ID NO: 31518 - DNA, 2300 bp, Homo sapien
tttctgaggacccaagcgtcggcctggtgctgggtgctggggacacagactcctcgttctcggggactccgagcacatccccaggaggtcatgcaggaaacagaggggcctgaggaggagaagtgccccagggtaaggtcaagggggctttgaggagagggaagcttggctcctggggcctgagggccaggaccagatggcagagactggctctcgccgtcacgtggggaccctgccccagccttgtttagcagggtggtctgagggcctttctggggagggaccatgtaaactgcaactggacggcagaggaagtctagaaagagccctgggcctgtgccaaggccctggggctaaggagggtctgattacagaaagggaaccaggtgtggctgcaggggaggccggggccttgggggctgggttgagtcggaagaggcagggccattccccaggttgccttgatggaacccctaaagccaagtaccctcggtacagggtggttggtgagctcctcagaccatcctagaggcccgagagcacagccagtcccctggggctgttctagaagcttccagggagtggatgcaccccacttagtggtgctctaggaagggggctgggggaggggtcggaatggaagatgaagcccagtgccagctgtgtgtaccacccaccacaagcccgcatccatcctgctcccagcacccaccatgcctccacattcaccgtgcccccagggcccaccatgacctcccccccaacccccaaccccccattcaccgtgcccccagcacccaccatgcctccacattcaccgtgcccccagggcccaccatgacctcccccccaacccccaaccccccattcaccgtgccccagggcccaccatgacctcccccccaacccccaaccccccattcaccgtgcccccagggcccaccacgcctccatgtgcactgtgccccctggggcccacggtgtcaagctgggtggtcagtgggtgtccattctctctccctctgcacagacaggcaaatggggggcagagagaggggttttaggggatacagggaggcagcttcagccctcgctggtctccaggccacagtggttcactcacccctcctcccacctcggcagccctgggatgtcgctgctgactcaggaggaacccgaggtgccgtagcggctgctccaatattgcagaagaggttcctcaggcagctctgcccacagccccaagtcacgaattccgtgactccagctccatcccaggccccagggtacctggcccagggttgtgctgccgcagacttggcctgtaccatccaggcggcggtggggagctggggttggaaaggcttcttggagtggactcctgggtctgtctgggagacggggaggaagggacactctgaacatcaccaggggctgctggggggccctggccacccccagagtcagaacaggcaggtggggcaggatctcaggtcatcctatgctacactcagccattgcgtggcccctctcctccctgtgcctggccttttggccagccctggggccaccgagaggatgcagcaccgaaccctccaggagcccccagtgctgccgtctgtgggacagggacaatcccatccccactgctactgtctgtgctgtgctgggcacagagctggacacctccaaggcccagcgcccgtagtggctctcatcatggacaattcacaggcagatggtggccagctctgtggcctgcagggactgggagcggcgccagaccatctaggccccaacctatctgcattatcctggaagacttcctggaggaggcttctaagctgaggcccaaggaccatgtcaggtctaggactaggaccagtgcaggccgaggccagagagacagctgggcttccaggtagggtcaaagtgaggtgggcagcaggtgtgggggccaggggactcggggacttcctctccggctgggcccgcctgacgtgggaggcagccagggttaatcatttccacgaagccttgaccccacctgccttggccgctctgctcccgcctcccactgcccctcaggccagctcaggagccatggggcgctgggcctgggtccccagcccctggcccccaccggggctgggccccttcctcctcctcctcctgctgctgctgctgctgccacgggggttccagccccagcctggcggggtgagcactgaccttgtcgcagtgcgaccagaggttcccagtggctacttggggtccttgggaggaggccagagggaggg

SEQ ID NO: 31519 - DNA, 2300 bp, Homo sapien
ggtgaccctgcccctcgtgtggagcccagctgtgctgtggggctgagctgtggtgtcctcctctttcaggatgtggctctgttttcactgcctaccagctctccagccttccccttggttcttggagacctgatttgcttccaatcaaccccttcctactcagtggccagcctatttctccatttgcaaccagcaaccctggctataacttctggggaaacttctggctataacttctgaggcacggagcggggcaggagcttgcccagggtcacagcgctctcggccagtctgggagtggcagccaggccacctcctcctcctgcaggaagcttcctccacctttcagcagccctggagccgcatggagcagggaagggagttgtctaccctccggcatcctgtgtgttccaggctgtgtgggagcaggtgcagctgccaggcatggcaggagcctgggcccgggccagcactcaggaatgcagcagggccctgcctctccctgtagggataagcaagtgccaggcgcccagggcagcggatgtgtctgtggctacagccccaacggcccccgcctccgcaccggctgtcctgggccagccccttgggggcctgggatgtgtggggagcatgaatggggctctgtgacccagcaactgttctgcggaaggcggctggtggctgcacaggtgactgcgggggtgggtgggggatgcaaaattctgcttcctgggcctggtgtcccccgccttgcatgaggccctgacaagacatcaccgaagcaccaaagccaacccttgtggcccaccggagacctgtctcttggatcacaggggcagtggggaggggcgcccagggctcccgatgcctctgagccctgctctgaggtcagccgatgtggctcagtcctggctgtgaggcctcacgctgccctgattccatttgctcctcagtgcgaggcagacagagcccagcctagggtctggatgggatgaaatgaagacgtctcctccctaacgggacactgtctaccccttccttcttctcccccgagaaccgtcagccccgtgaggatggggtctagggtagggcatgtggacggagctttgctgtttgtccaggtgcttatcttctagggtgccatcgcccctccccactgctgttcccgtatctgctgggtgtccccaaccccagggtggtggaggccgtctctcggatggggctgacacccaaggcacggacctgccaggtcccccaaagcacatggcctctctgcagaagaacctggatgtgacatctaatgcccaggccagagcttggggacagctggactggagccacagggtcaaggagggggagtccagaagcgcaaagtccacccagctgggagggctgctggcaggtcctttacaaagcaggcagctcctctgcccatcggagccggctggcctaaccagggcctgctcttgcctgggatgggggcagaagaggtggagacctggggccctgaggcggcactgtgggtcctggacccgcccacctgcactggggtccctgcaggcttttaatgggaacagaaatggaggaagagacagaggctgccaggggctccccgacccctactgcctgcctggggaggggtcacctcagtgtgggggaagcctggggatgtgagagcatcctaggcctgggctgcctgtggccagtctgttgtccgggtgtctagtgacccctggggtaggggcagatgccagtctgggaagccggattgtttgaagaccaactttaaagttgggagcagtgcccagagcggggccgatgtctgctaggtggttgtctctgctttttgaaaaagaagtccccgcccgacccccgccccgccaggcgctggtctgagcgtctgagcccagatggtgcgcttgctccagagggcgggcggctccagtggccgccgcgggacggtggggccagaggggcccgtgggggtgggggagccgcccgcaggagaaggagccccgcccgcgccggccctggagtcgccggtgtcgccgccctgcccgcgggcccgccctcctggcccagcccagggccctgcgagctattttgaaagtgaccctgggctggggcgccggggcgagcgcggcggcgcggaaccatgacagaagatgaccgaggcggcgctggtggagggccaggtcaagctgcgggacggcaagaaggtcggggcgcgtcgggggcgcggggggggggggcgcgggcgcgggcggcggctcacgctcccccctgtccccgcagtggaa

SEQ ID NO: 31520 - DNA, 2300 bp, Homo sapien
ctcaataggttccaagagagcagaagctgccaggcctctgacggtcttggggcagggctgggagagcatccctcatgccactttatgccagagccatcactggctggcttcgattccagggagggagtggaccagcctctggagaaggagcggcctctgagggcagggataggggaaacagagtggccggctttgctgcagtcacacctgtgtgatatagcaaaatggggcaggccctgttctcccccctttccccaaacacacaggcaaacaggaaacatgcgcaccctgtcttggggaaggggcaggggggcggtcagcagcctctcacctatgtctttccacccaaggccgagcactgggggtctcctggttatgggcgcttgggtggacactgagaccacagacggcttgtgctccctgccggcaaggtgctcagcctggcagccgggacggcagcaggtggggctgaaccccagaggaggcgtccgtgagagcaccacagaggggctgtcggggtcaggggactgaagggggccagaggccaagaaaagcatcatgaaaggtgtcgttatgtggcctgagtctggaaaggtctggggtgttctaggtggccaggggtgtggagggtgggggtggcagcctcctgagtggagatgtaggggtgtggagggtggggacggcagcctcctgagtggagatgtaggggtgtggagggtggggacggcagcctcctgagtggagatgtaggggtgtggagggtggggacggcagcctcctgagtggagatgtaggggtgtggagggtggggacggcagcctcctgagtggagatggcaggcagacctggtgtgcagagggagctttgagcattcccaagaccggggggggctgggtgggagcgggggtggagcatgaacccagggaggcccagcgagagcctagtcgtgcggtgtcctgggaggccatggcccaagaccttggcagaccagcattggagatgggcatcttcctccagggccactgatgtcagctctgctggcatggatgatgggggtggctggcgagggtgtcgcgtgggcacgtgggagcccgaggctggcggtgggctgtgctccaggccttgcccggttgaccgtgtcttcggggtgagtgacgctccgcagacgccgcatggaatgcggggccggctccactccttccgtaatgtggttttttatagtcgggggactcattgtcccgtggccactgccagctgtctgtaagctcaggattagagagcctggcctttcgtgagagctggggctgtgccggctgagcccttcacagggaggggtggaccacggggacagggagcgactgcctggcactgagtgagccagccagcagacagcatgacggccttctccttgcctgcccccagggcctggtgcaggctctcttctgcccaccctacccagcttgggggccccaccccatcacggccctcatgagcctctcggggcatcctcctggatggcatcgcagcgggcattggcctcccctccatgcccacctccaattctgatcaggagcacccctcacccacagtaggactggaagctctatcgggccagaaggtgcacagggggccaggggacttggacttgagtccacctcgtggctgtgtgatggtggacaggtggcgtgccttctctgggcctcagtgtcctttttgctaaagtaggaatggcgctgtcccatgacccggtttggggacactacgtggaaggaagcatccacagcacaaggtgccgctcgccctcgtgtgcccggggtggctgccaaggggccggcagcgtcgccacgtgtcggggctggcctgagttccgtgtccctggaatctacagcctgtgttccgtgaaggcagagcatgactgggcagcaggcagcgggggttctaatgccgagatttcccttccccccaactcctgcccaccccggcgccttccctcctgcgtacctttctttgggcaatgggcagaggccccggagcgggcgggattcctgtgaggtgacgccagccggagtgtccagccgggtgcagccagcccagtggcccattcacgcggccgccagggcttcattcacccctggccgggagggcagcgcccccgtgactcgcagctggggcttctccacgggtggcggctgcatcgctctgccagtgacgctgggctggtccctgggggccctcctgctgctgtgggggtgcaggggtggatgctggccccaggatgctgcacacggcctcagggcagc

SEQ ID NO: 31521 - DNA, 2300 bp, Homo sapien
gggcatcttcctccagggccactgatgtcagctctgctggcatggatgatgggggtggctggcgagggtgtcgcgtgggcacgtgggagcccgaggctggcggtgggctgtgctccaggccttgcccggttgaccgtgtcttcggggtgagtgacgctccgcagacgccgcatggaatgcggggccggctccactccttccgtaatgtggttttttatagtcgggggactcattgtcccgtggccactgccagctgtctgtaagctcaggattagagagcctggcctttcgtgagagctggggctgtgccggctgagcccttcacagggaggggtggaccacggggacagggagcgactgcctggcactgagtgagccagccagcagacagcatgacggccttctccttgcctgcccccagggcctggtgcaggctctcttctgcccaccctacccagcttgggggccccaccccatcacggccctcatgagcctctcggggcatcctcctggatggcatcgcagcgggcattggcctcccctccatgcccacctccaattctgatcaggagcacccctcacccacagtaggactggaagctctatcgggccagaaggtgcacagggggccaggggacttggacttgagtccacctcgtggctgtgtgatggtggacaggtggcgtgccttctctgggcctcagtgtcctttttgctaaagtaggaatggcgctgtcccatgacccggtttggggacactacgtggaaggaagcatccacagcacaaggtgccgctcgccctcgtgtgcccggggtggctgccaaggggccggcagcgtcgccacgtgtcggggctggcctgagttccgtgtccctggaatctacagcctgtgttccgtgaaggcagagcatgactgggcagcaggcagcgggggttctaatgccgagatttcccttccccccaactcctgcccaccccggcgccttccctcctgcgtacctttctttgggcaatgggcagaggccccggagcgggcgggattcctgtgaggtgacgccagccggagtgtccagccgggtgcagccagcccagtggcccattcacgcggccgccagggcttcattcacccctggccgggagggcagcgcccccgtgactcgcagctggggcttctccacgggtggcggctgcatcgctctgccagtgacgctgggctggtccctgggggccctcctgctgctgtgggggtgcaggggtggatgctggccccaggatgctgcacacggcctcagggcagcacccacacactggcagctccagcttcccctgaaagatgaccgaggaggtggggaggacgcggtgctggccagcagtgacggctgcagcatgtgtgggcaggtgccgtgccacaccttttacaaacatctgaatgcagccctcccaacagcccgggggaaggaagtgtggtcacatggcagccttcctgggatgtgaccccagctccaggtggcacagctcccttctcctgtggccttggagccctgaggggaccctacttgatgtctctggggtctcctggctgcttcatttgccctcaagacggctgtgggggcagggtcgctgggaccttggggcagaggagggactgatcaagtgcctgctgggtggcagagcagccacatccccccatccccccaagcaagcccggaaggcaggtatgtgggcgggggcacccatctgtccagggcagggcaccccctccctcctccccatgccctgtcggctgcaggacctaggatgggcggggcagcactcaccccagcgcccaagtttgaagggtgcggcggggtccctggggagtccagaggctctggggacccagcttcacagagccaggtggggtgtcggctctgggcacccggattcacggggccaggcggggtgtcggctctgggcatctgacttcgtggggccaggcagggtgtcattgtcggctcttggtggagtttgctgcggtttcctgtgttcctcctcttcagggtccccagcccgccctcgggccagactgacctgtctctgtccttcctctgcaggggctggcgtcttcttcctgtcctcggccgagggggagcagatcagcttcctgttcgactgcatcgtccgaggcatctcccccaccaagggcccctttgggctgcggccggttctaccaggtgcgtgtgggagcctggccggccggggagggtgcgctcggcaggctgtgcgacgtcccggggcggggggccacagtgatttgtca

SEQ ID NO: 31522 - DNA, 2300 bp, Homo sapien
tcccccctcatgcattccttcatttccccccactcattccttccttccttcttcctcctgctcattccttctttccttctcccccggctcattcattccttcctctgcccccccgctcattcattcctgccttccccccattcattccttccttcccccccactcatttcattccttcattaccctcctgctcattaatttcttccttctctcctctgctcattcattccttccttcttcccctgctcattcattccttctccccctgctcatttcttcatttccctcctgctcattcattccttccttcttcttcctgctcattcattccttccttcccccccattccttcctttcttttcccccggctcattccttccttctccccactcctgctcattaattccttccctctccccctgctcgttcattcgtttctcccttccccccattccttccttccttcttcctcctgctcattcattccttcccccctgctcattccttcccccctgctcattccttccttctcccgctgctctttcattccttctccccttgctcattcattccttcattcattccttcctccgcccccccgctcattcattcctgccttctccccctgctcattcattccttccttcttcgcctgcttgttccttccttcctctgctccccctgctcgttcattccttcctgctcaccccagcttccttctttccttcttcccctgctcattcatttctttcttctctccctactcaatttctctctcactcattcattctttccttgtccctccgcttattccttccttctgtctgttcattcatttcttccttctcccacctattcattcattccttccttcacttatggttccacatttactaaactctggtctgaggtgctgacgggaaaggtggttctgccctgagagcctttgaatcctttcctgcccaccagcttgtggctgggggagaccaaggccctgcatgttggttttaccttctgtgcccagacaaaaggctctaaggcaggtgagctggctgcccaggagcagaggcacctcctcagctgccggtggctctggctctgttgccattgtggggagaggtggtggtggaaggggctggcagagcaggaggggccgctgtgctccccgaagggtggctgcatgggtgacctgtgttcccacggccaagtgcaggagccgtgctggtccggccagtgccctctgatcactgcttgtcccccagagggcaccaagcagacagtggtcatctcccctcctgccctgccccaggaggaggggactcaggtttgcaataagcttttgccttcctgggggtgactcacagctgctttccatttgggagccctggaaggcagagcaggcagcttagagacgcagcagagatgaaagtggctttcccaagagcacgggaggggcctggcctggcaggcgggaggcagcctgggatctgcattgggtgtgcttctcatcccccgcagggagggagactgggagtgaggcaaggacgccagcatggtgagggcagggggcgagtcgaggtgtgtgggcacagctggtgcctcgtgtccaggctggcagggcctgggaagttcttggggaagggacgtccagaccagcctggggccgtgatggtgcggagggcaagctgccccaggtggccctggaaggtagtcgggatggctgggtatggagcgtggggtgttaggcagggagggtggggagctctagggaaggggaggaggcggggaccaaggtagtggcaggggtgctgagagggaggggcgcaggccgtaggagaacaggtggcagaaggacaggaacggacaaagaacaggagtggatgaggggtagaggggttgttgttggtgaagccaggtttctgctgtaggccccggggcttgggggctggaaggggtggggcgagaccagagagtgctggcctgtgggggtccaccaggcatcagccacgtcctgcccagacccctgtacccccacaactgccttggcttcctgctctgtctcaggggatgaccgcagcctgtccagctcatcctcagaggccagtcacttggacgtcagcgccagcagccggctcaccgcatggccagagcaatcctcgtcgtcagccagcacgtcacaggaggggcctagaccagcagctgcccaggccgccggggaagccatggtgggtgcctcaaggccaccccccaagccgctgcgtccgcggcagctgcaggaggttggccgccagagctcctcg

SEQ ID NO: 31523 - DNA, 2300 bp, Homo sapien
tgagccgagatcgcgccattgcactccggcctggggacaagagcaagacttcgcctcaaaaaaaaaaaaaaacccagcttgagccaagtgtgggtggctcccgcctggaatcccagcactttgggaggctgaggcgggcagatcacttgaggccaggagtttgagaccagcctggccaacatcacaaaatcccatctctactaaaaatacaaaaattaaccaggagtggtggcagcatctgcctataatcccagctactcgggagcctaaggcacgagaatcacttgaagctgggagacagagtttgcagtgagccaaaatcgtgccattgctctccagcatggataacagagcaagactctgtctcaaaaaaaaaaagcttgaaaatttaaaaatatctcaataattatgagatgcagtgattttttttttacttccctaagctgggtttccaggtatctctaggttcagctcctccggggctggaagtacatgaagggcagcattgcccaccttgaccagagcaggctcggagcagggcagtggaagagctggtcccagctcagcccagcctgctgggtcagcatccatctgaaaggtcatctctacccaggaacttgatggcttccagctccaccctaacagaaacctccccagcatcttgccgagttgtaatccagggtggtggtatagacggtcttggggtagctggtatagacggtcttggcgtagctggtatagacggtcttggggtagctggtatagacggtcttggggtagctggtatagacggtcttggggtagctggtatagacgggcttggggtagctggtagtggtgctcaggaggcgtgtgggctgctggtgcagctggaagcgcacctcagccatggtgttgtgccaggtgtggttggggatgcaggggacgttccggccgcaggaggcccctgccaggcacaggcagctgcgcggtgtggaagaagtgccgctcggagtcatgcttgacaaggaagtacaccttactcctctcagtggtgaggggtcaaaccactccttcccagcgatggggccagcagcctggcgagggctaggcaccggggagggatgctggatttggagctggggggaaggggtcaccctgcattgggctccagtgctccgggtgccatgcctgctcccccaccactgccaccgcagccgctgcgggacaccaggggctggggctgaagagcagcctcgagctgggctgtccaggacacggtcgcccttcttcctcgtgtccgtgagctcaggcacaacctgcagcttagccagcccactatggctgcgtgcgtggcaggacccgggccaccatggctgcgtgcatggtagggcacatgattattttagcctctggtatcactaaccatccctaaagtctccaatggtctgttcctgtctttccctctggttcacttgtggggtcatgttgtcttctgttctttgttatttatttttttcttgagacggagtcttgctctgtcgcccaggctggagtgcgttggtgcgatctcggctcactgcaacctctgcctcccaggttcatgcgattcccctgcctcagcctcccaagtagctgggattatgggcacctgccaccatacccagctaatttttctgtgtgtgtgtgtgttttgttttttggtttttttttttttttttttgagatggaatctcaattgctcaggctgcagtgcaatggcgcaatcttggctcactgcaacctccacctcctgggttcaagaaattctcctgcctcagcctcgcaagtagctgggattacaggcccctaccaccacagtgggctaatgtttgtatttttagtagagacagggtttcaccatgttggccaggctggtctcgaactcctgacctcaggcaatccgcccacctcggcctcccaaagtgctgggattgtaggcatgagccaccatgcctggcctaatttttctgtttttagtagagacaggacttcaccatgttggccaggctggtctcaaattcctgacctcaagtgatgtgcccacctcggctgcccaaagtgctgggattacaggcatgagcttctgtgcccggcctgaactgttaagtgtttgtgaagaattatttgggggcctatttgagagctgttatatggatcatcctcctggagagggttcttaagcctctgagaccgggtttggggctgaggctttctgacccacacaagtcatgctgacccctgaagggccgcaggccagatcttgccaggtgagcactttc

SEQ ID NO: 31524 - DNA, 2300 bp, Homo sapien
catcctttagccatcccctgactttctttagtttcattgcctgtgtatgcagccacgaataaaatattgcttagttatctgggaaaccgggctgtataggaaaagggctcttagaaccccacaccactgtcagatgcaggatcccagaagactctgctcccagtccagcttccaattcctgtgggtttataacgggcctttctagagacactgggggcaggattcacagagctggaacatttgcagttaggaccacattccagatgaccaacagggacatgcttgggggggataggccaatttggactatccccttctaagcccaccaagacctacctgtagctctcaggagtggggtcagggcaaaacatgtatgtggggtaaaacaggtgacctctgattctaggcaccaggagatggagagaagagcaggaacgagggaacacaaggggaaggcaggcacaggtgagaatctaggccaggctcacctggccattctgtcctgaggcttaaaaacatgcaatgatggcaatgacagcatttgatctgtctctggagtcacttcgcatgaggtcattctccctccaccaccctcctgggggattcctttacctcctctcccccatacatcccatattgggaacttgtgcttccagctaagatgcagtaacagactgaatttaccctcttgcctgaaacaactcaacagctggaaaaaaagaaatgaaacgatggctctgaaaatactagaaaagcagcacaggacagaagcagatcaccttgattccagggacctgaaatcttctctggaacaacacaagatacaatttaaatgtaaattagggtaggcccagtggcccacgcctgtaatcccagcactttgggggaccaagacgggagggttgcttgagcccaggagttggagaacagcctggacaacatagggagacctaatttctaccaaaaaatttcaaaaattagctgggcgtggtgacacgcacctatagttccagctacttgggaggctgaggcaggaggatcgctttagcccaggaggtcgaggctgcagtgagccatgatcatgccactgcactccagcctcgatgacagagaccctatccccccacgcaaaaaaaggaaatgaattaacattaattcctctcaagatgcccaggctctattcaccccctttgtcattgtccctccagttggaaattcctccctccccccgcaaaatcccgcccacccttggaggccttttcagatcattcttgccagatgagctccccttgtcccttctctgagcccaaaggggcccagctgctgtctgtctccctccttccccttgtttcccgcgctacctccagggcacttcccaactcactggccaagcccccaacgagcggtctatgctaactttggctctgtgaatttcctagagtgtcatgggttggggaaaagcgcgcgaagtcctgccttgcagcaggcgcgagagcaggcgcttgggacgcgggttggggcaggggccccgggacgtagggggacgtctgcgcggccctgcgtccccgggacaacctggcctgggcttacccacggccaggcgctccgcggagggcagaagcgggctgggccaggctcctcagcgccaggcccgggccgcagtgccaaccccgcaacggcactggacatgcaagagtcggcgtcagtgcgcgtgaagccggagcattatcaggctcagccaaacgcggcccggttcttgggctttccgctctttctgtggggcagagagggaaagaggcctcgagtcgtgcgggctccaggctccgggctctgggtgaggcctgatccctgctcccacccggccaccctcattctccagttgtatcccctgccagagtctgcagcctcgggccgcggcgtggttgcctgggaaacgcttgcgcctgcgcagggcttcctaggcgctggagtccgccggcggcctcgccgctgccggccgctcacggaggaactacaattcccaggagaccgcgcggtgggtgggggcggggtagtgggcggggcatcggcaggctaggttttctccgcgcagcgccagtcgcagaggaagatggcgccgcggagggtcaggtcgtttctgcgcgggctcccggcgctgctactgctgctgctcttcctcgggccctggcccgctgcgagccacggcggcaagtactcgcgggagaagaaccagcccaagccgtccccgaaacgcgagtccggagaggagttccgcatggagaagttgaaccagctgtggg

SEQ ID NO: 31525 - DNA, 2300 bp, Homo sapien
cttccataaacgtgaccagtaaggaagcgacaagcctgaagggtcctgaccatttattactcagggtacagcatgtccttatccctctgccttgtcccccacatctcagggggcaaacagagcaggtttgtgtcagccgaggaaacccttgatcttctaaggggactgctagccatctcgcccccatctttgccacagaaaagacggtatccttttgccctggaagataaaccaacgtctcggggagaggaggggccgcaggtttatttcccagaaatgtgtgcaaatctgcagacacagcagggaggttttgctctcctgcatgcctccagcgggctctggcttgcaagaatgtctcatgcaggcattcttccagtgccctgtgctttgaaaaatacgcagaaaagccagaattatggagggcagcctcctgggcttgtgggtgttgggcaggtggagggagacgtatggaatcttctggtctccaggcagctgtgcagtgcaccggtcggtgggatcagtcaaggaggttcagagcaggatggaggaaccgctccagggatttccagcagagaggggtttgttgcagggaaggagatggatcctgggaccctggagttcgcacccctgctctgtctgctgcagtgctccgggggtacacagcccagcccagggtcgccccggtcatgtgcccccagcaccagcccctgggccttttatatgtttctgggatgctgcctgtcttccagtgccatcaggaaaggctcggggagctgggcctcactggacgccatacccctcccgctggaacagtgcgtaggtgttccgccctccagggcagactgaccgcaggatgaacgcccccgccccacaggtgcccagcgcttcacagctcacagagcccttcgacctccctggcctgggatgaccctctcaacacccccaggaggagacaccggtgctgccttcagcagggaaacctgggcttggataggtgcagcggctcctccaaggtggccaagctgcctggccctcgctcatgaattctgagtagcccctcctgtcactgccacccactgctctccccggaggcctgtgtgtcctttgttctctcctgaggatggctgtggcctcctcctgttcctgacagggcccggtgcccactggctcatgtcagagttcaggcctgaggggaggggtgtttgtgctaacaggaggcagagggcagcctgccagtctggccctgtggccacctgagctgtcccctgggacccgtggcttcatgactctgacccagtggatgctgtcttcatagtctgagtgggagccaggtttgaccttggagtgcctggggcatagagtccctgtcctctggaggaagagatggtcatcccttttcatgctgactggccccagggcaggacctgctcttttggaccctaaaagggacaaggcctggtggcagagcagagctggggctcaggagagggagacgggtgggaggaagggaggaagaggaagagaaggaggaaagggggagatgaggaagggggaggaagaggaggaggaggagaaggaagaggaggaggaggagatgactcaggcacccacggcattactgtggcaggctggccctcggtttccccagcagtaaatgaagagatggggtcaaggggcccaggcccccttccagatctgagacctgcgcatcaggctgtctgtattcagaggaagccggggatggcagctcccagccgtgggctcggccttcattcactgtacaggctcatccattcacccagtgaaccctcccgagtcccttcatgagggcggcctcgcagggactttggtctcggctctgccctgtcctggccttgggaccctgggtgagctgaggcaacccagtttcctggtctgtgactccaggctctgtcctcgccccatcgccccccatcgtggcacaggttcgagggtgttggcttgcctggcctcctgagggccttctggggttaaagtcttctatcctgaggctgagaccagggctggggaggaggttcagcccctgtggactttatcctccctctccacggctgagtcttgatttacagctggaagggcagacggaggcatcttggtgtatacacagccctgctgggccacatcccgggtctcctccctctgcgatgccatagcaggggcgccttccgaaagccctctggattgaggcagcaggatctatggtggaacctgccccggcgtcgccaacgcccctaggaccccagcacactgactggggagca

SEQ ID NO: 31526 - DNA, 2300 bp, Homo sapien
cggggccggagcagctgtctcccgtcacgcatgatgcatccgccccgaatccacggctcgtggcaacctcctgtcctctgaaaacattgtgcaaaggactgattttgactaaaggagctcagggcagccactgtgaaagagatgtgtgtttgtctaaattatttagagtgagggaagcgggctcgggggcaggaggcgatgaagttctcttctgaatttcatttcagtcagccaggcttggagccggtcagctgctcccccaggaacgcttgtggctgcaggcagaaggctcctcaagcccccaggaacccctgggaagagcagggccccccagagcgagtcccaagcctgtgggaagagggggccgagctgagggtacgcagggctggggtcaggggagctggatcaggcctgagtctggcctctcctctccgctgcaccgagatgaggaagtggccaagaaatccagtccagtccagagcttgcttcttaaacagcagatgctggtgaaatcaatgaatctgtggattcctaacacgggaaatgggcgacgcggagatgctgtctggaggacgatgcgtcccgaaacctctgcccaggctgccctgagcccatgccccctccaacatctctgaaccccacatctccatcctctctgtcatggccgtttctgctccatcccctgcacccataactccggacccttccggacgcccatagcagataccacgcaaggccgggctaggccagcggggatcctggggctcatcaggacctgtctggcacccacgtatccgccctgcctggggaaaggcctttcagggcaccctgtgacccaggctcagactgcagggcaaagtccagggggcctgggattcagaggccacaaagctcaggtcctgccatcccagcaccaggccagggacagaattgggaaggggttggggtgcctctgctgtgcgggcagcctgagagtttcagggaaagaaacaaggtgaggagcaggtacttggagaccacagaaatggttgcagagtcagcccttgccaggcacctcactccttactcctcacctcctatatcctcactcctcagcttctcacctcctcactcctcacctcctcactcctcacctcctcacctcctcactcctcactcctcacctcctcactcctcacctcctcacctcctctctcctcactcctcatctcctcactcctcaccttctcactcctcacctcctcactcctcactcctcacctcttacctcctcagtcctcacctcctcactcctcattcctcactcctcacctcctcactcctcactcctcagtttcttacctcctcaacttccctcctcctcacctcctcacctcctcaactcctcactcctcaactcctcactcctcacctcctcactcctcactcctcacctcctcacctcctcactcctcacctcctcacctcctcactcctcacctcctcacctcctcactcctcacctcttacctcctcactcctcacctcctcactcctcattcctcactcctcacctccttgttcctcacctcctcacatcctctctcctcactcctcacctcctcactcctcattcctcactcctcacgtcctcattcctcacctcctcacatcctctctcctcactcctcacctcttacctcctcactcctcacctcctcactcctcacctcttgcctcctcactcctcacctcctcactcctcacctcctcactcctcattcctcactcctcacctcctcattcctcaccttctcacatcctctctcctcactcctcacctcctcactcctcacctcctcactcctcacctcctcacctcctcacctcctcaccttcctcaccctcctctcctcctcaccctcagctgctattttctgcagggcctgggcttcactctgctgctcctagcttgccttgttcttagtcaacagtgaaccacaggccagctgcagcttcctcatattgtgatgtaactcaggcaagggctggacacagagcttttaccacgccttctgtcactgagagcaaaacagagctgtgggggtctcggcttcccccactgcacagcagctcccgagctgcagggagagcgggagtgcacgggcaccaaactgcgcctcttgggggtgctgcagcggattttctaacagatattttcctctcctttattctaggatctggaagaactgtgcctcacctccgtctctctgcctctgactgctccctctactccccaggccttgctgtcagcacctgca

SEQ ID NO: 31527 - DNA, 2300 bp, Homo sapien
tgggccgctcactggccaggcactccagatgccctcagcctggcctgtgagtggcccctgccttcagccctcctgggcagtgggaggctcatctggctcagggccccaggtgctccgtgtccttttccctccaaattcccgtgcctgggctgccatctcttgggaacataggagccaggatcctagatagatccccatgcccctgcgcatcccccaaagcacttctcaaaaagagagcccttcaggatgggggtgggaggcacgctgatgccgagggagagagaccttctccaaagcctgcatctggcccctgccactgctctttcctagtcctcctgtctccccacgcccccagtacaaagcccactcccactggaagaaggacagcctacagaggcctcccccttcctcataacacctcctcactctctaagcacagtttggtcacctcctccaggaaggcttccttgacaaccccgctcccaggctgggggaggagccccagggcactgatggttgtcagcgcattcacctcagtgggtggccccatccacccacagatggtgagcacctcaactgaggccaggcccccctcactctctgccatcgcagagggctcaatagagacaagggctccagcgggccgaccatgaaggaagcaggtgtgtgtgggcttccctgaaaaatgcacctccaggtgccctggacaggtggcaccttttaggcaaccagaaccaggagggcctttagtaaggatggtgaccctccaccatccccaggtcacacacctcccacaggacagccatggcctgttgcctccccgaagggcatatgtgccctagactagcacaggactggcacagaaggctttggctccaacgtgcgcccctgcttggcaggcccatcatctgaaatatttgctttctgccgggccctggctcggcctccacacccccaatgcaggccctgctggtgacaaacatggtgaagaacgaagccgtagctcctggcagtgtctctgcggagacagacatgctccccagtagggctgagcagcagagaacacgacaggctctgaggctaaagctggcgcccttcaggagctcagagagaagctgccccaggccacgggcatggataggcatcccgggggtagggcagtcactccagccgctcttcatgatgacctcccgggcactcagaagcgccccttccccgccggttctagccacaggatggacagaccttccctccctctctcctgcgggcccatgcagggagaggccagccagctggggttcgtttctggacgtttgggagaagggtcgtcccttcggtcctagcagagaaacgtcaggcctgagaactccagctctcctcctggatcacctcgtccctggaagtccctctcccacagaccccaggctgcctggaggcagaagccagcacccaacatgggccacagagtggcagtgcacgtggcagtgcacatctgcagaatggaggtgcgcggacgggggcgagggtgcacgggggctacctcaacggccgctctcccctgagcccacccttgcaaaaagctccatcatccaggcagctccgttctgggtgtttgtcagaggtggtgactttgaacacctctccatcctttaaaagcagggcctgagagcctaaggattaaacttcaatcactgctaacatgggtgcagagcttgggagcttgcccagggcttccacagacaccgccgttagttatgattcatgctccagcagcgctgggaagtgggccgagggaactgaggccggggtgggtgcggaggtggctctgacggggagcgccgatccaggatctggtccggaccctgagctcggcaggacctgtgcgcacgcaggtagcgtcgcgtcctcccccaggctgcgagaggttgctctgccatcaggccatggaccccgagccgcccgtgctgcgcgcgcgcgtgtgcgcgcccccgcctgcgcccatgcctgcgccgggggaggcgaaggaggctccagtcttagaaagagcagcttctggaactcaccacccaggccggccgccgctcggccccgtcccgcaggctgcaggcggccctggagggggcgccctcgccgagcgcgcgccccgcgccgccgccccggactcctccccggcgccgcgcgggcaggttcgaccaggcggccgcgggctccggttcccggccagctccccagggcccgcggcccgccccgccccgcgcgcccgccccgctgcgcaactcgacccaagttggaagccgatc

SEQ ID NO: 31528 - DNA, 2300 bp, Homo sapien
gcgtcaccgaccagtagcggtccaggctgatggcacacagatgcacgatcgacgaggtgcaaaacagcacatcgagcgccaggtacacgccgcaccacacctgcccgaagtaccagtaggccatgagctcgttggccaacgagaagggcatgaccagcgtggccaccaggatgtcggccgaggccagcgacaccaggaagaggttctgtggcgcgcgcagcgcccggctggtcagcacggcgatcaccaccagcacgttgcccaccacggtgaagacgatgaggaagcccaccacggcagccagccctgccaccgcgcccgccgagtactggccgcgcggcggcccccaggaagcccccgaggcattggcaaccccgccgctgcccctctcgcccgcgccgctcgcattggggcccgccgctgccgccaccgccagcgccgccgccagcgccggggacgccatggtcctcccgcgagctacgccgtccctcctggagccggggcgcagccgcggcagctcgggcgccccccagccggggtcggcgcccgcatcgccgcctgctgctcgggcgcgcccgccggggaccgcggcgcccagcagccggccctcggccgtggtggctccgcgggcggcgcgccggagagcgtggctgccgggctccccgcagctgccgagcgtgtaagtgcagagcaggaggcgcccggagcgagcggcgacgcggctgcggggggaggggggcaggtcccggggtcctcgcgcggccccgccctcggcccggctcacggggagcgccccggcgtcgagcccacggcgacgcggcgcccgagcgggcgtgcctgagcggccccgcggtcccggagcccagccggggcgcaggcgacaggcggcggcggcccgggcgctccgcctcccatccggccggctagggctcggcgcgccggggcgccggccgccgctcctccgggcccccgcgcccgcgcgctccctccgtctccaactttactttcccgggcggggcgccggcgccgccgcgagtcctccggctgctcccgggcgcgggcgccccccgcggtccacgcttggccgtgcggccgccgcctcgctcgccggagctgcgccgccgccgccgccgccgccctgcgctgggcgcgagtgcggccgcctgcgatcggcttccaacttgggtcgagttgcgcagcggggcgggcgcgcggggcggggcgggccgcgggccctggggagctggccgggaaccggagcccgcggccgcctggtcgaacctgcccgcgcggcgccggggaggagtccggggcggcggcgcggggcgcgcgctcggcgagggcgccccctccagggccgcctgcagcctgcgggacggggccgagcggcggccggcctgggtggtgagttccagaagctgctctttctaagactggagcctccttcgcctcccccggcgcaggcatgggcgcaggcgggggcgcgcacacgcgcgcgcgcagcacgggcggctcggggtccatggcctgatggcagagcaacctctcgcagcctgggggaggacgcgacgctacctgcgtgcgcacaggtcctgccgagctcagggtccggaccagatcctggatcggcgctccccgtcagagccacctccgcacccaccccggcctcagttccctcggcccacttcccagcgctgctggagcatgaatcataactaacggcggtgtctgtggaagccctgggcaagctcccaagctctgcacccatgttagcagtgattgaagtttaatccttaggctctcaggccctgcttttaaaggatggagaggtgttcaaagtcaccacctctgacaaacacccagaacggagctgcctggatgatggagctttttgcaagggtgggctcaggggagagcggccgttgaggtagcccccgtgcaccctcgcccccgtccgcgcacctccattctgcagatgtgcactgccacgtgcactgccactctgtggcccatgttgggtgctggcttctgcctccaggcagcctggggtctgtgggagagggacttccagggacgaggtgatccaggaggagagctggagttctcaggcctgacgtttctctgctaggaccgaagggacgacccttctcccaaacgtccagaaacgaaccccagctggctggcctctccctgcatgggcccgcaggagagagggagggaaggtctgtccatcctgtggctagaaccggcggggaaggggcgcttctgagtgcccgggaggtcatcatgaagagcggctg

SEQ ID NO: 31529 - DNA, 2300 bp, Homo sapien
ccctggcccagttctgaagccaaccttccttaatcacccagacccatccctggttaggacttgctgtggattctcaggtgactccatctcaggatacagggactgagagggtgtatgcaacatctcagacccagaaaccgttgattctgcctaaaaacacagcaataaccacatcccaccctcttgatttaaatgaaagggtttgggggaataaaagatgaacctctttttttctttgtcagatcttgcgttcatttggttctggtgtggaacaacagctataagagaacaagtgtattcaattagaattaattcccctctcttattctcatagctgagcagggctcaagtgcctctcatctgaaagaggtaataagattttatctgtctcctcatctaccttttgcaagtatacttaacaaattcgctctcgggactcttccaaatggagttttatgagggatttgctaaggtaaacgttttagactttgaacacagttcagatttcaggtgcagtactgaaatctgaactgtgttgctaactgccctgcctttcaactcaagacacaataactttgaactaaaataattatatttttgttgttttccactctgtccccacgtctctatcaccaccacccccaagcccaccccgcaggaactaagtcctccttcctatccctgcaagatcaaaactcctcctgcaagccccgctagctctgtctgctcgccttcgtggcagatatcgctattgtacttttatactcatttgtgtgataagtacttcaatgtctacttcttccacgagcccctgagcccctggagggcctggaccacacctagtttttctcactgttacatctcccttgccagacacatggtaggcccttaataagtatttggtgaacgaatggcttgtttggtgacagtccaaaggctgggggacagagggaaatctccctcctatcgggccccagacgggtggcgctgatggagaggaggctaggataacgcctccaggaccgaagcgcgcacccgtaaggcccctgccaaaaagaccttcctgaaggcggaggaactgcgagagtgcctacgttggcccaaggcctgacccgatgatcccggggacccttgccctaaccggccccgcctcccaggccccaaacccggactcggccccgcccgaagctccgaatcctggggcccgcccctggccccgtgtcggcagaccgtgggctcgctcctggacctgcctcaaaccctccgcaggtaacgcctcccgaacttgagccacactccaatcccctcctcaaacccctccccgtttctcacaccctggacccctcgatctgtctcggcccctccccaagcccagctccctctcggcccctgagcccagccccgaccctcctcccagtcccttggtccctcccgacaccggcccctccctaagctccgcctcccagggcccgcctcctgagtgcagcccgcagcccagactcggccccgcctcccggaccctgggcccctccccacgtcggcccgtcctaagctccgcctcccagagtccgagcaccgcctggccacgtgctacgacatatcaacgccccaccctggccccgcctcctgagcccttctcagggtctgaccttagccccgccctaagacctgtctcctgggctctgctccgagtctcacctcctgaacccaatcatcgtttacccccaccctaacgcccgcctccaggactcttatcctgcccccacgcaaggccccgcctccaggacccgccaacctggacgcttccgaagccccgcttccaggatcgccctgtcccggccccgccccaggacccgccaacctgaactctccccaggacctgccccaacgacgcttatcctggccctccccaggcctcgccctcatgacgctcatcctggccccaccctagaaacgccaccaccactctcctcctgaccctgcccccgggccccgccccctctctgcccctgcgcactaccctgggcccgccccctcttcagtccaggcccggcttccgcccggtctcccggcaacgctgcggccccgcccacgccatggcgccctaggagaacgcggggacagaactcttgctgcagagtttcgagcgccacttcctggcggcgcgctcactgcgctccttcccctggcaggtgggcggcggggcgagcggagaggcccgcggggctcgcgggagtccaggggcagacgggatgtgtctccgtgctgaagcccccggcgctcccgccacgtgagtgcct

SEQ ID NO: 31530 - DNA, 2300 bp, Homo sapien
cttttctagattttcttgcactttttggagtgtatcttttatgactaagaaaggtggaggaacagttaaatcaactttgtcagggtgttcctggaacatagggttacttagatcagttaaaggcctgattgacttgggtgggctttatgagactagggtttttttggatggtgaacatatacttaacattaaatcctgggatataaaatcttaatgttcatgacatgccatgatactattgagttgaattaaggtcatggacagttagaggattacagttttttctagtacataatttaggatgagaagcacgagttatggaaagagttgaagatctggttgatcttttagagtaggtggctaaagttacacatgtctaatcagggcagaaaaactgataagcatcttgacagctagcgtcagggtgatttctaggacagaggtaaaagtcaacattttggagtctttttttctgcacttttggagcttctgcaattagtttggctcttggagtgtctgaatcttgctgcaaggtcgacacttcctgctcctgggactggcagatggtgttgtttttgtgggtgtgggctggctttgggaatagtacaaataaatcaactgcaaaggagacttccttggaggtacggaccttctaagtggtgtttgcaaatacacgtcctgttgtgaaagaggtgaggagaaaggagtaggaaggcacagaggatgtaactggcaaaaacaaataagtgaggtagacaaaaagaatgaatctaatggcttcacctgacttaggtgcagttttaaggggcctgacttaggcctggggacttatgttttgagctgggctctgttggactttttgatgcgggagtgatgaatctagcaggaatgccgcctactttcagagcagttggagtcgtgaggatgacggtgtgaggtcttttctaagcaggagtgagtctttctttttggaactttttaacaaatgctaggtctcctggctggaatgaatggcaggactttttctggtcaggaattggattgggaagggctcctcaaacaagtggcaggataatatcttgtacctgttggagagaatataggtactgtaataaattagtttgtgatatttctgctaatttcacatctcttcacttaggcaagagaggcagcgccttcttatacatgatttcaaagggtgagaacttagcgtggtaaggggtgcaccttactttaagtagagctaaaggaaggagacttacttaatttacactggtttttaagattttgtaagagtgttttttagggtgtggttcatgcgttgtacttgcctggagctctgaggttgataggcacgatggagcttctattgaatgtttaaggccttactgactgactgagctataggcgacgtgaaggctgttctattatcagactttatggcagcaggcagcctatactgaacgatgatttcattgtgtaaaaacttaactactgtgttggtggtttcgttttcggtagcaaatgccttagtctatctggagaaggtgtctactagtactagaaggcatttgtacttagcctggtgtggtttgacttctgtaaagtcaatttcttacttttttcttggcgaggtttttcagagacagtggcctgggctgggtttaggactttgtttggcatttacttgggcgcaggttgtgaactggagagctgcttaatctgttaggctttgaagacgggggatcttaaaatggctccgcaggagctgaggtagctttgctctttttaagtgggtggtagactgtaggtgacggactaaattttctttaagggttcaggatatgaagcgtctagagtcaggaagaatctactaactttcctgatttttattgactctgagatctgaagccagttttttgttgttgttgttgagtgtacgggattgtcaggcagatctggctgtggaaaggagactgtgggcagcaagtttagaggcgtgactgaaagtctcgctgcgacctgagctgctgaatcaggtttctggttactatgggcaacggccgtgttttctttttgatgtcctttgcagtggatcacagctacctgctgaggtgagtagcctgctttcctggtagatggctttatgtacatgcacagtagcaaaggcgtacttgctgtcagtgtaaatgttaatacgtttattcttactttatcagagagcctgagtgagggcgatgaattgagccttttgtgctgaggtgttcgctggtaaagcttgagcttacaacacatctgtc

SEQ ID NO: 31531 - DNA, 2300 bp, Homo sapien
acctgagcaacatagtgagacccgtctctacaaaaaaacaatttaaaaaaaatgagccaggcgtggtagcacacacctgtagtcccagctattcgggaggctgaggcgggaggagcacttgagccccagaattcgaggctgtagtgagccataatcacaccacttcattccagcctgggagacacagggagaccctgtccttattaaaagataaaaataagagaaagaaagaaagaaagaagactgtgcaggtgttgcctcctccctgaacctctcagccttcctgcagacctggactcctcccaggcccctggttgtagccctgctcaagggtgttgtgctgcttactctgtccccactcccaagctcttagaagttgagggctaagtctcacaggtcatgatccccagcttcccagtgagggctcattagctgtttgtttattgctgtttctctacctgaacatcagctccacctgagcagagcctttcatagctgaaaacccagctgctagaacagagagcagcaaatgattcataggtcaacacatacatatgtgttgatcaaatgcatgaatgcgtgaattggaagaatgatggtggcaaggtaaggtcccccaggttgactccttgctagcccaggactccccacccctcctttactagtcaggacctgctattgcaatttgctgcgcttagcgcaaaacaaaaacatgggccctcttgttcaaaaattaagaatttcaagacggcaagaaccttaaaccaagagcgagagggtgtcttccgggcccagccccgggctgctgcacggtgggatgtgggcttgccccaggctcgctcccaactcccctctccaacctgcggctggggggctggggtccggcgcctcctgtcagccacgccagacccgtagaacgctcttcagctgaaacttcccagacctccacttagcggcacccgagcggggctccctggcagactcagtccccttccgggagcaggcgggtgccaggcgggcaccggggctttggaaggggctagtgaagacgcttgggcgccggtagcaacagggcagaccccggggcgtccctcattccagctcctctgggtccagaacggctgccgctcctttgggggagggtgcgggatggtctcttttcttagaaagtggctcaggtcttattctgcgcctgggcatctcgcagccgacacacaggcacaccagacggacaaacagaaaaacccacagaaggcggcccctcccccaattcagagagccagtgacgggcgctcctccacccctaaccagacacacccgataacagacggccagacacagagtgacccgcacagagaagacaatacagaaatacgcagggacgagtacagaccgtcggacgctcggacacggacgcaggcaggatcccctggacctctgggttccccaacggagaccctcggggaaggcccggagcatcgcaagcccctgtggagccccggacgccccgcttggcagcagccacgccccccgcgcacacccccctcgggctggctccgggagaccccctctccccagtcccgcaaccccgggaccccggcaggcacttcttgtcacccagcgtttccggggcgcccggacaggggctgggtgggcgggcgtcggctcaggggtgagggctgcagacggcgggcgggggccgggcgcgcgggcggaggtgcgggaggacgcgctagtgtcgcggcagggctggccagtgtcccagggatcaggagcggggagctgtccgcgtgggtcccggagggggcagatggctgccccgggcgttgcccagtgaggggcagcgggcaagggagctcgtagaatcccaggtcagcagggtggggcgctgggtaagtggacagggtggtaccttgacggaggacgaaggggcagaagaggggagggcgggcgtcgggaggtgacaggagagggggcaggttggcaggggcgtggggtaggaatcggaagggagttgaaaagggaggtgctggttggcagaggcgtcggggcaaggacaggagccaggagcgcaggcggggcccgacggcagccacccccgggaccagacttggcgcgggtgtctcgaagatgctcgagggcctggggtcgcccgcctcgccccgggcagctgcaagcgcctcggtcgcagggtcgtcggggccagcggcctgctcgcctccctcgtcctcggccccgaggtccccggaatccccggccccccggcggggcggtgtgcgcgccagcgtcccacagaaact

SEQ ID NO: 31532 - DNA, 2300 bp, Homo sapien
tactggaatttttccaacctccttttaagtatcatcaatatgctgtgcaagtagtgccatttaaaattgcagagaaaaaaactctggaaggatttcagatccaaattcaaaggccccgaaaccacaaaaggagaaacctgatctgacctgaacataccatgtatgggaacctgggatagcggcgatgctcttgggagtattcagttaccacggaggccctgcactgaccctttttcgaggagacaatcaacagaagattgtatttgatgggacaaattcacttcctgttaacaaggcttctaaccccgtacgagagagaagagagggcaaagacttcagttgactttgaataaatgaatccagttctttaggagtcttgaaagaaaaaaaaaacagaaaaaaaaaaacaggataaaggaggtattgtttagaaaggccatatgatccacccagctgttaaatcctgtgctccgaagggggaagaaaggctgaagaaatgataaatcagtagggatttggtatttctctcttttttttaattttttttatttttatttttgagagggaatctcactctgttgcccaagctggagtgcagtggcaggatcactgcagcctccttctcccaggttcaagtgattgtcctgcctcagcctccagagtagctgggattacaggtgccggccaccattcccggctaacttttgtatttttagtagagacggggtttcgccatgttggccaggctggtctcaaacgcctgaccttgtgatccgcccgcctcggcctcgcaaagtgttgggattacaggcgtgagccaccgcgcgcggctggcactcttttcttgagtatttcttattacattccttttacaaacaccccaacacatcgaagatattaaacagtgcctactaattcaaattttacttcctatgtagctggctctccacccctgtattcaactcacctgaaaccactctccctgctctcccacactgcagcagaataaactgccctttatatgtacagtgtttctattatgccccatgtacagtgtttttattatggcactgtattgaagctgcttcctctactagattcttctgtcctcaccattttatcacatgcagctgctcagaaaatgttggctgcattgatgaaatgctttcatacatttacaaatagagttttcttgtaatatacctctgtggttttctttggacaaggagctcctcacgtgcaaggccatgtcttactcatctttatctccactgctagcatggtgcctaacagctcctaccaaatagtagatgctcagtaaacgtttgcgtggctaagcccaccatttctcagcacatgacacgctgggaaacggctgggagagtaatacgcgggattattgacgaagaaaaagttgtgaactcgtaacacacagtttgtgggcgtgagcagtgtggaaaaccgcagtttgctgggaaagcaatttagttccctcggttcaggctgggaggatttttcacaagtggcgaggaggaggctcacatgaaccacatacaggtacttctcactgaaacgcacaacaaatctagagccaagtgtaataacgaaacgggccccaagaagtttatttaatgcccagggcccccaagtggtcactgccaggctctagcatcctgtccagcaggcctttctcctcctttcaagtcttgctggacgactcctgaaaagcaaaagtaggaaaaaaactgggggctgagagtggaaggctggacagagggtatgtctcctgctctggcacccggaagcctgcgagggcttcggaagcgcagcgtctcacggtcgcgcatcccggccctggacgcatccagcggcagcggtaatcctggtcctcctgggcttccgtaggtcggaataaacttgggaactcttccaccggcaaagctcagtgttttaaaattcaaatcacacttgccgacatgagagcggaacctttgaggccgactccaccctagctgctcgctaactaaacagcgaagagaacacagtctccaatccaaacgccaggaggtccagacccggagcggacgccggaagcgctgtgtctgacgtcacttccgtcgcatttcggggcggtaccaagatggactcctcgcgggcccggcagcagctccggcggcgattcctcctcctgccggacgccgaggcccagctggaccgcgagggtgacgccgggccgggtgaggcgcgcaccaagccgccccgaggttctcagaggcgaggcgtcggaaaacggccggcct

SEQ ID NO: 31533 - DNA, 2300 bp, Homo sapien
aactcaaagcattgggtggaaagttaaataagacaccagatatgaaagcttcatccctgcccaattgtagaaaggtttctctgtgacctactaatttgcacatcaatgctattatacccagccccctcctaaacccatgctcctttaaatatgaccatcaacccacccatttatgttcataaattcactccaaccttctctggctcctcaccccatggctgcctactttaccaagttccctgataacatgcccttaggtttggttctgagattggaatgattttttttaaatcttcttccctctatatttttgtattacttattcaattttttttctttttttttttttttttgagacggagtctcattctgttgcccaggctggagtacaatggcgcaatctcggctcactgcagcctttgcctcccaggttcaagtgattctccggcctcagcctccccagtagctgggattacaggcacatgccaccatgcccggctaatttttgtatttttagtagagacggagtttcaccatgttggccaggctggttgtgaactcttgacctcaggtgatccaccctcctcggcctcccaaagtgctcggatgacaggcacgggccactgcgcttggccttgactattcttaaaatattcttgcatgcacatgcagacactgacctacacatcattaccaccactaccactcaaacagcccacctgaggggcctagctggcaaccccaggatatcccccactgaacactgtgaccctgagcatgccactgcctctataaacttcaagttatctcatctgtgaaacaagaagtcaggccaacttgacaagactcaagccccttccacgggtagcattctgagaaaccatgggtatggtgcaagagaaggacagacaaacatactctgtccaccatcctgcctaaacctttgtgtatgaggctgacaagggttacaatgggtgacattcacaaggagagaatctctcccttgttccttgcaaaagccctgggaagtaggtgcacctatctccactaaacagatgagcaaactgaggcacagaagccatttctctctgcctcctaccccacccacggcatcaccagcactgttttaaacaccatcccttcactcgagtaactaccatgtgtcaggcactatgctagaccctgggagcctcgggcacagtgtgagtaagtcccaagtgggccctctctgctagaaatcagggttgcaaatacagaccccacctcatcctcctccctctctcctcagaggtaggtgcttcagagaatcctaacattcatggagcacccaagccctctcataggaggttaacacatttctactcatgtaatcctcatcacagttctccgagttagattctatatgttatgacagatgaggaaagtgaggcgcaaagaggttaaaaaacttacaccaggtcatcccacatccaggtagtggcaacccagattcacacgcagtagttattctgatcctaagtatgtgctctggaccgctacatcctaaggcctcctctttagggactgatctcccaaggctcagagaagagccctgtctccaacatgcagcaagcctgaagcccagtcgggcggtgaccaatcgtcctggtttggccaggcccgagggagttcccaggacgccggaccttaagttttaaaactaaaacgagttggtcaccctaagtccaggactcctgccacttccccagagcaggagtgagatctgaatggaactccttcctccatgcgtaacccagaggggctgacggtggaaatcccgtccctcccctactcactctctgagccccagcctcccaggtcggacctctgggccaccacccctcacctctcagccagcgcccgccaacggtttcaaccggccgcggggagcacgtggactcgccgccgccagcccagcgccgcagctacctgcctctcaggcttcgcggtgcagaattcgcttctgaaccacccagcgcgcctgcgcaccgcggccacgccccccccagtggaagtgacgccaacggaagcaggaaggcggttccggcaagccaagggggcgttgtcgtgatgattccgcggccagcggatcgctgcgagtggccttgaaggcagctgctgcaggtgaagagtaggcggcggggcagagagcggcctccgagggtaaggtggccggccttgcgaaggcgtgcggggctggcgctggtgggaatggcccggaagggaagggaggccgggcgcccgaaggtggcccagaaggg

SEQ ID NO: 31534 - DNA, 2300 bp, Homo sapien
tttagtaaggacgaggggtgggggtctcaccatgttggccaggctggtgtcaaactcctgacctcaaatgatccactcgcctcagcctcccaaagtgctgggattacaggcatgcgccaccacacccgcctaattttggtactcttagtagagatggggtttacagggtttcaccatgttggccaggctggtctctatctcttgacctcaggagctgcctgcctcggcctcccaaagcgctgggattacaggcgtgagccaccgcacccagccctgtaccaaagttattaaatggaggaagcagaaattaatttgggagggagggtcagggaaaacttcctggaagacacatctatgctgaaatgtgagttaagtttgccagactaaaaaaatgagagggctcactttctttgagtattcaggaggacaaacaaacaaacaacaacaaccaaacccaaaaacagtacgagagcacaaacaagactgaagtacacatatgtgccctgaacacaaaaaacatcttgagcaccctgcttttaagcctcctggccattctgtcacttctgttggaaagtatttccctccttgtccatttctgtgaattccttctgttatggttaaactgttcccccagcactccagaatgtgattgtatttggagatcaggcttgtaagaaggtaattaagttaaaatgaggccattaaggtgggccctaatacaacctgactgacgttctcataaagaggaaatctggatgcaaagagagacgccagagatgtgaaaacacagaggaaagaccatgcgaggacacagcaagaaagcagccacgtgcaagccaaggagaaatgtctcagaagaaaccaaacctgaagacaccttgatcttggacttctaacctccagaactgtgagaaaataataaatttctgttgtttaagccacccagtattttgtttgcagtcctagcaaactaatacaccttctattccaggcccaacactgctcactttcagagtgaaaccttatcacccatatacacacaccttgggagtgaaggtttctcacaatactctgtgcatcctccactcaactttcattcattcatttaagcaacaaacacctagtgaccaccactgtgtgccagaccctgttttaagggctgagaagagctaacgtttattgagtacttactaagtggcagccactagtctaagcgatttacatgcaccaactcatgaaatacgacaaggttccagggacgcaggtgccgctatgacattcgctttacagatgcggggctgaggcacaaagaggccacaccgtaatgaaactgagctaggctgtgggctctgtcgtcttaagcgctactctcaactacagcgtggaaggaaacagaagccgagagatgggcagcgcgtagcggaggcgggccgggctggcttccagcgggcaaagcctggagatgagagggcgcgggtggggtttccaggccgaggaagctgcaccagggagaaggcccggctcccaggcccggaacctggccgtctgggtctcagtccgcgtcccctgtgatgcccggcacagagcaaatgctcgctgactctcgcaggagccgccaaccccccgggtatcctcgagtgcccagagacgggaaggagcggtgggtccatgcccttctgggccaccttcgggcgcccggcctcccttcccttccgggccattcccaccagcgccagccccgcacgccttcgcaaggccggccaccttaccctcggaggccgctctctgccccgccgcctactcttcacctgcagcagctgccttcaaggccactcgcagcgatccgctggccgcggaatcatcacgacaacgcccccttggcttgccggaaccgccttcctgcttccgttggcgtcacttccactggggggggcgtggccgcggtgcgcaggcgcgctgggtggttcagaagcgaattctgcaccgcgaagcctgagaggcaggtagctgcggcgctgggctggcggcggcgagtccacgtgctccccgcggccggttgaaaccgttggcgggcgctggctgagaggtgaggggtggtggcccagaggtccgacctgggaggctggggctcagagagtgagtaggggagggacgggatttccaccgtcagcccctctgggttacgcatggaggaaggagttccattcagatctcactcctgctctggggaagtggcaggagtcctggacttagggtgaccaactcgttttagttttaaaacttaaggtccggcgtcctgg

SEQ ID NO: 31535 - DNA, 2300 bp, Homo sapien
ctcagttgaccaggctggagtggagtggtgtgctttcggctcagtgcaacctccacctcctgggttcaagcgattcttctgcctcagcctcccgagtagctgggattacaggcatgcaccaccacacccagctaatttttgtatttttagtaaggacgaggggtgggggtctcaccatgttggccaggctggtgtcaaactcctgacctcaaatgatccactcgcctcagcctcccaaagtgctgggattacaggcatgcgccaccacacccgcctaattttggtactcttagtagagatggggtttacagggtttcaccatgttggccaggctggtctctatctcttgacctcaggagctgcctgcctcggcctcccaaagcgctgggattacaggcgtgagccaccgcacccagccctgtaccaaagttattaaatggaggaagcagaaattaatttgggagggagggtcagggaaaacttcctggaagacacatctatgctgaaatgtgagttaagtttgccagactaaaaaaatgagagggctcactttctttgagtattcaggaggacaaacaaacaaacaacaacaaccaaacccaaaaacagtacgagagcacaaacaagactgaagtacacatatgtgccctgaacacaaaaaacatcttgagcaccctgcttttaagcctcctggccattctgtcacttctgttggaaagtatttccctccttgtccatttctgtgaattccttctgttatggttaaactgttcccccagcactccagaatgtgattgtatttggagatcaggcttgtaagaaggtaattaagttaaaatgaggccattaaggtgggccctaatacaacctgactgacgttctcataaagaggaaatctggatgcaaagagagacgccagagatgtgaaaacacagaggaaagaccatgcgaggacacagcaagaaagcagccacgtgcaagccaaggagaaatgtctcagaagaaaccaaacctgaagacaccttgatcttggacttctaacctccagaactgtgagaaaataataaatttctgttgtttaagccacccagtattttgtttgcagtcctagcaaactaatacaccttctattccaggcccaacactgctcactttcagagtgaaaccttatcacccatatacacacaccttgggagtgaaggtttctcacaatactctgtgcatcctccactcaactttcattcattcatttaagcaacaaacacctagtgaccaccactgtgtgccagaccctgttttaagggctgagaagagctaacgtttattgagtacttactaagtggcagccactagtctaagcgatttacatgcaccaactcatgaaatacgacaaggttccagggacgcaggtgccgctatgacattcgctttacagatgcggggctgaggcacaaagaggccacaccgtaatgaaactgagctaggctgtgggctctgtcgtcttaagcgctactctcaactacagcgtggaaggaaacagaagccgagagatgggcagcgcgtagcggaggcgggccgggctggcttccagcgggcaaagcctggagatgagagggcgcgggtggggtttccaggccgaggaagctgcaccagggagaaggcccggctcccaggcccggaacctggccgtctgggtctcagtccgcgtcccctgtgatgcccggcacagagcaaatgctcgctgactctcgcaggagccgccaaccccccgggtatcctcgagtgcccagagacgggaaggagcggtgggtccatgcccttctgggccaccttcgggcgcccggcctcccttcccttccgggccattcccaccagcgccagccccgcacgccttcgcaaggccggccaccttaccctcggaggccgctctctgccccgccgcctactcttcacctgcagcagctgccttcaaggccactcgcagcgatccgctggccgcggaatcatcacgacaacgcccccttggcttgccggaaccgccttcctgcttccgttggcgtcacttccactggggggggcgtggccgcggtgcgcaggcgcgctgggtggttcagaagcgaattctgcaccgcgaagcctgagaggcaggtagctgcggcgctgggctggcggcggcgagtccacgtgctccccgcggccggttgaaaccgttggcgggcgctggctgagaggtgaggggtggtggcccagaggtccgacctgggaggctggggctcagagagtgagtaggggagggacgg

SEQ ID NO: 31536 - DNA, 2300 bp, Homo sapien
cttaagaatatctgtcgtatctgtgattttttgctgtaggtcacctgaatggttgagcatggaccctgttgctacccacagctgccatctgctccagcaactgcatgagcagcgaatccaaggcctgctttgtgactgtatgttggtggtaaaaggagtctgctttaaagcgcataagaatgtcctggcagcattcagccagtattttaggtgggtattttagacttcattctcctagctgtgaattaagggtaaagctcttttagtatggaagtattcatattttgttctccttggatttcactatctttatcttttatagcacattggattttgtaggagttgttttaatttttaagtttgttaaccatttttattatttttgcttttgtgtttagagtaacctgaaaagaaaagaggctcttaagtaaaatgaatttgggatgattgaaagtattttggttgtttgtctttcattttactaattctggctaatgtcagtcttctacatatatttcttatcctttcaagataaaatgatggaggaattaagttcccggtcagaatttttctgtgataagaaatcaggggaaaaacatatttggtgttggatttttcttttcttttttttcttaattaaagcattttagtttttgtttctcatttgaatattctaagaaaaccttataatcattttggcttatatgaaatatttatttataaataataatactaagaagttgtgtttcagcttatttaaacattattctgtattcccagctactcaggaggctgaggtggaaggatcccttgagcacaggagttggaggctgcagtgagccgtggtcatgccactgtactccagcctgagcaacagagggagactctgtctcttaaaaaaaaaaaaaaattgttagagttaagtgattctgcataagttcattttgttgttagcaggtttctctctctttaaatacaaagtcttttttttttaaagtactttttgtttccaaaatgcataccgttttactgctctagtagacaacgtgggacatgatttgctctttccttgataatcctgaatcatcaaattgagtctcagttattgtatagaccacattacacattgtaatgaatcagcttcttaaggtaggtagcaggttttgttcctaggaaaaatggtcgcaaactcttgggtttgctatcacctgttttttctgtcttcccaggacagttaaattttgatattgtgatacacaggctgttttgcgcttaaaaacagaactgaaggctgtttgggggaaataggtgattgtatttgacaaaatgtcttcaacttacttacctgagcttattatttcatacataatacaaatttgttcacctgtgaccttggcttgtacccagaataaagtgcctgggctttagagtgcattttggtcttcactaactcttagggtttttctcactgttggtttttgaaccactggctggctgaaaaacctaacagccaaataaattactggttacaaaggaatgtatgtggagggttggtttattctagctatttttttttaagttttctaggcacttagatgtggaaatatttgtgtatatggtttatggcctaaaatataatacttgtcagactatgaaatagtgaaaagtatatattatttaattttgtgtactctattagtatgtatttaatatatatggataattacctttcgaaaaaatatttagagcaatcttttatttcttagatcatattgggaattatcttagaaacttcttgatttgtggtttatcagtcatataaatgtatgtaattttttattgtgtaaatttgagtatatttcaaaatttactttgagatatattttgaagtctgcatacccaatccaccaatttaattcatctgaattatttagttggatggtttgccaggttgttttaaaggattaaaatgtacttatgttaaaagttttgacattcacagaaggatagtattttttaatattaatatatgaatgttatttataagaaaaagatggtgtgaatttttggcactgtaaacagatattctttcttttaccaggagcctctttcagaattcttcaagccagaagaatgatgtttttcacttggatgttaaaaatgtcagtggcatagggcagatcctggacttcatgtacacttctcatctagatcttaaccaggacaatatacaagtaatgctggacacagcacagtgtttgcaagttcaaaatgttctgagtctgtgtcacacattttta

SEQ ID NO: 31537 - DNA, 2300 bp, Homo sapien
aagcattttagtttttgtttctcatttgaatattctaagaaaaccttataatcattttggcttatatgaaatatttatttataaataataatactaagaagttgtgtttcagcttatttaaacattattctgtattcccagctactcaggaggctgaggtggaaggatcccttgagcacaggagttggaggctgcagtgagccgtggtcatgccactgtactccagcctgagcaacagagggagactctgtctcttaaaaaaaaaaaaaaattgttagagttaagtgattctgcataagttcattttgttgttagcaggtttctctctctttaaatacaaagtcttttttttttaaagtactttttgtttccaaaatgcataccgttttactgctctagtagacaacgtgggacatgatttgctctttccttgataatcctgaatcatcaaattgagtctcagttattgtatagaccacattacacattgtaatgaatcagcttcttaaggtaggtagcaggttttgttcctaggaaaaatggtcgcaaactcttgggtttgctatcacctgttttttctgtcttcccaggacagttaaattttgatattgtgatacacaggctgttttgcgcttaaaaacagaactgaaggctgtttgggggaaataggtgattgtatttgacaaaatgtcttcaacttacttacctgagcttattatttcatacataatacaaatttgttcacctgtgaccttggcttgtacccagaataaagtgcctgggctttagagtgcattttggtcttcactaactcttagggtttttctcactgttggtttttgaaccactggctggctgaaaaacctaacagccaaataaattactggttacaaaggaatgtatgtggagggttggtttattctagctatttttttttaagttttctaggcacttagatgtggaaatatttgtgtatatggtttatggcctaaaatataatacttgtcagactatgaaatagtgaaaagtatatattatttaattttgtgtactctattagtatgtatttaatatatatggataattacctttcgaaaaaatatttagagcaatcttttatttcttagatcatattgggaattatcttagaaacttcttgatttgtggtttatcagtcatataaatgtatgtaattttttattgtgtaaatttgagtatatttcaaaatttactttgagatatattttgaagtctgcatacccaatccaccaatttaattcatctgaattatttagttggatggtttgccaggttgttttaaaggattaaaatgtacttatgttaaaagttttgacattcacagaaggatagtattttttaatattaatatatgaatgttatttataagaaaaagatggtgtgaatttttggcactgtaaacagatattctttcttttaccaggagcctctttcagaattcttcaagccagaagaatgatgtttttcacttggatgttaaaaatgtcagtggcatagggcagatcctggacttcatgtacacttctcatctagatcttaaccaggacaatatacaagtaatgctggacacagcacagtgtttgcaagttcaaaatgttctgagtctgtgtcacacatttttaaaatcagccactgtagtacagccacctggcatgccttgtaatagtacattgtctctacaaagcaccctgaccccagatgccacttgtgttatcagtgaaaactacccccctcatttactgcaggaatgttcagcagatgcacagcagaacaaaacgttggatgaatcgcatccgcatgcttcaccatcagttaatcgtcatcactccgcaggtgaaatctcaaaacaagctcctgatacttcagatggcagctgcacagaactgcctttcaaacagccaaattactattacaaactcagaaacttttacagtaagcagtaccataaacacgcagctggtcccagtcaggagagagttgttgagcagccttttgctttcagcacctctacagaccttaccacggtagagagccagccttgtgccgtcagtcattctgaatgcatcctggagtctcccgagcacttaccttccaacttcctggcccagcctgtgaatgactctgccccacaccctgagtcagacgccacatgccaacaacctgtcaagcagatgaggctcaaaaaggccattcatctgaagaagctcaatttcctgaagtcacagaaatacgcagagcaagtatctgaacccaagtcagat

SEQ ID NO: 31538 - DNA, 2300 bp, Homo sapien
agcctggccaacatggtgaaatgccatttctactaaaaatattaatacaaaaattagcctggcgtggtgtcaggcatctgtaatcccagccactcaggaggctgaggcaggagaaccacctgaacctcggaggcagaggttgcactgagccgagacaatgccacttcactccagcctgggcgatttttttctttttttcgagacaaacacccgaatacacaaacacctttagaaaagatgtttctaaattatagattggctgtgttagatttatgaacatgtagtgaaactgatgaggagagctgtggtttctcagcatgggcttggcaggtgcctacggcacccatgtgcagggagactcagtgagaatcgaaggactgacactgagatactcaaaacccaaaggctgtctgctggaggggtccgcagctggagaagcacctcccacaggaatggaaagccttccagagtgagcagaagctgtgaggtgaccccctctcctcagatcagggttgttcagtgtcttgggaggggaggggagaatccttccagaatggccactgtaaaagcatctttttccagcctgggcatcatagcaagaccctgtctctacaaaatgtatatgtatattagccaggcgtggtgtcatgcgcctgtcgtcccagctacttgagaggctgaggaagaaggattgtttgaggctaggagttcacgaccagcctgggccacatagtgagaccctgtttaagtaaataaataactgtttttctttttccagggaaatgttttgggggatcaggtgacctccgcaggcatgtccgcactcacactggggagaagccgtacacatgtgagatctgtaacaagtgctttacccgctctgcggtgctccggcggcacaagaagatgcactgcaaagctggtgacgagagcccagatgtgctggaggagctcagccaagccatcgagacctccgacctcgagaaatctcagagctcagactctttctcccaagacacgtctgtgacgctgatgccagtgtcggttaaactccctgtccacccagtggaaaattctgtggcagaatttgatagccactctggcggctcctattgtaagttacggtccatgatccaacctcatggagttagtgaccaggagaagctgagtttggatcctggtaaacttgccaagccccagatgcagcagacacagcctcaggcctatgcttactcggatgtggacaccccagccggtggcgaaccactgcaggccgatggcatggccatgatccgttcctctctggctgctttggacaaccacggcggtgaccccctgggcagtcgagcatcttccaccacttataggaactcagagggtcagtttttctccagcatgactctctgggggctagcgatgaagacgctgcagaatgaaaacgagttagaccagtgatgtaccgcgcttctccacggtagaggcgtgttctcagtttagcaggctggtgttaaggctgtaggaggacccagtttccccatgacagtgccttctaactagccagagaataggtagcttccctcctgatgatggctcataatctgaagcatcttgagctgggggtgtgagggggagggcctgctggctcaccgtgaggcagccgcgggagggagcgctgacgtcacagaagcgaaggcttgatgctgtctcagcagcctcagctgtgggggggaagcgcgtgtgcatcgtgtcaactactgtacatgttggtcatgtgaaaggaattatatatgtatagtattacaagtatttttgcatttttacaagattgaaatttgtagcattttgtattatttacacagaatttatttgtatatgaaactcataccataatttaattcgaataaatgaaacttttctatatattatatgtttcctctagcatttttattaatctaaagactataggggtataaaaataaatagcagcgaggactcactctgcaaggataagaacctcattggtcagtctccctcctggtacagcgggtttctcagtggtcagaactgcctgactcctggctgccacttactggcaaggtcatgggtgagctgttcaccctctcaggatcttctctggagtttcttttttgcagtatgagaggaacatcttccagtattttcacaaggcttgtctgatctgagcactcacttgaaaatacctgcccggcgcctggcccttgacagggcgttctaaatatttacttccccttcccagcgggcttgacagcctctgcaggaag

SEQ ID NO: 31539 - DNA, 2300 bp, Homo sapien
tgttgcaagaggagggaagggatgattgaatagggagaaggctatgcaatgccacctgcaagcatcttgaagcccaggcacagcttttcttctccagggaggagcagacaaggcttagacagaaccaggtgtggggagtgggatggacgggattgggggagtgattaatcagcagatgagagaatgtctttcctgtggccagccaagggttttgggaggtgccactaggagggggtatccactggcccaggcagagggtagatcaaagtttgggaacctggggagaggagagaagctgaactaaacttgagtcaatcagatgaatgaacaagtccagattgatgagtggtgacacacagtttagctaatctttgacgaggcaaagaacgagaatttggaagttctgtgcctggccttgtctcaaacaaacaagtcgtggatgggcatctgtgggtctcgcccacgtccactgggaaacgttgattctttgcggtaagctgcttcctggaacacgaaaggggtgagggtatttcctaatcctcgctgttttccgggagcacagcctcaagtcaaattcagcactgtcctttcaaataggatggaactgagaggtattatggagtatctgattttttttttctggcacagagggggccactaataaacatccattgaagaatgaatgaatgaatgagttggcagaagggagcaaccactaggagctggagtgatctgagaaggcttcatggaggaaggtggtgtttgaggtggaccttaaaggaagggtacattcaacgaacaacacattaaggatcccaataaaacagttccgagggtggggaggaaggagaacgcttatgtactgggtacacattacacaagagaccttgactgggtccttcaggaaaacagaaaccactctagttttttcaagcagaaaggggttaagacaaggagaaattcattgctgacagagctgttggaaggtggggaggagcgaatgtcaggccccgctttgatgtctattcttccaggaaccgtttctctccttttccctcctctctgtttttgccatccttggtcatgagcaagtgagcctctgggactcagcctcctcaaaagcaaagccagagtcctagcctctgccagcccagggccaagatgcccagcaggggccttctgtatttgagatggattgaagctctccaatcgctatcttgatgcattccctgccaataccccagggatacaattatgcaaccgcgcttttcaaacagacctcccagctgtgcaagcaaaatcaaggggagcagggctctgatccagctcaccctcacggccccactcctctcatcagcctggcaacgtacagggctcaggaggaggaggaggtgatctagagctggtcagagacactaggcccttcctggagccagtgataggccagtgggcaggacaatgcctcagatttcagaacaatgctctgctctgagcaggtcaaggtgatgggtgggacatcagaagcaactcaggatgcccacaggttgttcccaggcgatagtatccccaaggcccagggtcaagcaacagcaatgtggctgaacaggaagtagaagctgggtccctcagaccccactacacctgtgctgagccctggacctagttcccaacacccctccctccggccagacagaatctctgcagatcccaccatccatgcaccccccccatacccctaccaccatgcctctgctcaagtccctcctccagggcatccctgccttcttcccatcccctctacctttctcggcagttactgtacaataagccctcctcacctccacccaggggacggggtcacatctaggcagaacagcatcatggtcaacctgaaaaaagacaccagagaaaatgatctctaaatatgtggagcttactcgcgagtaagaaataaggatggtaatccggaatgcatgcaagccatcagtgcattcggcgagggaagggtaaagagccacttttattgggaaaaagagatttacataagctgcttagaaacagagttcattggttcccgaggtcgaagccagagttgttgtcagtgctttggtggagacgccagtgctgggcgaatgttcttccgagagcgccttatctgcgttgctgcagtcctgcagaatgtcgagtggtaagtctcatcaaagcaggagctgtgtgaaggacgcgcaagggtttctgatggggttttagaaagtccttggaaacagttcttatctcagatatggaagtgcgagcctctc

SEQ ID NO: 31540 - DNA, 2300 bp, Homo sapien
gtctctgcctccgttgtcacatggccttccttcctctgggtctgtctctgcatctttctttttttcttttgaaaaatttaatctatttatttattttgagaccaggttattagactggctaatttttgtattttggtagagatgggttttgccattttgtccaaactggtctcgaactcctgggctcaagctatctacctgcctcggcctccgaaagtgctgcattacaggcatgagccgtcgcacctggcctctgcatctctgttcttttctttgagacagagattcgctctgttgcccaggctggagtgcagtggcgcaatctcgtctcactgcaacctctgcctcctgggttcaagcaattctcgtgcctcagcctcccaagcagctgggattacaggcatgcactaccatgcccggctatttttgtatttttagtagagatggggtttcaccatgttggccaggttggtctcgaactcccgacctcaggtgatccgcctgcctcagcctcccgaagtgctgggattacaggcgtgagtcatcacgccaggccttttgttgtacttttaagaagtcaaaagctggggcagggatcgggggaggttgggaggtggatgagggataaaagacaacatattgggtacagtgtacactgctggggtgatgggtgcactaaaatctcagaattcgccactaaagaactcagtgatgtaaccaaaatccacctgtactcccaaaaactattgaaataataaaataaataaaaggtcagaagcaaagagaattaacaggcaacccacagaagaaaatattactagttaacatgcctgcaaatgttttcaccccctggtgatcaaataaatactaactgatgtaagatgccatttcttggccttcattagtgaaagtttttgtaaatggtaattgtgaatgctggaaactgtttcttgaacagtcactttcctacattgctgtggcctcttttcgggaagcaattggacagtgtttcccaggggcggccaaaagatccattccatttgattccatgattccacttctaaaactctctcccaaggaaataatcagagatgtggtcacaatttctatacaaagatgctgttacaacatctgaaaaaaaaaaaaaaaaacagtggcagaaacaaattaaaactagcttaaatgtctaaccataggcattgataaaataaaagggtttttgctaacttagaagaatgcttatgctaagtgagaagggatgcaaaattgtatatccagtgggaccacaaatgtgtacaaaattgtgcagaataaaaggacttgagatactcatgacaagagtcataaagagaaaaatttccaagtatgacaagggcctctctctgggacagatatggggccatgtcatatactattgttggagcacagaaaacaattccccacaatatgacacttcccatgcagacctgaagaagcagcctcaaggtctctctgatccctctcctcctgcctgtcaaccttctgtctctctcaaagcactggaggaggctattctctgacgctcccctatctacctagaaaacagacccctagtgaggaacacagctgcctctgttgacttaaaaggaagaagctgaggcaacattcatttaagtacaaagtttatttgggccaagcttgaggattgcatcccaggagcatagattcaaattgctctgaatatacactccaattagcagcagttaaaagtaaatttttaaaggaaaagaagaggcagttcctgagttgtttatcaagaacgtgtagtaaaataacaagttttgattgggtataggttgttctttttatcacacatttcaggaacatgaagataatgagtgaggcagctaggcaggaacaaaataactttttttttcttttctttttttgttttttgagacagagtcttgttctgtggcccaggctggagtgcaatggtgtaatctcagctcgccacaacctccacctcctgagttcaagcgattctcctgcctcagcctcctaagtagctgggattacaggcatgcgccaccacgcccggctaatttttgtatttttagtagagatggggtttcaccatgttggtcaggctggttttgaactcctgaccttgtgatctgctggtcttggcctcccaaagtgctggtgtgtctggaattggttacttctggtgcgttcttcgtctcgctgacttcaagaatgaagccacggaccctcgcggtgagtgttacagttcttaaagatggtgtgtccagagtttg

SEQ ID NO: 31541 - DNA, 2300 bp, Homo sapien
actggtccagggggagatcgcatcccattgattttccctttttgtatgttgtgaaaatacctgacatctgtttgacctgcaaccaccattgcagcctcagccatccccattttggtggctgtggcttcttcaacctaatttctgccaccctctgtgaatgacttgggttctccaaatcaccacacccttgcaagcttaatgcctgtagtgagctgaatggcgacccttaaaagatatgtccacatgctaaccccgggaacctgatttaccttacatagtaaaagagtgaacattatcttatatggcaaagataggattaagttaaggattttgagagggagaccttatcctggattatcccagcaggccctaaatcctatgatgagtgtccttataagagacacagagaagaggaggaggcaatatgactggagtgacatgaaggcagagattggagtgatgcagccacagtcaaagaatgtctggagccactggaagctggagggggaaagaacaggttcttctctgtggcttgtagagggagtgaggccctgctgggacctagactttagacttctggcctccaaagccaggagagaacatgtttctattgttttaagccaaatttgttccaacagtggcaggaagctcatatactgtcttaacacattctgttctcctacctggaatgccttcccctctgcacgcacctctctcaggcccacctgtaggaagctttatccacagtctttacccacagtctctggatgtcctccctcctggcaagaggcagaggccactctcccacagggccactgctcccagcaaagacttgcccttgtccgtagctccctgcgggtggcgctgtgtctcatgcattttgcattgtccatgcccttcacagggcccagatacaatcagcagaggaagaaaaccacaggatgaaacagtcccaatgaccagcaccagtgaagacccaagacagcacaaaaggccagctagcagagaaacatgattgttcaccgtccatctctgggacaacctaggtccttcttgcctttctgtcctcctcagttgacagagtctctaagggaggggcagggcctccactttgttcctcctggtgtggaattctgaccaagtgtgtgtgtgtgtgtgtgtgtgtgtgtgtgtgtgtttgcgcgcgcgcgtgtgtgttgggttctgttaaatgcttgagcctgagacggggggcggggcgggggggggtgcgggaaagccatttccttgcttaagcccaaagggtttctcctgaccagtgggtcactctcatggcagatgcctgggcagatttctgaagtggagcaagagaaatcttctcttcttcacctgcttcagggaggcatcaaagtgccaaaaaggtgggttctgtgggtccccgaggcccgtggcaggggccagagtctgacacccgctttccctgggttgggggcggggtgcctctgccaggagcctgggttcagaccaggctggcctgtggtcaaaggcacacttagaccctggctggagagttggggcgagttacgagatacccactaggtcacctgtcaaagacggctagccctcctggggattttgaaatcagggcacccgcggcaagttcccaggctgtgcctggggctcaaggcggtggctgctcctgtgctctgggcttattcccaggattctcagacggctgatggaaaacgccccggaccctccgtagtgccgcggggaagtccccggaaagggtgtgaaaaagtatcgaatttgggtgatgcctcctcctcgtccagcgcctgacagggcccagctcctggcccaggtgcccaggaggcaccgatccccgcagccggcctcctcccgcgcgggctccactcccatttcggcctcgcccccacaccccatagtctttcatccgtgagtcctgcaggcaggacgggttggaggtctgcaaacaggaccctctctgggaagccgcgacagcggctgagctcggggtttgggggcgcaggtcgggctagaaccaccccccttctctccgcgtccgggcatcgtcccagcggcccctcctctgtgcccaggatgctcgggcggcggctgcagtgggacctccaccttctctgccaaccagagcggaggaacctttccgcctccctccaagcggcgcactgagcgctctttgcctagaacgacttccctcccgctgcctggggcagcctcaccctgggcgcccacaccccagccctgggagagcgctactccgcctcccgcaccaccga

SEQ ID NO: 31542 - DNA, 2300 bp, Homo sapien
gtcctccctcctggcaagaggcagaggccactctcccacagggccactgctcccagcaaagacttgcccttgtccgtagctccctgcgggtggcgctgtgtctcatgcattttgcattgtccatgcccttcacagggcccagatacaatcagcagaggaagaaaaccacaggatgaaacagtcccaatgaccagcaccagtgaagacccaagacagcacaaaaggccagctagcagagaaacatgattgttcaccgtccatctctgggacaacctaggtccttcttgcctttctgtcctcctcagttgacagagtctctaagggaggggcagggcctccactttgttcctcctggtgtggaattctgaccaagtgtgtgtgtgtgtgtgtgtgtgtgtgtgtgtgtgtttgcgcgcgcgcgtgtgtgttgggttctgttaaatgcttgagcctgagacggggggcggggcgggggggggtgcgggaaagccatttccttgcttaagcccaaagggtttctcctgaccagtgggtcactctcatggcagatgcctgggcagatttctgaagtggagcaagagaaatcttctcttcttcacctgcttcagggaggcatcaaagtgccaaaaaggtgggttctgtgggtccccgaggcccgtggcaggggccagagtctgacacccgctttccctgggttgggggcggggtgcctctgccaggagcctgggttcagaccaggctggcctgtggtcaaaggcacacttagaccctggctggagagttggggcgagttacgagatacccactaggtcacctgtcaaagacggctagccctcctggggattttgaaatcagggcacccgcggcaagttcccaggctgtgcctggggctcaaggcggtggctgctcctgtgctctgggcttattcccaggattctcagacggctgatggaaaacgccccggaccctccgtagtgccgcggggaagtccccggaaagggtgtgaaaaagtatcgaatttgggtgatgcctcctcctcgtccagcgcctgacagggcccagctcctggcccaggtgcccaggaggcaccgatccccgcagccggcctcctcccgcgcgggctccactcccatttcggcctcgcccccacaccccatagtctttcatccgtgagtcctgcaggcaggacgggttggaggtctgcaaacaggaccctctctgggaagccgcgacagcggctgagctcggggtttgggggcgcaggtcgggctagaaccaccccccttctctccgcgtccgggcatcgtcccagcggcccctcctctgtgcccaggatgctcgggcggcggctgcagtgggacctccaccttctctgccaaccagagcggaggaacctttccgcctccctccaagcggcgcactgagcgctctttgcctagaacgacttccctcccgctgcctggggcagcctcaccctgggcgcccacaccccagccctgggagagcgctactccgcctcccgcaccaccgaaaacctcctcctcctttacgggccgcgcctcctttacgggccgcgccccctttatacgcggacgcgccctcttttggtcgccccctccccaacccagcactaaggagcaccctgctctggtctccgccaccacccagcgcctcctggacccatccccccaaacccttgaacgtcctcaggacccccaggtgagcgcggcgcgctgcgggcggggaccctctctgcacctccccgcacccctgggggtcgctctgtccctacggtccccgcctcccctttctcctttctaagcgcctcgcgcccaggccgccgcccggggtggcgcagcccgcagccctcccgctccgggcgccctccgccgctccgagaccccctgggggcgcgtcctctcccgctcccctgttccctcccccggctcagggcgggcgcgtggtcccaggggaggctcccgcccagccccgcactcctttgtgcggccgggcgggcgctgcgtcaaggtggaggcgcggccacacgcgcgcacccacccgcgcgcacccagcccccgggagaggcaggaagggaggcggcggcgcgaggaggagggagcggccgtggagcccaatcgttcgctccccttcccgggtccgcgcgcggcgccgcctccgccattgctgcgagcaggagcaggagacgcggagctcggagcgctcagctgacctgccggagccgggcgtgggtgagtgcggccggccgcgcctgggcttgccgaggccagaccttgcccgcc

SEQ ID NO: 31543 - DNA, 2300 bp, Homo sapien
actttaatttgttacatatagaggaccaaggtagttttttaaaaggaggaggagaaaaaaaggaccatttacaggtaaataaactgaggtcttaaaacttgcttaatgaaatcatatagctaatagttgcagggttcagacaacaacctcgtctcttggctccttctctggtgctttctctaccagataacatctgaccatctacagggcaaaattcaaactctgcaatgatacacaaagccctttaagatctccgcgtccaatttttatgagagtcccacattccagtctcactcaaatgtttattgaaccaacttatgtcagactgttacctacctccacagcttagcgcatactattctcttagcctgagatgtccttctgcactggaaccaactaatcctctttcaagatttgttttaggcatcatcgcctctataaagccttttctggtcctcaggtagaactgaccacattctttttgtgccctacacaacacctgcaaggctttatggcacttgttttatgtctatgtccgtctactccaccactgcttttacatcatattactctaacacgaggctggtcagaaggtaggtgcttcatagacggtcatcaatagggcgagtgtattcatctggtccaatcccctttctaatgtttaagtatcctctgctaactgtcattaatgcatgcatgactacattcattcaaaaatatctgagtgtctatacagtgccaagtgtatgccaagcagagaaggatttactgtgaaattaatgaggcttaagctttagggtccctctcttcaatcttccaaagctctgaatctttcttggtgatttttatttcttgaagagggcagacagaactatataagctgtaggccccacaaaacctagatacctccttggtgtcacgaacacaaaagggaacaagacaaacagctctccccttatggagttttctgtttaatgggaaagacagccatttgttcattcactcattcaacaaacatttactaagcaatgctatgagtcatgcattctgagatgaaaacaacactgtccctgcccttaaggaaaaggttcctgttcccagggagatgaagggacacctgctctgatcagggaacagaaagtagttgaggtgactgtaacactgtgtttgcgaaagattaccctaaacccgtctcaagaggaactgagtcctacttattgcagagacaaagggaagaaagagttcggctgaatacagtttttaatctcaactaggggtgggaggcagacaagtaaatagaacaggcaaatatggtgtggtcagtgctgcaacaggaagcgaaggactgtcaggaggtttcccctgagtgcaagtctgtagtgacggcgaactcatgacctcacaaagccgcccatgcactttccagatagagatttctgaggatctcctttcttgtcccccaatccctgtcgccgcaggagaaatctgttccccaatatgcgtcccccttcctcaaaataaggctgttccttcccccaaaaagctgtagggtctctgaggccaactcttctgtcccccttagagccacccccttcacacaatgcttacgggacggggtctggtttggggcccggggtccctgtcgcaggactgccccctcctcaacccgccgtttccatagcaaccagctcaccacttcgcgggcccggctggagaagtcgcccttgggccgggggctccggcggaacagctcgtcccggctgccatcgaccccgccgcccaccgccactcccagcgccttgttccgcgtcttcacggtcttgacgctggcccggaatagcagcgtgatgtccaccgccatagcgacccgcaccctcagccccacactaggcccgcccacgtaagcagccggcgaccgcggcgcgaacccggccgctgaaggactggtcctgccccacacgcctccccccggcaacggcgacgcgagaagaaaggttccggcctgcgccctgctaccgcggcgggaggaaaaaggttccggcctcagccggcgcacctggcggaggaggaacctcgcgacgcgctctcgggcatcggtttctcccagcaaagcttggagggtttagctgcgcggagagctcagcgagctcttctgtgtctgtttggggcgtgtgggctccgggagcgtgaggaccgggaagctaggaggctccttcccttctggcggctccctcactgagaccgggcggtttggttgcgggggaagtggagacgagccacccttgacctttgactgcaag

SEQ ID NO: 31544 - DNA, 2300 bp, Homo sapien
tcccagttacctactttgtactttcccggccccctccctgggttctggcttctcttttcttccccccaattcaatccccctcactttattatgcagggcaatctctctttccttctactctaccccaggcttaactttgcatggccaaaaactgattaatgtctggattaaacaaagggccatttatgcaagatagaatcattggcagagattttgtaatttctttctcttttcctcagtaggtggaagaaagctgtatggaaatttattttccttaaactgcaagaagtggctacagtttgggtttaaataatcttttcctggccgggcgcggtggctcacgcctgtaatcccagcattttgggaggctgaggcaggcggatcacgaggtcaggagatcgagaccatcctggctaacacggtgaaaccccatctctactaaaaatacaaaagaattagccaggcgtggcggtgggcgcctgtagtcccagctactcgggagactgaggcaggagaatggcgtgaacccgggaggcggagcttgctccagcctgggcgacagagcaagactccgcctcaaagaaaaaaaaaatcttttccttcctcctttctggtaaatatatactttcttgacatctatttctgataaactttatttttttaacacagtggttctcaaacttttggtctcaactcttttgcacacttaaaaattattaagggctctaaacaattttggtttatattgacattatcgacatttactatatgagaaatcaaaacaaaaacttgatgtttttgaaagtctttttttggagtctggcttaatagaaaacagctgttctgcatttactccgttgcaatatcacagtctccagcaaactcaactgtatgcaactcataagaaaatcagagcgaaaaggcaaataacatcttagtattgtgaaaattttatcttgatgaccattaaaactgctgttttaatacatattctacttgtgcttcctctttatgaaaaaagaaatcttgaagaaatcaatgagattttgaattaaaactgaaccataggccaggcacggttgcacgtgcctatagtcccagctactcaggaggctgagtccgggaggatcgtttgagccctggcgttccagctgtagtgagctaggatggcgcctctgactagccactgcaatccagcctgggcaacatagtagacccccgtctcaaaaaacaacacaaaacagaacatgaacctaaaatgcagaagaaactcattgattgagttgtcaattttaatagctatggctcaagacggtacaattaaaaactatgcatgaaggatgaagagaatccagcggcattagggccactctttcacctttgtctccatctaaacttcctattcatccttcaaatctctgcacaggtgacgccttttctctaaagcctcttcctttaccacaaataacagtgattataataataacattattaacgattactaccatttattggccacttactaggagccaagcaacatcaaaacacagcacgcgtcagctcacttaattttcacagtaaaccccgaggaggatgctggcttcactttaaaaagaggtgactgaaggttggagaagaaaggcctctggcctctagctctgtgccttgcacacctgatctgtctcagcatttattgcatcccgagggtcaccgtccacgtgcctctatcctgctcaaggtgagttcttgcagtcaaaggtcaagggtggctcgtctccacttcccccgcaaccaaaccgcccggtctcagtgagggagccgccagaagggaaggagcctcctagcttcccggtcctcacgctcccggagcccacacgccccaaacagacacagaagagctcgctgagctctccgcgcagctaaaccctccaagctttgctgggagaaaccgatgcccgagagcgcgtcgcgaggttcctcctccgccaggtgcgccggctgaggccggaacctttttcctcccgccgcggtagcagggcgcaggccggaacctttcttctcgcgtcgccgttgccggggggaggcgtgtggggcaggaccagtccttcagcggccgggttcgcgccgcggtcgccggctgcttacgtgggcgggcctagtgtggggctgagggtgcgggtcgctatggcggtggacatcacgctgctattccgggccagcgtcaagaccgtgaagacgcggaacaaggcgctgggagtggcggtgggcggcggggtcgatggcagccgggacgagctgtt

SEQ ID NO: 31545 - DNA, 2300 bp, Homo sapien
acagacagaaacattggcaaagggtggggaagggcaggggtagttgggttcaaaggaaaggaaagtaggaaagcaagacatggagtaaagcaaacagacacctgtcaactagatagaccctcagctcatctctcacggggctgtctgtctgtccacgtgcctgtagaaccacaaatccagccctaacatatacctgagatactttgggaaaaaatgaacctgctgatatctgggggcatgcagggaggcaaatgggatgcagaagcaaattccatcccaacaagatgagatatcatcagcctgagggtcccctaattgtccccatacgagtcttcttaattaattcaagacaagtaaatgatacgaggcctcataggcttcgcggggcagcttcctggtgactaatatttgaagcaataaaaggagccagagcattcctgcttcttaatggtctccagtcatccccaccctcgacccagccccacacagccccagcctcctccggcttgggtcagaaaatagcatggaccaactttgggatgcttctggctttctggtcatttacaaagtgcgttggcatcttttcccttgtctgagccttgtgtaaagtcaggtaaaaaacaggagatttgccagggcagggagtatgattcccatgatacacggaagggaactgaggttctgggagaaaagtgagttggtggagccacactgcgggaagagaagtgaggactggattctaggcctggggagacgctttcctttcatctcttccctccctccaagtagaggcttgtgaagagctcaccagaatatctcattctgggttctgtgttcctagggaatgatggtggtcaaagaagccaggtaacccacagatcccagtacccacagatcccggaaacagcccctccaaaccacggagcggagtgaaggaggcagtgtccagatcgcagagggctttcatgcccactttctcccaacggccttacaaatgaccctggcaaggcatgcattcacccaggtcagagctcaataaatacttgtggtgtgagtaaatgagccccaggttataactggggaaattgaggccaggagaaaccaggtaaagtcataaagaagagccagaaccccacgaccagtcatctgatgctccctccaccccatcacccctcaagggcctctgcaggcagcagtttaatctgaagcaaatcctaaaatagtcctcaagaagatgagcacatcccagctctaattcgccctccaagtgcctcgaaagatcttttctaacaaaaacacagaaatgatttttacaatccaaccaaccatcagctccatgaaccttgagagagacgggaaggcagccgcaacctctgcgaactgaaatgtattgtcagaaggatgtaattacaagtatttatgtacactgattctgaaccagagaatcccgggatggctctggggccaaaaaaaaaaaaaaaaaaaaagagagagaaagagggagagagaaaaaaaaggcttaaaaactcctgacaatgagcaattcttcatggaacaaaactattacaatagccagcctttgatcttgcccgtctcctgttgccaattgtattttgtcaccattggactgtcacccgcgagggagcacttttgaattaagcagtctacagcaatttagtctgcactggctttgaagtgccaacatcagtcaggccaggactaacttttttcattaaaaatttttcagcttctctaagggagctttttgccttttttttttttttttttaagcctgccgggacatttagataagttgagcctccaacccgtggccccaagacatcaaaaggcgcggggtccagtaatgctggaggcagccatcactaagccctaatggagtgcttcattaagatcgcttcaaaggcccccgtttacagactcggagattgactaatttacacattgtgggaaaattgctaccagctctgcccacaccccagcagggggagagacgccctctttctttgaaaggcaagaactgcaaaaggcccctctaattgcagactggcctttacaagggaaaaacccaggccctgccctaaattttgcattcggctgccttagcactctgcgtcctcgcaccgaccctggggtcctgtttgtccggagacagcgtggcaccaacccagctgtgtgtgctttggagctggatactcctaaacacgtttgggtttgaactccagctctgatcctgccagcgaggagccttagagcaagtgacttaaccttctgggcctcag

SEQ ID NO: 31546 - DNA, 2300 bp, Homo sapien
gaggttggagtgaactgagatcgcgccattgcactccagcctgggcgacaagagcaaaactccgtctcaaagaagaggaagaggaagaagaaggaggaggaggaggaggagatgaggaggagaggaggaagaggaggatgaggaggaggagaaaagaggaagaaaaagaggaagaggaagaagaagaagaagaggaagaagaggaagatgctgttgttcgctgtcctggctgggctaccagcaaggtatttgccctacagccttgctcagcctcagcgagctgagcttcaaaattgggtcttaaggtcttctatccttgtaccctctcgggcaaacctccggaggccccggtgcaccgcgcgtccagccggcccaactcgagctagaagccccaaccactgcccagtgcctgagttgcagtcttgggtcctttagaaacctggagatgtgcgtaaaattcagatgccggtattcccgaacttccccaggcctcagcatatctcggcggcctgtggacagatgggaggctaccaatcgctccggcgtccgcagcccgacccctgccgccagaccccggacgtcttccggataataaagttcccgctctaattcattttccctaatctggacgcccctaatctacagcttttattgcgcccagttaaaagtcgagggaattcgctgtccctccgcgctcggataattacccctaaatggccacggcagccccttgtgtttcctggagattagaaccccgcagtcatcaatggcagggccgagtgagccgccaatcacctccgctcactccctgagagccgctggcctgggccgcaggaggagaggccataaagcgacaggcgcagaaaatggccaagccccgaccccgcttcaggcagatcttgcatctcccctgaccccaactcattttttctgtctttattattattattattattaacagcaaacattaaatcacgttttctccgaaattggcaaaagaagagttctcaagtcccacactagagtccacctccaggaactttcctcttttcccagccccctcccccaaatgtgcctctcccctccaggatcagcggcccagagatagggacatgtcattgtttccgaggacgcgttgtttgaggtcaccttaaggccagatcggtgtttcattgacgattctgttggttttatttcagtaagttctatatcaaaaggatctggcagctcctttccccgcccgggcgctataggtgttgtgacccttgggacagaagttcagagcgagggtgggggggggggaatacacatcgtgtatgaaaaccgactgcagattctagataatcttacgtattctcacatccttggcactacaggaagctagcttcttcccgcaaggtttactccagctctaagttagagacaaaggcccacttttacctcgaggtaaagtttacaagatttcagaacaggaagaaaatgaaggtttggttttgtttcgtttcttgaaaagaagttaatagtatgtctttctcctaggataaatagccatgcgtattttaaaaactatatataaaaggaatgtgtaagaaataacctcaactcaaattattgtggtagaagaagagggggggtcagacagtggaggggggcacagggaaacccagccacagactaaagagaaaggtaaaagaagcagtagaggagagaaacaaggacggggaaaaaaagaggagcggaaaagagggctgaggaggggaggggaggggaggagaggagggcagaagagaaggaacgagaacaagggaaaatcccccgggaacacagaaagatagagacccaggggactcccgcagagagggcctcttgggcttcagcgcagaggaaagtttcccgggcaccccctctcctcccctgccctccgccgcctgggccctgccctgcgtgcccccaggcccagcgcgcctccgggcgagtccccaggagcgcggcccaatggatcgctccgggcccgccccctcgcgcgctgattggccgccgccccgctggcctcgccttattagcaagttctctggggagccgcggtagggcccggagccggcgagtgctcccgggaactctgcctgcgcggcggcagcgaccggaggccaggcccagcacgccggagctggcctgctggggaggggcgggaggcgcgcgcgggagggtccgcccggccagggccccgggcgctcgcagaggccggccgcgctcccagcccgcccggagcccatgcccggcggctggccagtgctgcggca

SEQ ID NO: 31547 - DNA, 2300 bp, Homo sapien
ctggggagacatgcccctggagcgacatctgactcaagaggaaagggtcttctgtctcctgctcccccctggaaaatcctctggaaggatgaggttgactcccctggggtacgagctcccccttgggcccaagactgtggtctaagagatgaggcaccaggcagccaggaggtctcacacgcacctctgtgagcagagagacgggggctgctaccagacaaggaggaagagggcagggattgcacaaagggctctctctaggcactccctgggatctgggtctgcagccatatcacacctccctctccttggcccacctagttgggcttcttcctgcctggtggcccatgctgcagaagaccttcatgccttgctgctgaaactgtacacggtatcgccctgtgcctaaggctactgagcttccaccctgtcccagagtctagatgccctctgtccttacctgcccaacagaatggtcgctgctgcctacccaccagcctctgcatatgccctccccacacccccgcccccacccccacaaaagcaaactcctattaccctgtaacagtcagtgcaagtgccagcttcaccattctgagctattcttggggtctcaatgccccaggacctcctcaggcttccttaggcctctgagcccagcaggctgcagagccagggactgagggctgggccatgataggtccatgccctggagcgcggatctgcagagtggctctttttggctgagcaggggccatcttggtttagtgcctggactgggattattttcctcttttctcccctggtgcatctctccctgcctccctgtgcagacgggaaccccgggaaaggcaactggagccccactttaagtgatgtgcaaaacatcccaggggccagcaggctagtgcagtaaaggagaggctgtcgggtgtgtgggggtagggaggtgggggctaggttccctttacctggttaccttggagcccatcttactaaagaggatggcttcattagctaggccctggtgtcccagagttctgggtaaacaaattatcttgaggatccaacttcctgggtggctttgcctgacttcacttccttggaagcaaccttgagttcctggatacagttgtgcctgccacttgccactcagagctgtccagagaggacacaccaagcacacccagagtgggaagctcttggagggcagaaaggcccagtggtcaaagtaagcagatgcaatagaacaggctgagggagcccagcaacaatagcaccaagaacccactgcaggccaggcatccagagagcacgctctgtgcccacatgcagctcacagtccagtggctggcttggctgtgggacgccagtgactcactcggtactgttcagtccatgtgaatcatggcgccgctggttgcccaggccaggcccccggccaacctctgcacagctgggtaacattaagaacttggcgacgcccgcagcatgcagcagatcctctgggccctcctcttgctgttgttgttgtcagatgttgatgagagtttgggaagcaagtaaggagcgtgttcattctgggctgggtcaaaactgggccgggctgaagggcagggtgggcctgaggtgacagcctgcagggcatctggcccctctttagctcagttgtcagctctgagccgtggcatcctgggtgcattcatgatcttccccatgccccagggtccccatctattaaaggggacattgggggaccctgggaggactgggtgagagtgtatatagagaatacccagaacagtgctggtacataccagctgccccacacaccttggccatcctgggtgcctcagtctctcctgtgtccctttcttctcccccacccttccccgtctgccaccccattcacacattcacaccagctacagttggcgggcatccacgttctcttgagggtccacctgctttttcccatcctctttgtctcctccctcaccaagcttttcttaatattttaagctctagagccctagaatgttccaatttctagcactctagaacattctatgccccaacaagcatgtgcctctttgtctttgctcactagattccctcagccttcaacaccttgagagcttgtttggaggccctagcaggggtgcaaagctactcatatacccttggctgaagaccagtcctcctctatcggggattgtcgtgagtgcagctttgggaaggacgcatatggagtggtgagggaggaaggggacacctgcctagccagccagatcagccga

SEQ ID NO: 31548 - DNA, 2300 bp, Homo sapien
cctgctctgaatttaagcccattccttgagcacatccagaagccctagagcattttaaagcagacctagagtccccagctggggccagctattctgccagggaggcccatgccccaggcactatcatggagggagtgtggagactccttcacccagaagaaaacacatctgtgcctccacttgccacctccaagcacacacagttctgcccgaaggccgcggtccctatgtcatcttgctaaaggtgtttagagaacacattctcacctacaaaacaggaaggcacagcttacagtccctgcccagggcttttaccaccagaaactagataaataaaacactggggctggaaggaacctcagacatcgcccagcgtgatgctatcctgtttacagacagggaatggaggccaggtcgagaagggatttctcctggcaaatacagtggggacaagctggagccgggcttcatccctgtggttgatcctcagtccagccctgtgtccaggatgccatgctctggttcacccatccctgtgggctgcatctttggttgttttgttctgggaatgtggagcttgcccaggatgctcccctttcctcctttgttggaggaagctttggaggcaggaaagtccagacatagctccagggctccactgctcttcccagcttcacatcccccgaggccctcagtttcctcgcctgggaattgggaataaccccattcacttcattggctggctgtgagggtcatagcgttcccaatggcagctggcctggtggctgctggtatgtaagtcatgttcagtgttaaggaagaatcttctcccttttgacagttccttcttgcttgttgcctgatcttgggcagcctgaggaccccaactcatctctgcctgcaagagtcctgctcctcacccatcctgccctgtgggatggaagaatggcaggaggacagggcctgaagtctcatcccaacccatgtgcctccagctttgtgacctccagcaagttgctggaactcttgagcctcagttttcccacctggaaaatgggactcttttctgtggcacctacctcacagagacaattgctggatttaacagagacagtgctattagctccgatcacttggaaacacacaatgggcctggcatgaggcttgctcagtcatgctatatcctgttgattcctcactatggccttttgagtgagccactctcaccagcctcatctcacagataaggagatggaggaaacactgaagaaacttgcccaaggtcaaagccagaaggcggtgaccctgctttgcacccacggcgtctaagtggagagcctagacctttacctgccactgtcttgggaagttagccctgagggagatgcacttcttgaaaactaacccttcctgagggtctgctctccctcggggcctgtgctgggagcttgaggtagaagagggtgggggtactcacactccccacacatacggccgctcagtgagcccatcctccggaccgagagacacacacggcttctgagaggctgggggccctggcccaaggctcacctacctggttagcgattgatggacgaggacaccggtggcctgaccgcagctctgcatccctgctccactgcgggctgcctggagggagggatgctcagtcatcccctgctagtccctttccctcctggcactatatccattttgacaaaccgtgccatccaaacccaggcctgactgcccactcctctcctctgaccctcccctccttccatctctgtcctcctcttatcccccacccctctccatctgctgttcctgccttttcaggaaaagtccctgtgcagaaagaaatttcttgctgaaagtgtgggggaggcaaagccaccctctgtcaccccctcctccaggcagcccctcctcttaacctggggctttcgtgtctgagaggattcctgtcccgaccctgcccggtgggcgtgctggcttcctctctgccaccctggatggaccgcagcctgcgctggccccacaggaagtggaggcgtggagccgccctggaccacccccagcctgcataaaggggcggtcggcgaggctgcaccagcgcctggcaccatgaggacgcctgggcctctgcccgtgctgctgctgctcctggcgggagcccccgccgcgcggcccactcccccgacctgctactcccgcatgcgggccctgagccaggagatcacccgcgacttcaacctcctgcaggtctcggagccctcggtgagtcccccgcccgctca

SEQ ID NO: 31549 - DNA, 2300 bp, Homo sapien
gggtaggttatggaaaattaaagtcaaaggggttctctgggaggcaggggcgagggtcacaaggtgctcagtcgggagcttctgagccaggagaaggaatttcacaaggtaatgtcatcagttaaggcaggaacaggccattttcacttcttttgtgattcttcagttgcttcaggccatctggatgtatatgtgcaggtcacaggggttatgatggcttagcttgggctcagaggcctggcaatcacacccagctaagttttgtttttttagtacagatggggtttctccatattggccaggctagtctcaaactcttgacttcaggtgatccacccgcctcagcctcccaaagtgctgggattacaggtgtgagcccccacgcccggcctagcacaatatcaatatattcctcataacaatgttagaaagggaaagttctcttattagcaccttctggactcagatgaagaaactgagtccagaacaggttaagtaatttatccaagttaactggctaatgaggggcaaagcagaatgaaacctgggtagaatgagcccagagcccatgcctgtccacattccgccctatgcttcttgagctaggggccagctctgtgttcagggcattgcctgctgcacactggctactcagtgtatgcttgttggtggaatgaaaggcaagaaatatttattcatcatttattatatgccgggcactgttgcctgcttttataaatattacctgatataattctcacagacaacccaaggagttaatatcaatcagcccactttgcagataagaactccaaagtgggacacattgccagtaaatggtagagccagctctgggtcatggtgggtgggcctgcctcagaccttctcagttctttcccactgcctttaagagattttttgttttgttttgttttgttttgtttctgtatgagtctccccggcttccctcacccttctcccaagaaaaagaaagaaggggagagaactggagagagagaccaggtaggggacggggactgggggacgagataggatggagagagtcacaaagaacccctgctttctatcaaagcacggacagtggttccaggcgcccagcagatggcaggatgtagccaaagattccctgcagtcccggagagctgggcccgcaggactgcaaggcagggggacctgcctgtccctcagggagcgtcctgggaacccgcgctcgccccacacgtcttggggcgcatctgccgcaccccttacttaggcacccgcaactgtggcgcgtatctcccgatccaggctcccgccgcaggagcccagggaccctcatgctagcctcgcccctaaatcggacgccgatgccgcccaattttgggggaatcccgagactcatgcccagccattcccagggagaatggtttggggcaaactatggctgtctggggcctcagtttccccatgtacaatgaaggggtcagattagtatctaatcttaaggggtcagaaagtaaacagatactttcattcattaaacactgagaaaaaccttaagaggaacagcgtcggttggagagccagcagacactccactgcccatcccaatatgaatgggcaaatacaggctagcggggagtcctgggactcccttcgcagccggggccgactaaccacagacctaagagcccctctacctctagacctccgtctactgcgctctaaaatatgaacgatgctttcttactgctgggttgtcggaggcggatgtgggatggtgctaacaaagcgcgtagccgaggcctggccatagtgggtgctgacaaaccgcttactgcctgcagggaccgagctcccggccgagggaggagggccgagcagggattcagattcttccgggccgatccctttctcagctccttccgccctgccgccgcccactgcgtgctgccttcgtccgtcccctcctcccccgctccttcccctccttcccctgctcccgcgccgcctcgcgtctcccgcccgctgtagccggcgaggagcgccgcacgttggccccggcgcgaggagctcccgggttcccgggcgggcactggagtaaggagctgcgagcgcagcccgaggcggggcacggcggaaggcgcggcgagagcggggtccctgcgagcgcagtcggaagggcgtccaggagaagggggacgccgtccccgcccctgcacggtgctcggccccctcgggctccgcgcgcggctacaacccggactgggcgcgcccccggcatcccgcatctctgc

SEQ ID NO: 31550 - DNA, 2300 bp, Homo sapien
tttttgaaaggttgtagtgtgccaggcatgattctgagctctttatggaatgtaggccccattttccctattttacaaatgagataactgaggcacacagaggctaaatgatgccgctaatgacagactgactgaatagagctgtattgtggacctgagcagactggctccagggaatgtcctcccaaactgttagatgtctacagaaggttcagagttaactctaaggaaaaaaatggttagttgggggttggggaaaagcttcccaagagagcaagtgcatgagctgcgtgtcaaaggccaatgaaaagtttttcccaaaataaggtgtgttggagaaatggtcttgcaggcaagggaaacagcagcatgaagatatggtgctattcagggaacccgtgatgttcattgctgatttgaggacccgacagtggtacctgccccgtggggacctcgggagtttctcgacaggacatgtgcatttcctagcatgctgctggttacataacaagctgcagtccaagctcattgctttttttccctcttctctgatctttggtgaatgagtaagaagtgaaaatatgaaatctctttcttggcaagttatcctgaaaggaaataaatctaaatcaaagaaccaaggttttagtaagttaaccattaactccgtctctctattctaagcacgttaggcattcgacctcacgctggattctgactttggcttggcagggacacaactcagcataattatcctccattgcataagtttaatatacaaggaactaattgtattcatttacttcctcacatccttgcttccattatgtggtgaactaatcaattcacttcatttttttttttgtaaataacatatcttttctagttattggaaactggctgtaattcaatctaattcaaaaatatttaccaaacacttattatgtaccaggagttgtgtttggcactatgaatatggagattagttcattcagtcattcctcctgttaatgaatatttattgaacagtaactgtgtactaaacactgtgctgagtgctaagggtacaacagaaaaaaataaacatggcccttgaactcagggagcttagagtctagtagggaaaagtgaacttaatgaaatatacaaaggtaaaattacacaaagcgatgtattttggggaaagttccacagtgccatgagaatgtatcgtagggagccagacgtagtctggagggtgagggaagccttctgaggatgtagagagaacaagggtagggcaaggaggagagcactcaaggcctgggagtagctgctctcacgtgtctggcattcagtaggtgatgggagtgagcagggaagggaggcaggagaagcagctggagccctgcagccctggggaaggatttcctttttccactgagagcaatggaggggacatcggaggggaggaagcagaggacaagcaagatcactcggctcctcacacattttcctgagtggaagagtcaggtgaggatgttgggaggccaccatagtggtccaggagacagaagatggtggattagaccagagcagtggccataggggtagacaggtgtgagacactgtgcagagacaacatggagctacctgatgaaagaccggatgtggggtaaggggagaaaggagtcaaggatgagtcccaggttttgcacatataggaccagtgaacgttgagaccactcatcctgcattctgctttggatctgttgagttcatggtggctttggaacctccatgaggacctgagggcaggcattgacacatacagccaaggctagagacaccttggagagccactgccaattaggtggtcattgcagcctttggagcccatgacaagagaacagttgtaggacaaaaggcttgacagactctagtgtttaatgcctgggaggacaaggctgagtgtgcagaaggaagtgaagcatgaaggggagaattgagagagtgaacaagtcaaaggaggggaggatgtccatgggatttactggcaaggccgtacattgttgacctgtcttggtgtagggaaacatgtagaagccaggcagaagtggggtagagagtgaagcagcaagactgcagagcctcatcaagaagtgtggagtgaagggaaggcttcagatggacaatttgtgtgctggggaaaaaatggaatgtgctgcaaattcccctgtggataagggtggacggctgctctggcaagtatagtgcacctgacccaagagcctttggaataggtgggtaggtacataggt

SEQ ID NO: 31551 - DNA, 2300 bp, Homo sapien
atcctgttaatggcattctcagcaaggttaggcaacttgcccaagatttctcagtgagaaattgagagtttgaattcagatggtctagatccagaacctgcatttttatgaatgaatgaatgagtggcaggcaaaacaaggcagagcctgcatatttatgaacgaatgaatgaatgaatgagtggcaggtaaaacaggtctggagagacctgggcctgagattcaacttgctccttaggggagggcaacttctggaggacagatgtgtgaaatcagggaaggtgatcatagttgagttccaggagttggtgatgatggacaaagcccagtgccaggcaggggaagggagaggccattggtaccgcgaacccaaggagggtccacagcaggtcacaacagaaaggatgaggcccagcctctaggactgagaaagcaaggggcaaaggacataggactccactccattagcccacgaatgacacagtgacaacaactcggtaacatttattgggcaactcctgtgtggcaggggctgggctaggagcttttcttgcattttctcatgtcagcctcacagacttgcactagtgccctcatcttacaatatggaaactgaggcccatagaggtttagggagttcctgggagttagggaagccaggactttccccagttctgtctgcaaagtccctgtcttcctcctgcccccaggtcatggcaaaggcactggctggcatcaagcagattagggagcatggccaagacaagttcagctttaggtagcaagaccctttcttgtaaattgggttcaaggccaggaatcctagggaggtgaggggacagcagagaagcagagggaatggccagttgtggaacggccaccatggtcaggcatccaccgttctggaagcttggcaaactcttatcatctgatccctcaacaaactctgagcctgccatatttcacaatgatgaggaaactgaggcagagagaggttatgaatctccctcagcatcacgcaggtaaaaggagaggacacagggcccagtggcaaggctggctgacctcaaggctgtgcctcgcctctctccttcttggccaggtcacagcaggcccaggtcctaacaggcccagggaccaccactgtagggaggacttgcttcatgcctggccctacttggagtactttatagatattatattattaattccctatatgggaattattgttacccaaactttacagctaatgaactgagtcccaaggaagtcatgaaacttacaagatcaggaagtagcagaactgggatttttcccctgtgcgcgccaaagctgctgttatagccaccgggctgcattgcctttggggaccggcacctggggccatcatctgggctacagctgaggaatgaaagtggctaccaggaatctgggtccaaggcccagaagtcagggagacctaaattcctcctgaccacagcgggaggagcccctggccaggagcagggccaggccggagggtcagctgactctagctgccagggggcgggaggcgggggtacggagcagggaaccagggcaggaagttgggcagattttgagctgaaattgtattcttaagttatttagaatgatttttataaaaaagatagtaatgacaggacaatgtgcataggataaaataataagtgaaaaaatcagattcgaaaactgaactcagcctagtatgaaaaacaggcatagaaaggggcctaaggaaatacctggatgttaacaggagtgcggttgccccagggggactatgtgtaaatatatgatgtgtacagtgagaacgtgttgctttttatcatcagaaaacagaaacaaaggtaacccgtgtatccaacaagagtaagttcatcattacttgttgaatgaatgaatggttgaattaatgaaaagaaaattcagtgatgggtggaacgcagacagaccatgttttcttttctactcccctttagaaagggaggttgaactgcgatcccacatttgagcttgaagagatgattctagaatccaagccacttcacaaaaagaagaagcgattggcaaagaacagatccagggatggcacaaaggacagctgcccgctggtgagtgcttcgtgggagccgttccgggagagaaatcctgtgctcatagggaaatgactgagccaggccactgtttagcaaaaaggggacatttcaatcctcccttccaatttccttattttgcagtaaataaaatgctactatcaaacaagtagggggaaagagtga

SEQ ID NO: 31552 - DNA, 2300 bp, Homo sapien
gtgctgggaaaactggctagccatatggagaaagctgaaactggatcccttccttacaccttatacaaaaattaattcaagatggattaaagacttaaatgttagacctaaaaccatgaaaaccctagaagaaaacctaggcaataccattcaggacataggcatgggcaaggatttcatgtctaaaacaccaaaagcaatggtaacaaaagccaaaattgacaaatgggatctaattaaacgaaagagcttctgcacagcaaaagaaactaccatcagagtgaacaggcaaccgacaaaataggagaacattttcccaacctactcatctgacaaagggctaatatccagaatctacaatgaactcaaacaaatttacaagaaaaaaacaaacaacctcatcaaaaactgggcgaaggatatgaacagacacttctcaaaaggagacatttatgcagccaaaagagacatgaaaaaatgctcctcatcactagccatcagagaaatgcaaatcaaaaccacaatgagataccatctcacaccagttagaatggcaatcattaaaaagtcaggaaacaacaggtgctggagaggatgtggagaaataggaacacttttacactgttggtgggactgtaaactagttcaaccattgtggaagtgagtgtggcgattcctcagggttctagaactagaaataccatttgacccagccatcccattactgggtatatacccaaaggaatataaatcttgctgctataaagacacatgcacacgtatgtttattgcggcactattcacaatagcaaagacttggaaccaacccaaatgtccaacaacgatagactggattaagaaaatatggcacatccacaccatggaatactatgcagccataaaaaatgatgagttcatgctaaatgacgtgcattatgggtgcgaaatgtgctaaatgggtgcagtacaccaacttggcacatgtatacatatgtaacaaatctgcaaattgtgcacatgtaccctaaaacttaaagtataataatattgctggtttaattaaatcagcaaactttaagtaggtttttatttaccaaagattatgtaaaaccacgtgaacttgaaaaacacttaggttagtttctctttttctgagataacaatttatataagtttttttttcttttaagccaaatcttcacataggtaccaataggacagttacttaggatgagagttctcttaaaaaaaatacttttagatacaaaagtccaaattttcaaaggtatacctacttcagttttgactcaaaactgatcatctttttatggtttaatcatggacaaaagaggcatccataaagagggtacagaagtcccacccccaccccagatccaaagtttcctccaaggatacctaagaaagtgaagaccctcattgttaacagggcaacaaaggctgagacaattacgacaaactgtcctgagagctggcacagttcatacaaagagacacttcttgtttcagaatcctggagagctggctaactgctgggcacaagcccaacagcttgagccccaggctgatagaaaccaaagagcacattttcactgattacaaagccaagctcttatgacttcagagaagatgaagcagagtctgatgcaggacaggtgagcctcaaaattggggatcaacctgagagggttgttggcttcacccaggaacgaactcaagggtgagccagtggtgacagaaagcagtgtttatggagccagtgctgctccttgcagagcagggctaacccataagcagtgtgcccagagtcagcaatgtgtaagctgttggcagctgtatttatacccacttttaattatatgctaattaagaggtggattattcagaacattctggaaaaggggccgagagcgtccagaaccatatatggtaacttccaggccattgctatggcccattgccatggcatgtgtaaactgtcacggcacccatgggaatgtctttatgctaatgagtagtgagggcaactacaggtcactttcatggccatctgcttattttggctggcttcttcactgcattctgtttcaaccatatcctttcaaaccagatcagtgaggtcatgaccagaaaacaagccctgccagcctcctacctcaaatctaattaattataattttcttccttatgacaacccacacaaaagacagagataagaaaaacaaggacttcctgggaggctgtggatcaattaccaatggacacccagaagcaaattcaca

SEQ ID NO: 31553 - DNA, 2300 bp, Homo sapien
actaggaccaagggtagagagacccttacacccactccccactgagacaatggataaagagacccttacacccgctccccactaggaccaggacactgcaccatccttcatttactcagcacttggagagaatctgttgtgtgtgtgttgcaggctgggggataggccagccacaaaccaggcagtgtccaggctagtgagtatctcacagttgtttagagtgataaaaaattaaaggagttcatcactgtgtttgctttaaacaaacatttatggggtagctactagatgtttgcttttgtcctgggtgcctgggtaaagcacacatgcacatgcacgactgcacacttgcactcaggggcacacacacacacacacctaccctgtggagcttaattccctgtgtgggccgggctaggggacaccatggggatctgcttcagcagaggagggctttgtcctttcagcctagatgtccagcttgtttctagtttgtttcatcatttcctcatggcaagatgggaactgttatccaaattcttcatctttttttaataaatgaagaaactgacagctggagaggagaggtgactcatttgcaattaaggagtggggcagaattcttgtctcatttacacctgtgtctggcttcagggcaaactctctgctatgtggagcttcttatatattaccttagaagcatctccaaggttcctggggacatgtatgggggcaataacttgacgctcttgttttacatttccatgaatgcttaggctttagtttttaaaatgtggtgtttgggccaggtgtggttgctcacgcctgtaatcccagcactttgggaggctcaagtggaggattgtctgagcccaggagtttaagaccagtcttggcaacatagtgagaccctgactccataaaaaatactaaggagattttttaaatgtagggttatttgctttttactttatcataaagttgttgactattaaattaacctttaaatgactgactgtcaaacaactccaacggtccagcaacatgcttggcatttagcctgtggtcttgtcacatgcctgacagctgccacgtaccccctggtgtggggaacttggcttataaattctcagcttctcgaaccccatggccttgtccatgttaggtcaggaaaggcctgtccttggatggtctgggttatggggagagaggctgccaggggccaggctcgctggcctgagactttatagacagcctaacagcctgccccgcaggaaggctggcgggagtggagccctcccccgtcaacaggtgtcagctgtcacccaggacctaggcagggatgaggaagcacacaaaaggctccaccagtccccctttttgtgtctttctcctcctcctcctcctgcgtcccttggcaaagcaaatccctgtcccctcggagagttcagggagagcttgcttagggctgcgacttcagacaccagctcccctctttctaggtccccagagaggtggcccagcggctggcctgtttcccactgggaatgcgaggggcacccgggccggcccagggctgacccacagcaggctcgggcagtgggtgctcagctggtctgcactgaacgcaaccggaagtgagggtccttttccttctctgcggccaccccctcctccccgagctttcctgaaccttctgggtgctccaggactcccggccccgcgctccaaatgcttctccgttttctaagcggggatggggaaactctggattcacatccgtgtgtcaggaaaccgttcccaggggaagtgcgtctgagctgaggcttacagacccaggtaggcggtagcggaggggcccttggggtcctggtaacctcggggagcaggggagtgacccgctctgattcggtttgggcgcaagcaaacccaggcctggccgccgggcgcctgggccgcgccaactcgctctccccctcccacgcccgtccggcacctcctggcccgccaagccccagatgcgggtgtttgttccagaaaactttcggcggcggctcgcactgagcatgctcggcggcggggcgggcctggggtccggaagctccagcgactcggcggcacccgccgctttgaggtagcgggtcccgacaggcgatggacccctcgggctcccgggggcgccccacgtgggtgctggccgggggtctcctggcagtggccctggcgctggggggccgaggctgtctcggcgccagctcacgtccccgctggcgccccctcggcgcgcagccaccccggga

SEQ ID NO: 31554 - DNA, 2300 bp, Homo sapien
ggccggcccgggtgcccctcgcattcccagtgggaaacaggccagccgctgggccacctctctggggacctagaaagaggggagctggtgtctgaagtcgcagccctaagcaagctctccctgaactctccgaggggacagggatttgctttgccaagggacgcaggaggaggaggaggagaaagacacaaaaagggggactggtggagccttttgtgtgcttcctcatccctgcctaggtcctgggtgacagctgacacctgttgacgggggagggctccactcccgccagccttcctgcggggcaggctgttaggctgtctataaagtctcaggccagcgagcctggcccctggcagcctctctccccataacccagaccatccaaggacaggcctttcctgacctaacatggacaaggccatggggttcgagaagctgagaatttataagccaagttccccacaccagggggtacgtggcagctgtcaggcatgtgacaagaccacaggctaaatgccaagcatgttgctggaccgttggagttgtttgacagtcagtcatttaaaggttaatttaatagtcaacaactttatgataaagtaaaaagcaaataaccctacatttaaaaaatctccttagtattttttatggagtcagggtctcactatgttgccaagactggtcttaaactcctgggctcagacaatcctccacttgagcctcccaaagtgctgggattacaggcgtgagcaaccacacctggcccaaacaccacattttaaaaactaaagcctaagcattcatggaaatgtaaaacaagagcgtcaagttattgcccccatacatgtccccaggaaccttggagatgcttctaaggtaatatataagaagctccacatagcagagagtttgccctgaagccagacacaggtgtaaatgagacaagaattctgccccactccttaattgcaaatgagtcacctctcctctccagctgtcagtttcttcatttattaaaaaaagatgaagaatttggataacagttcccatcttgccatgaggaaatgatgaaacaaactagaaacaagctggacatctaggctgaaaggacaaagccctcctctgctgaagcagatccccatggtgtcccctagcccggcccacacagggaattaagctccacagggtaggtgtgtgtgtgtgtgtgcccctgagtgcaagtgtgcagtcgtgcatgtgcatgtgtgctttacccaggcacccaggacaaaagcaaacatctagtagctaccccataaatgtttgtttaaagcaaacacagtgatgaactcctttaattttttatcactctaaacaactgtgagatactcactagcctggacactgcctggtttgtggctggcctatcccccagcctgcaacacacacacaacagattctctccaagtgctgagtaaatgaaggatggtgcagtgtcctggtcctagtggggagcgggtgtaagggtctctttatccattgtctcagtggggagtgggtgtaagggtctctctacccttggtcctagtggggactaggtgtaagggtctctctacccatcgtctcagtggggtctgggtgtaaggatccctttacccatcctcctagtggagactgagtgtaacggtgtctccacccattgtctcgaccttccctgggacaaaataagattaaaacaggagtcttcgcgtgagcaagttcagaggcgtggagggcggtgtgttcccgggaaggttgatgggtagaggttaggggcaagggcagggggttggaattgcattgatcccagcgtcttcatcaggaggatgggcggagcacccaccgcagagggttattgagaaagttaatgagatcattaagctaaatgcgtagcatattctaagcctcaaaaaacttaaaggagccttctaagcctcagtaaagttaaaggggtggaaaccgggcccccctccggaagggtccggggctgggaggcgcgtctgtctctgggcatgctcagtgcaggggcagggctggggcgggggtggctgaaagttttgagcggtgatccaggctcctccctccggctcggcgaagcagggaaggggagagaagcaggagtcgggagactgcacaggccagaaagtctgcggagcgggccgcgcccctggcccgcccgggctccaagtcccgcgtcgccgccctggcggggacggtgcagcaggcggcgggatgcggcggggcggcagcctgagcgccccggatggcccgcggcgggg

SEQ ID NO: 31555 - DNA, 2300 bp, Homo sapien
aaggagtcgcagagccggggctccgggcccgcaggacccagaagccacgcgccccgcgctccccgccccgccgctgtctgctcggccgacccacctggtgtcgcgtgcgctggcggcccgcgcggcagccaagccaaaggccgaggccgaggccgagcgcggcgcccagcagcacggcgggggccagcagggcgggcgccggccgcagcgcgtcccgccccagcagcagccgcgcgtcgctcttgcaggccgccccgccgcgggccatccggggcgctcaggctgccgccccgccgcatcccgccgcctgctgcaccgtccccgccagggcggcgacgcgggacttggagcccgggcgggccaggggcgcggcccgctccgcagactttctggcctgtgcagtctcccgactcctgcttctctccccttccctgcttcgccgagccggagggaggagcctggatcaccgctcaaaactttcagccacccccgccccagccctgcccctgcactgagcatgcccagagacagacgcgcctcccagccccggacccttccggaggggggcccggtttccacccctttaactttactgaggcttagaaggctcctttaagttttttgaggcttagaatatgctacgcatttagcttaatgatctcattaactttctcaataaccctctgcggtgggtgctccgcccatcctcctgatgaagacgctgggatcaatgcaattccaaccccctgcccttgcccctaacctctacccatcaaccttcccgggaacacaccgccctccacgcctctgaacttgctcacgcgaagactcctgttttaatcttattttgtcccagggaaggtcgagacaatgggtggagacaccgttacactcagtctccactaggaggatgggtaaagggatccttacacccagaccccactgagacgatgggtagagagacccttacacctagtccccactaggaccaagggtagagagacccttacacccactccccactgagacaatggataaagagacccttacacccgctccccactaggaccaggacactgcaccatccttcatttactcagcacttggagagaatctgttgtgtgtgtgttgcaggctgggggataggccagccacaaaccaggcagtgtccaggctagtgagtatctcacagttgtttagagtgataaaaaattaaaggagttcatcactgtgtttgctttaaacaaacatttatggggtagctactagatgtttgcttttgtcctgggtgcctgggtaaagcacacatgcacatgcacgactgcacacttgcactcaggggcacacacacacacacacctaccctgtggagcttaattccctgtgtgggccgggctaggggacaccatggggatctgcttcagcagaggagggctttgtcctttcagcctagatgtccagcttgtttctagtttgtttcatcatttcctcatggcaagatgggaactgttatccaaattcttcatctttttttaataaatgaagaaactgacagctggagaggagaggtgactcatttgcaattaaggagtggggcagaattcttgtctcatttacacctgtgtctggcttcagggcaaactctctgctatgtggagcttcttatatattaccttagaagcatctccaaggttcctggggacatgtatgggggcaataacttgacgctcttgttttacatttccatgaatgcttaggctttagtttttaaaatgtggtgtttgggccaggtgtggttgctcacgcctgtaatcccagcactttgggaggctcaagtggaggattgtctgagcccaggagtttaagaccagtcttggcaacatagtgagaccctgactccataaaaaatactaaggagattttttaaatgtagggttatttgctttttactttatcataaagttgttgactattaaattaacctttaaatgactgactgtcaaacaactccaacggtccagcaacatgcttggcatttagcctgtggtcttgtcacatgcctgacagctgccacgtaccccctggtgtggggaacttggcttataaattctcagcttctcgaaccccatggccttgtccatgttaggtcaggaaaggcctgtccttggatggtctgggttatggggagagaggctgccaggggccaggctcgctggcctgagactttatagacagcctaacagcctgccccgcaggaaggctggcgggagtggagccctcccccgtcaacaggtgtcagc

SEQ ID NO: 31556 - DNA, 2300 bp, Homo sapien
ccttcttttccatattgcctgtatgcctgtgtggcatatgccacaaccgcagaactgagtagttgcaaaagagatcatatggcctgcaaagccaaaaaaaatttgctgtttcaccctttactgaaaaagtttgctaacccctgcatttaaaaatgccttaccaggcgggatgcagtgactcatgcctataatcccagcactttgggaggtggaggcaggcaggttgcatgagttcaggagttcgagaccagcctgggcaacacagagaaaccccatctcaaaaaaaaaaaaaaaagccttaccggttcaccaaagaaaaagaaaatgccttattatatctaaatgaccatattatatctaaatgacctttgacaaagaggcaaaagcacttcaatggaggaatgataagcttttcaataaatggtactggagcaattggacatccataaacaataacaacgacaaaagaacctcaacctaaacttcacaccttatacaaaaattaattcaaaagggatcacatacttaaatgtaaacagtaaactataaatcttttagaaaaaatattgccaggcatggttggctcacgcctataatcccagcactttgggaggctgaggtgggtggatcacttgaggtcaggaattcaagaccagcctggccaacatggtgaaacctcgtctctactaaaaatacaaaaattagccgggtgtggtggcacatgcttgtaatcccacctacttgggaggctgaggtgggagaatcgcttgaacccgggaggtgaaggttgcagtgagccaagattgcaccactgcactctagcctggacgacagactgatactccatctcaaaaaaaaaaaaaaaaagaaaaagaaaaaatataagagaaattctccaggatttagacctaggcaaagagtttttagacttgacaccaaaagcatgacacacagaaggaaaaattaactggaattcatcaaaattaaaaacttttgctttgcaaaagacctctttaagaagatgagaagacaagctacagagtgagagaaaatgtttgcaaaacagatgtccaccaaaggactagtacctagaccagataaggaaatttccaaactcagctgaagacaggaagcaatccagttagaaaatgggaaggacatgaacagatatttcaccaaaaaggatatatagatggtaagtaaacacgtaaaaaggtgttcaatgtcattaagccagcatgaaaatccaagttgaactcacaataagatatcaccacacacttgtcaaaatggctaaaataaaaaatagtgacaccaccaaattctggcaaagatgtggagaaactggatcactcatacattgctgatggaaatataaaatggtacctacggccatactggaaaacgttttggcaatttcttatcaaacttaacttgcagttaccagaagacccagcaattgcatttgtgggcatttatctcagagaaatgaggacttacgttcacacaaatgttcacagcagcattgttcataatagccccaaactggaaataatccagatgtcttacaggggtgaatagatcaacaaattgcagatacagccccctctgtacttcctgggtatccccacttatgggagggttcttcctagtttaaaggacatctccatccattgaaacaggagactgacatggataacttttcatttccagttccatacaactatcccgctgattctttcttcaaagaagcaaaccctcctttgctttttatattttcttcacacatggaaatgggggatgtggagggccttgcacagagtaagcactcaatatttgttgaatacatgcatgaggaagaaaggaagctttttaaggaagcttcatgaaaatgtaatgcattatgggccattgtcatgatttataatcggagttcctttccttcagcaaaaaatatacgtgaagagagggtgaaagagaagaaaagaaggagagaggcagtgggggagggagggagaagagaaaacagaaagcaaaagacaaaaataccattgattaaacttttcttttgttatctttcctttcttggcaatagatgtttattcagatttttaaaatgtgcctccttgaccttcttcctaaaaagaagtcagatgatgaactataccagaagatcctttcaaaacaagaaaaagtaagtcttcaacctatgtttcaaggtaacttaaaaatagtttattataatatatacaacttatgatgcaaaaatttttttctttcatgtataaaatagcttatta

SEQ ID NO: 31557 - DNA, 2300 bp, Homo sapien
aagcagccacattgcataaccccgggggacccccttcctctttgtgatgccccagaacaatattgatttgattatagaaagccaccggcagcctacatgcgcaacggtgagttgttggttatatacactgtggaccatacagtggaatattacagtcaataaaaggtatttttagagagaaaaaaaaacattggaacacgcttatgatataatgttaggcaaaatcgctgttatgaacagctcgtttggggcagagcaaatcctgggaagtaacactgaggctgttggtgcaggcggtggagtacaacatcttcgagggtatggagtgccacggctccccactagtggtcatcagccagggcaagatcgtctttgaagacggaaacatcaacgtcaacaagggcatgggccgcttcattccgcggaaggcgttcccggagcacctgtaccagcgcgtcaaaatcaggaataaggtgagtgtgtctgcaggggagcgggcccacccgtgggaccagagccgacagcgtctcttggggaatcgagatctgacgtgtgcagagttaataatgtcatcgccctgggaacctccgtttccttatctgttaaatgggttgagacgctggcctgggctcctgtctgaggacaggagtgagcatcaaatgaggacatgcaagttccagggctttgcaaactgtagaggggtgtgcacccgtgagggtgggtggatcatgggagggacgcttaccaagctgctctgggcgctgtcctgcgtcatcttaagtaatcctgcccacccacgggaggtgctgtgatcctccttttgcagcccagagcagtgaagggcttagccagagtcacggctcagaaaccctcgggtctggccctgtggagcaaggtgttacccctggcatcttgcaggcagggcttccttcagatccgccctttcttcctttccttcctcccttgacgtttctgccctgtcgttccttattttccttgaacaaccttagcactgacctcaggacatctgtcaaagggaaggagcaggctctattcctaactttagagcaactcagaggagggaactttctcacagctgagagagactcccgcccgtggccaacatcttccccagccaggccctcccatccccatggcagctgctttccccatgagacagctgatgtttgccagaaaggccagcttcgtgtgtgtgtgtgtgtgtgtgcacgcgcacatgtgtgtatgtctatgcgtgtcatgtgtgcatgtgtacatgcatgcacgtgtgtatgtgtgcatatggggatgtgtgtgcgtgtgttggagtgtgtgtgtgtgcgcgtgtgtgtatgcgagcatgtggtgagctctgtgtgtgtggccatgtgtgtacctgtgtggtcctgttctttgtatgcttcctaagtgaccaattgagatggagaagtccagagaccttcctgcattcccaggctccagcccggactgggaggctctgcatctggttttggtctctccccagcttccataaggtgtagcaccaggtcaaagacaccaagtcgcacagatgctttgcactggatggggaaacaagggatggggtggaaacaagtcagatccgagacaaggccaggcacaggcagcaggccatatgaggacaaggggactcatggaaatccctggctgggacacccactgaagaggcagacacaccccttggctggcttcatttccttcttggtctgaagctgaggcctgcggttaacagtcagcttccgtgagggcagatatctgaccccaaatgccaagacagcaatttgcaggagcaataggatcggggggtcccattgcacagggattccttcatgcctgcaggagctagaccaggtgaaggagagacctgcatcagagcctgcctctggccacctgagcttcagggagtgatgaacggcctcacccaggaagcaatgccacagccacagagaatgcacaggatacagtgaggcccagggagtcggggagcagggctccagggacagaggggagggccgttgacatgatgtgcaggtgctgggtctttaaacttggtgctaaaattaaggcttcctcctatggagagacaggagcccagagctgggggtcagggtgctatcacctgcagagaaggagggagccaggcctggggtcagggcactgtcacctgatatggaggatgaagccccgtgttgggttagggcactgccactgactcatgctgggaccctgtacaggtccctgaacacatgctgttctccagt

SEQ ID NO: 31558 - DNA, 2300 bp, Homo sapien
ttgtgaggagcctccgtactgttccccatagaggtggctgtgctaatttacattcccacaaacggtgctcaggaattgccttttctccacatcctcatcaacacttgctatctcttagatgcagctctttctttctttccttctgatggagtcttactctgtcacccaggctggagtgcaatggcgagatctcagctcactgcctcccaggttaaagtgattcttccccctcagcctcccaagtagcttggattacaggcacctgccaccacacccggctaatttttgtatttttagtagagacggggtatcaccatattggccaggctggtcctgaactcttgacctcaggtgatccacctgccttggcctcccaaattgctgggattacaggcgtgagccactgctcccacctgtgtttttattttctaatcagcttaaatgctctcagcaattccacattatccccagaataaattgcaagctgtctgcctggctcatcaggatgcgcctgctcctccagactggcttgttccagttcctggggcccagagccccagccccctgcacctccgtttcccatctgctcgaggctgcctctggctcttggggctgtgtgagtgagtactggccccttcaggaacagtctccctgccttttcctagcgattctcctgttcgtgctgagctgtactcccctgggaagccttccctgaagccccctgacagatgcaacccccccatgcatcccccacatagggatcatcagactaagttgtctttgcccattgacttgctgatactcccacaccccagcccagatggcgagccccctacgggcagggacttgtcgtcttactcacagttgcatggctgggacctgcacagagagttgcatccaatatcagtggaccagctgattgatttcatgaaagatgcctttagtaacttctgtatctcaagtgcttagcacatgcccagcatacagcaggctctcagtaagtgtttgtaacatgaataaataagttaggaaaggaaaagaggagagaagcagggagggagggaagaaagggaggaggaacacgcctggtttccttggtcctgaagcattttagtgcgtccttctctaagtcagaagggcttgcccagaaatcttgctatttgtcatgagtgtactgtgcagtccagtgcagggcatttccaggatgggaaaccaacacgtttggtgtaatgtcctctttgcagaaatggggaaagtgaaacccagagaggtgcagtaacgtctcaagtgccacacagcaactgaggcctgaactcagctctccctgacggagcagctgtcactgttgatgtctttatgggaattgcaaacacaattctttaaagaaatgggataaaaaagcacatgctttaggacactttctagaagctgcatgactaatgtcttttcatcttccgtattgcagatgctcatcacacccttccttatccttaccacacccctccctctcagcctggggagttttcctcctcctcctcgtcctctttctcctcctcttcctcttcctcctcctcttcctcttcctccttcttctccctttctcctcctcttcctcctcttcctcttctccttctctttctcctttttcttcctcctcctcttcctcttcctcttcctcctcctgctcctcttcctcctcctcctccccttctccttctttctcctcctcttctttttcctcctcttcctcttcctccttgtcctctttctcctcctcttcatcctcctccttctcctcttcctcctcctcctctttctccttctcctccccttcctcctccttctcctccctttctcctccatcaccttcagattctgcttaggtgtgaccttccctggaagcttcctttgaccttcgcccacatcctcaggctggataggtgccccactggggatcccaatggcactcatctctcctggcgactaccactctgctctgtggtcattgatttattggaaagacatgcttctgttttttcttaaacatatttttctatcctttctatcttgaaacaggcgtcaattccttccaagtctacatggcctataaggatgtctaccaaatgtccgacagccaggtaggtccctcacactcactctctcctctcttgtctgggcaggactgggccagctttgccagtccaggcagcacagggcaagggagattgtgagaagccgtgggattcgagtcctggttctggcatggaatggctgtgtgatacggtgtcagtcattgcccc

SEQ ID NO: 31559 - DNA, 2300 bp, Homo sapien
tatgcctagtgttcctgggatactgagctggcttctctgtgaagctaaaacctcacctctattttaaggcccaggtgtctctggcctcctgccctggattaggggactggcccctggggtggtgaaggtcagggccccagcccccaaccacagtgctgggggagctgtaccaagcctaggccaccctcgctctggatggcaacttgaaagcagaaaagatgagtagtttcataggacctgtggggttggatttcgcatgcagaaaatgaacaacgaagtggtggacaaggttggtgttttattctgcctgggaacttggggcacctgtccagtgaggttggggcttgctggggctcccccttttcctccatcttctttcatcttttcccctctgctgttacggaccttgtcaagctgtgacctggcttcctgcccacctccctctggagcaacatctggatcatggactccggggctggtgtccacagtgctgggaggcaggagcaccctagtcctcctcctgacccccagcttgtccccagggctgtggagaccttggtgccagtggcccagccctccaaacacctgctgtcttggaggcaattctgtggggtgacctggtggccccagtgtcaggctgctgtgtgatgagggagctgctgttggagtagaacaggtcagcattaattaaggccgtacccttctgtccctgctgttccctctgccagttagggggctccaccttagaggcccccagggagggctggttcaatgctaggatggagagggtggcagggagaggcttcgtggtggggaaggcattggagatgggtctaggggagtggacaggcttttgtctggggtagactattcagggagagggtacagcgtgaataaaggcttggggtccgagatggaaaaagtgcttggtgcattcagggagaggcactcgggaaggataaacggaggctatggaaggagaggcaagaggggagcggtccttgggcgcgatcctggagggacaagaacgttcccagcagcttgggccgatccttggcccccgtcccacactccctccccccacacccccgcagatgttccggggaggcctccagacgcgcggccacacacctgtggcgccgcccgcgggccctgaccgcgccgtctttttcttttaaaggagccctgaaaaccatactctctggatcgcgagagcgaggccagggcccgccaagggcgtgtgcgcagggcgggggtcggcggggctgggcgggtggggggcggggggcggggtgggagatcggaagggaagcgcttcctggttcgagccgagaggggcgaatccggcttcgctccgcgccgccgggaggagctgtctgcagccccctcctcccgccctcgcctctccctcctccttctcccgccctcctcgccgatccgggcggtgctggcagccggagcggcggcgggcgggccgagcagccggggcagccgcgcgtgggcatccacgggcgccgagcctccgtccgtgtctctatccctcccgggcctttgtcagcgcgcccgctgggagcggggccgagagcgccggttccagtcagacagccccgcaggtcagcggccgggccgagggcgccagagggggccatgtcgtaccagggcaagaagagcatcccgcacatcacggtaagcggcccccgcccccgccgccccgcgctggcctttgtgggctgggagtgggcgcccggcagggtccagatccacggggcgccggcaggggcgccccccgaggcctcctgcgtcgccgcgggtggggcggggccggtctcgggatttcagccccctcccccagcctctggggacaatgggggtgggggagccccgcatggcggggcggggctggagccgggagtccctctccccgcgggcttgccgccccctccccccacgggatgtgccagaggatggcgtggacagggaggatgcggagccgaacaaaagagggaggggcaggggtccgaaccccctccccgcaggcctcgcgcgggggtgggagggtgagctgagcctccttggctcggcccccgcaccgtccggcccatgcaccccacagcccggtacctcccccgctggaggagggaaaaagatcatccagcgctccccactccccgcctttactgatggagtggaagtccggacctagggacagcgccatgatggaagctcggtccacccctccccgcagctaaaaataacctaatggggcgacgctggcggctgcggcccgggaagggttaatg

SEQ ID NO: 31560 - DNA, 2300 bp, Homo sapien
cctcttctccctgtggtcccctctgcctttctccatggcttctcaggcaccggacaaaaggcagcgcctctggcgctcccggggctccgaaagcactcgagcttcgcgactgtggaactcaggggctcgcgatctccacggagggagggttttactttctgccggcagagcggccttgaggcttgggttacagtgggctcgggttccggggcgggcctcaccgctccagggcttcgcaacgggtgccccggcccttccccccccgcccaccaggcttctccctgggctgcaggaggggtttctgcggcgcaggcgcaaggattgccgctgccggaggctgagcggctgcggcgctttgtaccggcgaaatctgcttgggagcagcgatctgtttggccagtggcaggcggatgctcctccccctgatacgcacgtggtcttgtcccttgctgtaggggctttctgctcagatctccagactgaccccagggaacgccctggtacggggaacctaggacttaacaactccaaggaagggagtgtaggagttggggagggacagtgtccccatctgcaatttccggtcattgacagggattttaggccccgctgagagccagggatgcatgaatgcgtggagggaaatgagttgtaaacagagtgtaggggaacctggcatctccatgctgctttgctgcagctaatatgttttgcacccggggtacatcattttacctctgtaagcctcaatttcctgtctgtaaaatgggaaaattatgcctagtgttcctgggatactgagctggcttctctgtgaagctaaaacctcacctctattttaaggcccaggtgtctctggcctcctgccctggattaggggactggcccctggggtggtgaaggtcagggccccagcccccaaccacagtgctgggggagctgtaccaagcctaggccaccctcgctctggatggcaacttgaaagcagaaaagatgagtagtttcataggacctgtggggttggatttcgcatgcagaaaatgaacaacgaagtggtggacaaggttggtgttttattctgcctgggaacttggggcacctgtccagtgaggttggggcttgctggggctcccccttttcctccatcttctttcatcttttcccctctgctgttacggaccttgtcaagctgtgacctggcttcctgcccacctccctctggagcaacatctggatcatggactccggggctggtgtccacagtgctgggaggcaggagcaccctagtcctcctcctgacccccagcttgtccccagggctgtggagaccttggtgccagtggcccagccctccaaacacctgctgtcttggaggcaattctgtggggtgacctggtggccccagtgtcaggctgctgtgtgatgagggagctgctgttggagtagaacaggtcagcattaattaaggccgtacccttctgtccctgctgttccctctgccagttagggggctccaccttagaggcccccagggagggctggttcaatgctaggatggagagggtggcagggagaggcttcgtggtggggaaggcattggagatgggtctaggggagtggacaggcttttgtctggggtagactattcagggagagggtacagcgtgaataaaggcttggggtccgagatggaaaaagtgcttggtgcattcagggagaggcactcgggaaggataaacggaggctatggaaggagaggcaagaggggagcggtccttgggcgcgatcctggagggacaagaacgttcccagcagcttgggccgatccttggcccccgtcccacactccctccccccacacccccgcagatgttccggggaggcctccagacgcgcggccacacacctgtggcgccgcccgcgggccctgaccgcgccgtctttttcttttaaaggagccctgaaaaccatactctctggatcgcgagagcgaggccagggcccgccaagggcgtgtgcgcagggcgggggtcggcggggctgggcgggtggggggcggggggcggggtgggagatcggaagggaagcgcttcctggttcgagccgagaggggcgaatccggcttcgctccgcgccgccgggaggagctgtctgcagccccctcctcccgccctcgcctctccctcctccttctcccgccctcctcgccgatccgggcggtgctggcagccggagcggcggcgggcgggccgagcagccggggcagccgcgcgtgggcatccacgggcgccgagcctccg

SEQ ID NO: 31561 - DNA, 2300 bp, Homo sapien
cgaaaacacttgcaagatagcctggaggctgatgggcctcaagaggagtgtctgtggcaaatctgcacagtggacccagggacacaaggagagaggagccaggatgcagctgcggtgggtggaaggtagatggaggctgtgtgtggaactttctgttctcgcattcagcactctctcccccatgagagtaaacacttgttgaagacagagacttagaaatactcatctgtgtccccacactagcctctctctcaagcacagaaaaataacttgctaaatgcccaccgagtggatgagcccacgctctaggcctggctgaacctccttgagattgaggccctgagggagccatttcacatctcccctcctgtttcctcttccaagagggggccggtaaaaatacctacctgctgcacagaccccttgttgcagggttgaaagacagtagcttcagggaggtgtcagctgaggccacggatccgacggccccaggatcctcagtccatggggcccaagagtcataaaacaagaacatgaatccatctgtctgtctggtattcctggagcttggtcacgctgcgggagctctggcttgcagctggcagggcccggggttgaagggacagctcccagcatggaaggctatgggtggggggacattgcaagaagcactgatgctcccctctgcagtccccacccagtcctgactttgcttgtctagactggctcgaggagggggtcggcagctggcgattctgcctctccaggaagtgcagctgggactgtagggtccccagggacttgcaggatcctctgcctgataatcgtggagaaataagggaaggtgtctataggaggcaggtggtgcctggccttagaggagagccccagcagagcgacctccacgacagagaaaccccagaacgcccagactgcaagctccaggagcaacaaaagtggactgtgcccctcgaatgagggaatatctgtctgtctggttgactgccagctgtgtgtgtgtggtcatctctgtctctgtgtgtctttctctggagcgtttttatttaagcttttgacttcctttattactggtgtggacttgtgtgtgggcatcctgttgccagtttatgatgcacatgtgtggaatcgccctgagcttgcctttgatattggtgtgttgtgtggtgtcattggcgtgcacgtgtatgtgtgtgtcgctgattctcatgcaagaatgtgcttctcttatgtgtctgtcggagtgtgcctctagcatgtccctcttggctgctgcaccacctttcctggcccttaccacctcttggcccaccatatgggtgcttttgtatccaattcccctccttagcaggtcagctcctggagggcaggcacttggtctcttttgtccatggctctgttcccagctcctacaacagtgctaggcactagtgggcgctcagcaaaataaaactgacggaatgaacggtgtgtccaacgcatgtgcctctccagttgtgcaattaatcttggtgtgatactgtgtgtgagtggggttgtgagacaatgaggatttctgttgtgtgtttgtaatgaactcggaatgtgcacaagcatatatgtgtatgtgtgtgcaacattgagtatggtgtgcatgatcgagcccctgtgtatctctggagagcatgtgtgattgactctcgtgtgtgtgccagcatgtctgtgcatctctcatgtgtttggcgtaattgtctggtgtgcaggtatgaacccgcgtgtgcctccagagcgtgtgggcgcgcgagtgtacgcacacggctcctgccccgcgctctcctcgcgccctgcgctccgcctgggggcggagagtggggggtgcggcgagggcactgcggtgccgcggcccgccctccgcgctgcggctcgggagcgtcaccgtccctccccgccccagccgcgatccccgcctcctggtcctttgtagctggccgcgccgctagcccgcagccgcccagaggccccgccccggccccgccccggcgcgcgccacgccccgcccctcccctccctgggccgcagtcgcgcccgggccgccgcaggcccgcaccgaggcgcggagcgcggcgcacggcggtgcccagggccgcgggcgggcaggcgggagcgcggtgggtggccggccttggacgggtatggcggaccggcggcgcgcgtggaacaccgaggacgacctgcccgtgtacctggcgcggccgggcagcgcggcgcagaccccgcgccagaagtacggcggcatgttcgcc

SEQ ID NO: 31562 - DNA, 2300 bp, Homo sapien
cctcccaaagccacaggacacccaggctgggattgtcaccagacaagaggccgcggtgcctccctcttccacgaggccccctacatttcaaatcacccatttctgaaaaaacaccccaaggatctgaaagacacttggaacaatggaggaggaagccttgcggggagaactgaagaggggaaggcaagggggactttgggcaggaaggggaaaaaccttggtgacaagtaccagctaagtcaggaaagccatcagaacctgagcttggagaatggggctggagctgcagaggacgtgcaggatcagaatggggcttcagagactaaggccgccacctgccgccctgggtcctggcaggagtttttgatgcctcttctacagggggaggcctcagtatcaaaggagggtcccgaatccctgagcaggagggaaagggtggaaggatacgtctggggtctccgaggaggactgtcatcagagaatgaggaagtggcacccccagccaccttctccagggctcatgagaccaaagagccatggccaacagacagtcagctcctcgcagggaaagtcagagccactgggaggacagctaggggcaaggaggaaaaccaagtgtggcttggaaatgctctgcttctgcaaggaggaagcctggaggacaaagggctagaggaagaggatgagatgccgcatcaagaagcatccggtctggggtgcaggggtgcccccgaggagcctgactcccaggaacatgagagcaaggaaatgcttttctttgcaggagagacaggtttgccactgtttcccagatttgccttatcagttgaaggggccgaacccactgatcatggtcatccacaggctgtgagcaaaggacacaacaggtgtgcactcacaatcgatgagcttgcacaggacgtggaggcttgtttccagcagctgtccaccctgcagccgggcagcaggggctggcagtgctcagcctctgcatgtaggggagagaactggagctttgctcagaagtggcacagtggctgggagagagctcactctcagcaggtttggggaaattggggtatttgttctaatgaagaagcgaagtctaaagagagtggtgaaggtgataagccgggaaagaccacggccctgggcaccagcgaagttcctggtaacccagggacactgcctcattgggatgaagccagcccaaaccctccacaggggcctgctgagccctggggtgccctcgagagagtgaggagcaggtttcatcagctcatttctggattgaagaaacagagaagccagattttacatgacaacaccaaacttcacggagaccaagagaggttccatgaaagagtgtgcgcccttgaaagagagagagagagagaggtgacaaaaatatccaggctcgagcgggataaccacaggctggtaggggacatctctcagttaaagaaagaactggatcaatatttacaggcaatctctgaccttgaagactgcaatgggaagagttactgcaaaattttggagcttgaagaggaaaatgaaacactgaaagggaatctgggccaactccagaaagccacgtctgagagtgtcaggaaatccaaagacacgatggagcaagtcaccctggaaaactggaagctccagacactgatctcggagcttggcgtcagttataaagagctgataaaggatatcgtgctaggaatagaagacatgatccgggccttaagtggggagaacgagcaccttctacgcagggtccatgtcctggagagggaagtcaccttgcagaggagcacggatcaggggcgtttggtgaggggaagggagcacctccagggaaaagccaagatgcacgctctagacaaagaggtgcaggtgactccactcacaggacagctgctttcaagagcctgtgggccacccttggaggaggaaatgagtctggctgcagggcagacaggaccttccacaggcaccgggaattccagacgcggtgctgattctccccctccatcgctggtctggagaaacactggtgtagccaatgccctgcaaggaaatgtcagtggagcagaagtgaaagaagcacatttggagaaagaggagaagaggcccaggtgttctgtggctcaggggcaagctctgagctccctgagcaatggccccatggtaggttgggtctgcatatctgcttactcatcacgcatgactctgttccgggggccaccccattcacttatgcaattcaccagagtcctgtgagggaggtacaatca

SEQ ID NO: 31563 - DNA, 2300 bp, Homo sapien
gagatgctccctctgtccttctcttctgtgtcttagacctgctcagcctctcccagctattctaggggctccactgagaactgcctgcagcctgccaggtctgggaggagcccctgcggactcacagtgagcctagctcaaggcaaatttcatcctcaggcctccttcagcccagctggggcctctgctgtgagctgggctcctcctctctggataaacacatcacataagtgaagataaaaatacattaaaaatatggaggaaacacctcctgtgtgcccagcactgttctaggcccaggagttgaacaaagatgaagtcctgtcctcagggagtggaccacctgcaccagccccatccatgagagccttctgcagcgctgctcacagtctgcatctgcactgcccaagacagtagccacgagccacatggggctattgccaccgtagaactgaatgttaaccttgatttaattactttacattttaggagctccatgtggcctatgactagtggattggacagggcagggctatagggggagttagatgatatagacagaaatatataatatggtgtgagggcatggagggtgctgtgggagaagatgacatagggtggatggcccgagagtgagggagagcggtcagggagggccttttcaaggaagtcacatttgcattgagatgtgaatggagccagggagtgagccatgagggcatctaggggaaggacattctgggcagagcgaagagcacgtgcaaaggccctggggcggtaccagctgtgtcctgtgtgggaaagagcttgtcccctgtgcagctggtgaggaaacacggagaaccccaggaggtgagtggaggtgggggtgctaaatggaggaaggggctgtttcacacctcatcttctctctccatttgtagcttactctggcagagcccagcttggatgaacagattcttctcctggtctgtggctgcccaccagaggagtgcttggacgagtcactcctccgcatggacctggcctggatttcagagaatctagcagctgacccagctgcagaagcctttctcctggtgcagacatccgcactccctctctgggggccggctggggactccgcttcttggcgaccactgctgctccaggaggttccctcagatggacaaaaaatccaagaagagttggccaccaggtccccgcctcctcccaaagccacaggacacccaggctgggattgtcaccagacaagaggccgcggtgcctccctcttccacgaggccccctacatttcaaatcacccatttctgaaaaaacaccccaaggatctgaaagacacttggaacaatggaggaggaagccttgcggggagaactgaagaggggaaggcaagggggactttgggcaggaaggggaaaaaccttggtgacaagtaccagctaagtcaggaaagccatcagaacctgagcttggagaatggggctggagctgcagaggacgtgcaggatcagaatggggcttcagagactaaggccgccacctgccgccctgggtcctggcaggagtttttgatgcctcttctacagggggaggcctcagtatcaaaggagggtcccgaatccctgagcaggagggaaagggtggaaggatacgtctggggtctccgaggaggactgtcatcagagaatgaggaagtggcacccccagccaccttctccagggctcatgagaccaaagagccatggccaacagacagtcagctcctcgcagggaaagtcagagccactgggaggacagctaggggcaaggaggaaaaccaagtgtggcttggaaatgctctgcttctgcaaggaggaagcctggaggacaaagggctagaggaagaggatgagatgccgcatcaagaagcatccggtctggggtgcaggggtgcccccgaggagcctgactcccaggaacatgagagcaaggaaatgcttttctttgcaggagagacaggtttgccactgtttcccagatttgccttatcagttgaaggggccgaacccactgatcatggtcatccacaggctgtgagcaaaggacacaacaggtgtgcactcacaatcgatgagcttgcacaggacgtggaggcttgtttccagcagctgtccaccctgcagccgggcagcaggggctggcagtgctcagcctctgcatgtaggggagagaactggagctttgctcagaagtggcacagtggctgggagagagctcactctcagcaggtttggggaaattggggtatttgttctaat

SEQ ID NO: 31564 - DNA, 2300 bp, Homo sapien
tgttgagtattgggatcaaagaactagtgtttaaatataggggttaaagggtcacataaatattccccggcatcaggatcagaggtcgggttttctcttagagactgcctgccttttattcgtgcggacacaaactcttccaatgccaggccttatctctgatcataggatgcagagcagcaggcagctccccagccagttggtggtggggctgggtgagggcggttctaggagctggggctacaggcttaggtaatgcagcctccaccaaagaggaagaaaggaaggcttggatgagtgagtgaggactcttgatcagagtcccagtgggaggtcatggcctcaagtggaagaaatttcacctttttactcccatttagagcagcgtttgctggttagatagttttattccgagttgatttgacttcctccctccctgctctctctcactctctctctgtctcctcttttcccaccctccctctcttccttcctctctcccttcttccttcccctgtctctttcttcttccctcccttccttcctccttcgcctgcttcctttctcctttccaaccctgagacctttattaagtggtaacagtgtatcaggcatagtggcgagccccgtagtggttaccaagtaaaagtcatcataacaacagcagctaatgttcagggaaggtcaatgtcatgtacctggcactgtgctcactgcttttacttatattgtcttgtttaattctcataacaacactatgagtttggtatggttattggataatctcattttacaggtaaagaaacagatctagacaagtggaaggactcactggcctaaggtctcactccatacccttagccactttgccgtccagcttcaatggctattgagatccaccttcaactctaagtttcaaagaacttgaacagcagacaggagaacaggtggttccagccaggaggactggaggactctgagcttaaatgcggctgtgaaggtcacagtgctgtgagtgcaactaggtggggcatgggaagctctaggaagacttaggggaggtgacattgaggctagagttggccaggtctggggtggtgagaatggtgggtaagcaagcagagggccttctgggcagagagaacagcttgggcagaggcatggaggcacctcagagagggcgctgagcatttggggatttggaggcagtattttgtggtgcagtgaggaagaacatgggagtctgatctcatctttcatcttggccctgctattgctgggcttgagatcttgagaaagttgcagacacttcttaagccttagtttttccgtagggaaagtgggaataattacagaagtaacttcatagggttgtggagaggattaaatgaggtcctgtatggaacatagacatggtggccattgttttcatttttggcatgtagggtgctatggccgtgtcacagttgggagggcagcaggagacaagctcaggagcttgaatgccagaccagagtacttgggccacagcctggagacagtgggagactggggaaggtatggcgggggcgctgcacaaggtcacatagaagccaaagcttggggagaaagagctgccatccccagcagccttcaccaggtgttttgcttttggtggatgacagggacccactggtggggttgtaaatgtgtgtcacctgggcacactcaacgctgactgcttcaggtgttgcactgggtgtcttccggtggcagacattattactgtcttgctcaagtggaggagcttgaagctgggatgcggaaatttcttgcctgttttcttcttcccgccatggtctaggaagctgattttagaggcctgccttttaacgtgcttttaaaagatttttcttcctacctgtagcatcagggcagttttctggggcccagatggagtctgttgggttttgaagaggaagccagacagacgctgatgcaggtgctgccggccccgtggtctgttcatgaaggtcaggagtccgttgagcgccgtgggagctgcctccgaggcagggattaagaagcgggtgtctattcctggatgcggaaaccactcagttcagcaaacagggctgtgtacctgctgtgtcaggccccggacagggccctggggacgtagaggtggatgaaccgtggacactgtccttgagaagcccgctgcacagtaaggcttttagttagaagctgacaccgggggccaacctcagcccctggtctccgcagtctgcttgctttctctgaggtgtttctccttctct

SEQ ID NO: 31565 - DNA, 2300 bp, Homo sapien
ggctaatttttttgtatttttagtagagacagggtttcaccatgttaaccaggctggtctcaaactcctgacctcacctcaggtgatttgcccgcctcggcctcccaacgtgctgggagtacaggcgtgagccaccgcacctggccccttcttggtgcttttaatggaagcacgtcaccgtcatgtccgtagtggccattggtgttgctgtaagtggaggctcagacagtgaccccagggctggccactggtgggaccacagcatcctgactctagccctggatgccttcagaaagtattttctttgctcattcttttctgaggccaggtggactgtgcagggggctgtggatcagcagggaggggcagggacagggaaggagctgtgggggcctcatgctgtgaagggctgggttaggaagccctgtaggaggtgggacgcaggagcgcttgcagggagtggccacagtcactattagatgcaaaaataatcacggtttttgccattacttttgcaccaacctcatactggaaagtagaggagaaagggcccgtggtgaaagcacctagaggcagttcagagtgtgggaggggcagctccccagtggggccgggggcatccctcctgcctttgatgttagtattggttttcagaactgcaacccgaagtgttatgcctttcataagtctgtagaggtgaatggacagaaaggctgtttttcttcattataacagttaacatgtgtgaatggcacttagcaagtgccaggatctatgccaggggcttttgtaaataaagttttattagaacacagccacgcccatttgtgtatgtatggtctgtggctgcatttgtgccagactggcagaactgagcagctgggggagacatctgggaagccaaagacatttactccctggccttttccaggaggagtttgcctcccgctggtctgtgctgtccctggtctgactgaacccattcagtcccagagggaggcgcacacctgcatttctattttatagatgcgcatagaggggctctgaagctcgccagggattataaagcgagtatgttccagagcagggatttgaagccaagaagcccatgttcttttgtgggggaggggacaggagcagggagatttatatttttattagcttctaatttaattttaccatgttaagagaatgtgtgtgatatctattttcaaaaatttgttgacaattccttgatggcctagcacctgatcattttttaaaatattttttcatcatggttaatgtactaaatatattaaaatatttaatcatggttaatatattaaccatttctaagtgtgcaattcagtggcatgaagtacatccacactgttgagcaacgagcgctaccatccacctctagaactctctatcatcctcacctgcagcccacattcttcactgatgccatgtgctgtcttgtgggagttttgtggaataaaacaaatgttagtggcatcacaatttagcagagaaggctttgacatcagacttatgtttgagcaccggctctgccatttaccggctattcttgtcccattgtctgcagccccctgaaccctctgcaactcaggttcctcatttgggaaatggggatcaccccagtctggtccctgcacatccctcggttgtgaggatgagactaaagaacggaggtgaaaggcctagtctaggatcacgccgtggacagcagctgcagtggcgggtccctttgttgggcaccaccgcccacttgtgttaggtcagcctgttcccctctgtgtggtctgaggtggcccctttatcctttccagggcttgcaagcatcctcaggacccactgcacatcctaaaactcccaactggcctgggaggacctgggtacaggctgcctgctctcctgtctcccaccgtggcttagactggctgaagggccactttaaggaatgaaaggggttctgtgtgcaccagccagggactgccagtgggtgctcattgtggcagaaatacccttatgcctgccaggtcagagggaggcgctggctcggtgtgctggcctctgagcttctcccttggctgcattttgagtcaggagcctggactgacccgggtccctccacagcactggagggggtgggacacatcactacagggtttccttccatgaggactctgaggagttgacagtggaggcaaggagtgagctggtaagtagctttccactatcttttacccttggagcttctgtctcctgtcttctctcaccctatcctgttgcat

SEQ ID NO: 31566 - DNA, 2300 bp, Homo sapien
acctcaacagcaacaaaaatcttgcaacaagccacaagcctccactgtgcgctacaacatcagtctctgcagagctgcaggtctccaggagggtggaaatgccctgctaggaaaggattctaattcccccactctatccccgaatgtgtccctcctccttgcccatcccagctagtggagccaccacccaccagcccagggtgctacaggaagggccagctcctcccatggcctcgccctccacaccagcgggttactctgacttaggggggatggccctgctatgcccaacattcactgtgggtggagccctgggagaggggctgaggctgcccctgccctcctccccacctcctcctctgctctggaaggcagaggccatcagatggtaacagcatcctgggacagcgccacgttccaggaaagctcaggaggggcaaggggatctccctgactacaaggagctggccagctgaagttagggcgttcgcggagagagcacagcactggcaaaggccaaggacagtgtgcctgcgagtgtgcgcagatggggcgggcggcggaggagggctggcggttagatacagtatcgctggagctcagagagccgggcagaggctggcggagagccgaggctggcccagccttcaggagaccggcgagctggggtgtgtgggagcgggatgcttctaaggcgaaaagaagcgccagcctcgtaagcggcctctatctgggctgcccaggccggatgctcaggagcccacagcaggggggatggagcgaaggaccgaggggctgggaggcgaggccgcagcgcactgacgcaggccagcgaggccgctggccccgacgcagggcgcccggcaaggtgtctggcaccacgagagtcaatccttgcgcgccatctccggaggccagtgcgcccagggcgcgccggcccggcaggagggtgggtgccagcctttcttcccatctctcgagcctcctccccggcgcccacgtgggcggagcagcgcgagggtgtgcgtggcaggggccgcggcggcgtgtgccgtgcgtggggtggggtgcgggctgggcggcctcgccttcgggccccgcgccgccggggcgcggcccccagctccatcttctttgccacctgggcggagatctgggggactgtgacctaccctgcggaagacacggaggggacgggccggccacaccccccgcgccactccggcaggcaccgggtgggtccccctcccgctccttggcttgagggcggaatccggagaagagtggaaataggggtggcgtgaaggagagctgggggctgggggcgggaccgggagggggtgttgggggaagcgacgcagcggctgggagattttgcaagggggtctgaagaggagtgggggatgggtatggaagggtgggggaccactgaggtgggatgcgagagtggaagggggacccagagggggcgcgatggccggaggagggggagatggacgatggggcggggcggcaccggtcgccgcgtcccttgccgccaggtccgcccctcggtcgccgggtccacgggttccctctggccagcgctcgcctcccgccccccggcgcacctgtacccacctgctcggcgctcaggcccgagccgggcagcagcagcggacgtagcgagcgcagccccgcgccgcatcctccggccgccccctccccgctgcgagcttacgccgctgtcgccgccgccaccgccttaaaaaggacaaaacggaacagaaaatgaatgcatgcacaaaaaaaatcgtaaaaagcaattgaggaggatggcagtcgcgcgcgcggctcggcggggcgggagtcgagaggccgcggcactggtggccgcgatccgggcaggcggccggcgcgtgccgcacgcgggtggctgcagctccctcggtcgcccgcgcccggctcaggcacggcaccgcccctccccccggggagcccctccgattggtctgtcttcctgccagtcaggcaggagggcgcggcgcccgccccgccccgcccccgcccccgccccgggcagatgccgggagctctcctgccgccgtgggagggggagctgagctgccggagcgtgcgcactgggccagcgggcggccggggcagggctggggtcccggcgctgagcgcccccagccgcgccgggcagcctggcgcctcgctgagtcggagcaacccccggcaggagctttcaggctctggtcaagcctcgggacccgggaagctatccctgccctcgggggctcgagcctggagtgggg

SEQ ID NO: 31567 - DNA, 2300 bp, Homo sapien
acacacatgtatcgaagtaccaccagctgggctttttaaacaacagaaatgcactgtctcacttctgtaagctagaagtctgaaatcaggtgtcagctggtccacgctccctatgaagccctggggaaggatctgtcccaggccgctctcatggcttccgggggtttgctcccatctttggcatttccttggctagctgatgcctcgacctgatctctaccttcatgttcacacggcatgctcccgttgcttgtgtctctgtatccaatttcccccttttataaggatagaaggcagactggattaggaatccaacctactccattgtgacctcatcttagctaattacatctacaacgaccctatttccaagtaaggtcatattctgaggtcctgggagtgagcacttcaacatacgagtttttttttttgagggggtgggtggggggaacacaattcatcccaggatacctgggcattgtccctgattgtccctccctccctcctgtccacgtccaagccgtgagcatgtcctgccaattctgcacccagattgctctgatgcgctgatacttcactgtatcagcgtggaggaggcccccacactgcctccttgtccccactcttgactacttcagcccatgccccaagggcagccagggcatctgctaaagatagtctcacatctgctcacagatatcctagttcctcctgaccccctgaaccttagaggtctgcacttcctcctcttctgaagttaggcatggccatgtgacctgctctggccaatgaaacgtgagcagaagtgacgagagtcccttcggggaggaagccttcaaagccagcataattgtcacctttcattcacattgctgcaccatgtgggtgctcggctggcagacagccccagcagcttgggctcccaaccactctgatgaacagagccccattgaccgaggcaggatgtatgatgtgggcaagacacaccagggagatttgggtttggttgttactgtggctaacatagcttatcctgactgatgcactttaaaaaatatcaatctgacaatggtccatgggaccaccttccaggtgagacagtctccaaactctcgccagcctgcaagaccttgcaagtgctgcccctctgtgcccccgccccccatcttccacacactccctctcaccattctgtggcccagatacttttatcagattctcaaatatgtcccgttcacagcagtcagggtgttcccccatgctgctccctttggtgggtgctcttccctgccttctccttgctagaaagtaagctctggtgggcagccgcttcctctctgctgttcactgtggtgtccccacatcttagtgactacctggcacacagcaagtgctcaataaatatttgtctaatgacactgaatgaatgtttgcccagctgagtcctgcccctcccaagtctcagctcgacagcacatctttcatttggctatgacctgctgatgtggctttgctgggggcagcctgggctggtggggggaggctccctaggctggcatccgcccagctctgccgcttgctggctctgccgccgttagcgtgcgctttaacctctgaccttcagacctctcatgcgtacagagggggacatggatctccggggtcgctgcgtcttcctgaccactgacggccaggacggccccagccccgctttacctgcaagccccactccaggctcgagcccccgagggcagggatagcttcccgggtcccgaggcttgaccagagcctgaaagctcctgccgggggttgctccgactcagcgaggcgccaggctgcccggcgcggctgggggcgctcagcgccgggaccccagccctgccccggccgcccgctggcccagtgcgcacgctccggcagctcagctccccctcccacggcggcaggagagctcccggcatctgcccggggcgggggcgggggcggggcggggcgggcgccgcgccctcctgcctgactggcaggaagacagaccaatcggaggggctccccggggggaggggcggtgccgtgcctgagccgggcgcgggcgaccgagggagctgcagccacccgcgtgcggcacgcgccggccgcctgcccggatcgcggccaccagtgccgcggcctctcgactcccgccccgccgagccgcgcgcgcgactgccatcctcctcaattgctttttacgattttttttgtgcatgcattcattttctgttccgttttgtcctttttaaggcggtggcggcggcgacagc

SEQ ID NO: 31568 - DNA, 2300 bp, Homo sapien
ttcctgttctgagcgtttgctctatcttgaaatctctactgtgattgaactgtctcggtgacgggggaactctgaatatcttcctctgaaaggggacatcactgaggtcctttctctgtcttgccacagtggatattttctctcttttgtccacatagatgaatcctgtagtagccatggtaaggatccttgatcctatcatcagagtccctggacattgctccaaagtcccctaggaaccacttcaacttttctccccttagatgtgacctgttctttctggaactctgcaagaccgtctctttatccttggcatctgggatttccagggacacgttctcctggcactttgctcacctctgtttcccctccagctcttcctggagtacctgtcctttgtgcaatacacctcctggaactgtctttccagtctctgctttttgtcctgatgattttcatgtgcttttcctctacatcatgaagcatttactccacattatcttccagtttgctcatttgtcctcacctccactcttctctttctgaatttgcctgttgctttttcagtctcttagctccgtggagtatgttcagtgttgctgtgttctgatagaggctccttaagccatcttgtagattttttgttgcacttcctctcttcccttagacctccacaggaggaacttttcaatctgtcctcttctctctgcttaatgagcccctgcaaagggtttgggaagtgcttcagcctctctgtgattgtgtgttcacattaatatttattattttcttaaatgtgcataaatctcacaatgtgaacagtgatcatctttgagtgattttttttctcctttctacttttagtaattctccaaattttctacagttagtgtgtgataaggtggaaagacatcttcaagactttgggcaaataactatgtctgagcctcaattttcacatcaataaaaaatgggctcagtgccacctccctccttgggtcactaggggggcccttgaaagctgtgaaagcccctaagccaacctggacagagcaggcgaggctgacggcaggtgttcttccttcctctgtgagcctcacagggtcacacgtgaacattggggatcgggggtgggcagtgggggcagctggagaatcaaatgaggtgactgacatgaactacgccgctttgacaaaagtcctccgaagtagtgtgttcagaactcatctccaaagccatctggaatatttgctcccaacatgttggtaagcattatctctgacagtcactccgagccccagtttctgctgtgataactaggacaggtagctcaggttggttgtggggaccagagacagagcaggcagggtctcacgttccccagggcctctcaaggatagaccctcgccctcatctccaaaccacgcctcccagacaggaaccaaactcccagagtctccaaactgcctgagccttgcccactccctgggctaacacacactttaaaggaatcccacagtcaccgtgtgaaaagcttgctacactgcatttgattctgggcactgaaagcagtacttggctgcagacactcgtttcaaacaggccccatttttccatctctgctgctgttattaggggagcccttagactctcttgcagcgccggaataggcgctcaagacgtgtgttaatattgcaacagcaaatataatgaatctgcagttggggacgctgaggccggagtggtggatgaaaggtggccggagccttttccacgggtccaaaccacctgttacaggagaaggcgagcggcctcgctaagcaactggacgttccgcgggcggggcgggggcggggccggggcccgagtccgctcggaaactttcgctgtgggcgagccggacccgccttctggcccctcgggcccaaccacgcagggggagtgccgggccgcagctaggcgaggcgcaccgtgattggcggagatgtggagtgattggcggctacaccggccactcagcaggccgagctggcgccgcatccggggggccgcgtctggagtggagggaggccgaaggccccgcccctgccccgccccctcgtgcagaaggccgcgctagccggctcttcagcagcgagtgcagattgctcccccgcggccgcagatctcccgtttgcgccgcgttcagctgctcccgaacaacttttctgccggcccagaggccccagggcgtcgcagcgccgcgtgcggcccactcacgggccggtgagtacttcggcgctggggcagtggcgcggtgg

SEQ ID NO: 31569 - DNA, 2300 bp, Homo sapien
agacctgaaacaaaaagcaggccctcagtagacacggagtctgcaacactatgatcttggacttcccagtctccagaatcgaaagaaatacatttctgatgtttgtaagccaccagcttggtctatggtattaatatttttgttataacagctcgaacagactaaggcattcactcttaagaaggaaaaggtaatatcaagatgtatatacactgattataatatccaaaaaatgtggtttttgttggtacaatcatggaaaacatgaacttgatttgttggggttctgggcttcgggtacaggtgctttgtattatttaggtcatgggctgtcaaacttgagtccttggatctttctagagccccagctagagcaggcctaggccaaggggtgtgatggtgggacttggctctgtgctcgcctccttcccatgcctcccaccccgagcgctttgagttgctgttgaaccacctcacccgcatagagtttgctcatcttgctctggcgctgcttgtgaccggaaggcaaacagtggctttctgggcatcttccctgtctgtgtctgtgtctctctgtactcctggcctggatttgaaagtgacaagcagcagcagatctgaagaccctcatgccttgtcccctccatcctgacaagtgacaaagtctggctttgtgacatgtgtgtttgtttcttctgtgttaaagggcctacaaagggagacatggaaatcccctttgaagaagtcctggagagggccaaggccggggaccccaaggcacagactgaggtgaggactgcggtgccggcagggacttcgggacgcggcccccggcacaacaggcctggccacgagctccacagcccacagagaagtgtcggtgcctgagatcggggtcaggagccagcgtggtgcaccctaccccacttgagccccatgttggtagggtgcccatgttcactgtgccagttttcctcctggcactcctctggggagcagcgctcatcccccttttgtccaactcacacctcatcttgggcatcacctcctccaggatgacctcctggcttcctgcagctgcctgctcagtgccacccctcaacatacactgtgtatgctgcccactcttgtctccctgactggcctttcacctggctgttagctgtgtgcacggggccctcagagcggtgaccattcacttgggcatcagccaagggctgggctttgtgccagtgctggggacatgatgtggccctctcttcatgggtgacaggttagtggaagaagcagacccaaaaaacccaagtagacaagacacagaaatacagtgattttgaattctggtgaggggagaagccagcagaacgctgagacgggaggtggcagggggtcctgtgtcctctgtggaggcaagttctcaccacctcactctgtccccttgcacagggctcaagcaagtgaccacagttatcctgagcagtttcctgccccctcttctccctaaagaggagaaaagcttccacgcgaaaccataaattaagaatttctggctgggagcggtggctcacgcctgtaatcccagcactttgggaggctgaggcgggtggatcacctgaggtcaggagttcgtgaccagcctggccaacatgatgaaaccgtgtctccactacaaatagaaaaattagccagacatggtggtgcatgcctgtaatcccagctacttgggaggctgagacaggaaaatcacttgaacccaggaagtggaggttgcagtgagccgagatcgcaccaccacgctcccaactgagcaacagagcaagactctgtctcaaaaaaaaaaaaaaaaaaatttctttcctgacctcacagccatattgtactttaaagttcctcccacatccttttgcccaggcatttggaggcggggggagcatagtaagcccttttatgggctctctgtgccctgggcctcactttttccatctgtagaatgagaagactggaccatttcagcagggattctttttgcaaagggccagatagtgaatattctggactctgcgcaatctctgccgtgttgctcagctttgctgtggagcacgtaaaagcagcatggacaacatgtaaatgaatggttatggttgtatttcaataaaactttatttgcaaaaacaggcagtgggccagtgctaacccttggttagctggcgtctctccagccctggctttctatggtcccctgactgttttgagaggtgtaaaggacccagtcatggttctgatttccatgcattgatggt

SEQ ID NO: 31570 - DNA, 2300 bp, Homo sapien
tcggtgtggagggctgtcggtgtgggggggctgtcagtgtgggggctgttggttggggggctgtcagtgttggggggctgtcggtgttggggtgctgtcagtatgggaaggctgttgggtgttgggggctgtcggtgtggggggactgtcggtgttggggggctgtcggtggctgcccatagcactggcattgcgtctgctcttatttcccaactcccaggaagcaccttgggtgggttagtgtcctgtggctgctgtggcaaattgccataaccttcatggcttcaaaatacagatatattctcaccgtcctgggggccacaagttctcaatccaggtgttggcagggccgtgctctctctgaaggttctaggggaggaggcttccttgtctcctccagctccggggctccagatgttcctgtagccatcgctcccatctctgcctttgtctccacatggccttctcctctggtgtctcctcttctgtctcttagaatgtcacttgtcattgcatttagggcccacctgggtaatccagggtgatctcatctcaagatctttaactacatctgcaaagacccttttcccaaatgagatcacactccacagtctctggggatcaggatgttatggacacatgctatgctgatgtatttgtgggggccattattcaacccactgcagtggagaaaaatagtctgtgctcagttgaggcatatgggattgaagagcgattttaccttctctccttttcatcctctctgcataacttgctcctctctctggaattcctacctgtgtctgacaaacttttcttgcagggaaaatgactcttagatgctagagtgtgattggaagggaaacaaatcccaccagacagttggagtggaattagatgggaaaacagaagatgaataattcaagcagctttgccaggggaaaggggactcttaaatgagcctaattatgcttgttcccaagggaggccagtcctgaaatgaaccttgtgaagcagtttttcaagcaggatttaggcgggtatcatgaagctggggtggggccacctgcggttagtcctggaaaggaaagggcccaggccctcattttgcagatggggaaagcaaggcttgcagaatggaaatgatgttccagtaacagccaagaccagacgcccagccgggggccccgagtgacagccaagaccagacgcccagccgggggccctcagcttctgacctggtgctggtcctgcctaagttaaagccaccgagtgtggtcactgggccaaatgcttcaaagtctacacacgggggagggcatggtgtggggcagaaagctgtgttcacggtagctgagtttgggcataattctcgtgctccggaggcttctcccacagctacttcccttgtcaggagtccatcttcagggccctgtgttatgatggattgagggagcaccaacaggggccaccccacttggtaattaattccttttgtaaagggctgggctgcaggcccgggtaggtcctatggccacctgagccaaggtcttggagaggcggtcgcacggaccaggtgaccatggacccagcccggtgcccacaccgtgaagggtgctgtgctgcccagaggttctgggcacggctctgggccctgggattcagaggctcgggactgcttgcctccccacggagatcttaccgtggggaccctgttgtggagggcctgccgcattggccgtgacagtgatttttctccttctgcagggtgatgtggatgcagggcctctgtgtctcacatggttgtttcacagcagccaccgtatccgaagacagagagaaagagcaggagagattcccctgtgatggctcccccatgggtcctgacccaggtttgggagactttatctccccaaagccaggccctcgatccctttgcctttggggactctgtgtccccagcctatacatggggtgctcgattgagtgtccgtgcccctcagccggccctgggttgccgtggctcgggtgtgtttgccacagggctacagacctaatggagccctgcatacttttattaattaattaattaatttatttatttatttttgagatggagtcttgctctgtcacccagtctggagtgcagtggcgcgatctcagctcactgcaacctctgcctccccagtcaagcgattctcctgcctcagcctcccaagtagctgggatttcaggcatgtgccaccacgcctggctaatttttttttattttttatttttagtagagacggggttttggt

SEQ ID NO: 31571 - DNA, 2300 bp, Homo sapien
gtcatcccacttctaaccaccctctctcaatcttttctgttgcctcaaagctggcattgactcatggctcagaaggccagggcaggccaggagctgtcctaaaaggcccagactggaaaaagaaaaggcatttcttggatagatatctctggcctggctactgcatacaggcaccatttgaagccgtgaattaagcctgaggctcctgccctcatgaagtttacgttctggccaggaagagagcctacagatgataaaagcctttacagaaagaaaaacatcagattaggttggggcagggatggtcagggtgtcctgtatgagggtgctggggtgcagacagcagtttcagcaaggtgatccaagctgtgctcacgggaaggcagcagtggggcagaattggaagaataggaaggagccatgctggtacccagggaaagccactgcaggccgagagagcaggtcttgggacagcaggtggccaggacttttgggaaagggcaaggagcctggtgtttggaggggaataagcaggtggagagcagtagatgaggctggggaaggggaggaggtaccttttgctgagttaaaaacacgagaccccgtgcatacaacagtaaatgttttcatcatcttgcatctgcgattctgtggtctgggcttggctgggcttgccctgctctgtgggtcagtggggccctgctggaggctgggcttggccgggggttgggggggttcttctgcacccactcttcctcctccccctcaggggccagtgggccagcctgcgcaggtcctgctcctggtaccgccagaggcgttgatggcaacccccagtacctaagcccctttgcatctctgtttgcggcttgtcgaattgccgttctgcaggccaaagcaaaacacagggacaagcccagaatcaaggtggggggcagagaacaggtcacctggcccaccatgggaggggtgaaggtttggctccagatgcggcccacctgggcctcggcaggtgggggctgcctttagaacactctgtgcttttctctgagtacacaatgggagccgctggagggttttgagcaggggagtgccaggatcagtcctgggtgttaccagcctctctgctgccagtctgttgaggctacgtcatagccagggagaaagagctgtggcagtcatccagtgagaggtgggagagtggctggcatcccgatatgctgtgaaggctgagcaggcaggattggatgtggggtgtgtgtgtgtgtgtgtgtgtgtgtgtgtgtgtgtgtgtgagagagagagagagagagagagagagagagagagagagagagagagagagagaacgagaaactccaaggcttgggcctgagcaagtgaacaatagagctgtcatcacctgagactggggaagctgcagaggatgaggctgaggagggatcagaattcagttatggtgaccaatgaagggttttgaatagagggacacagggatgcactggctcaggagtttggtcatcacgttggccgccagagggagaacagaggctgggacagggaaccctgtggagtgtcctctctgtggctacagggagcaacggtcagatctgtggctggtttgaaagtagatccattttgctaaaggtggtatcacagattttggagactacagaatccaggccaggagagcaaagaacgacagaggtcccattcacagcagcgggccatcccgggctcctactagcttttgctgcttgggcctatggggatggtattctagaactttccatcttccaagacatactggaaatgtggatttttataggaaatcttctacttttcaaatattaagaatgacttcaaattaaaagtaataatcattttggggctgcagtaaaacttgttggtggagcaggcctcaggcttcaggttggtgagctgtcctccagtgggggtttctcttccaggctagggccttgtcctcccctgctctcccccactcccagggctggccacccagaatgtgcaggccactcatctctgtgactcgtagaacctgagaatgttggtgatggaaggggtgttcccctagttcccacatgcaaaaagtggggcctggagatggggctgtcttttttctccaaacacttgcccatccaggaaggccagccctgggcattgaagactccaggtatgggggtgactccataaggagaggttcctgagtgacctgaagaaacatggttgggatgaagtgcagggagggtcagggcaggcagggctgagcttcgcttctg

SEQ ID NO: 31572 - DNA, 2300 bp, Homo sapien
aaacaaacaaaaaactaaaacaagaaaacccccaaaatatctccagtgggtagcacagagcctgacacacagtaggtctgcatgaatatttgttgaaggaatgaaacagtgcctggatgagtgtattgcagccccttccaggtagggcacagccatcggggagccagcgtgacagatgtgagtgctgtggccctgggatgcgatgacaaccccttctcactggggtgtaccctggattgggttggtgcatgtagaatatatggcatgctgctggcacttggcaggtgctctgtcaaggttagttgttgttacttaaaaactctaatcaagtaagcatgacatatactgaggtcctactgtgttactgttatgggctgaattgtgtctgctccaaaactcacatgttgaagtcctaacccccagcacctcagaatgtgactgtgttttgagacagggttttcacagaggtacctaaggttaaactggatcattaaggtgggccctgatccaatatgactgtgtccttataagaagaggagattaggacagagacacacacagaaggacaactgtgtgaagacacagggagaagacagccatctgcaagccaggagagaggcttcagaagaaaccatcctgctgacaccttgatcttggacttccagctccagaactgtgaggaaatagatttcttttgtttaagtggcacagtctggggcactttgttatggtggcactagaaatgaatacagttaccaaatttaatttttcaagctctctctagcagcaaagtatttcccccatataaaaaaatgaggacgctgaggctcagagaggtgaactcgtttgccggagccacagggcttgctggcgggcgttggcactgatagttgaaccctggtccactagtgtgcctccagagatggtgcaggccacgccgtctgccttggtctcacgcaagtggcggctaagcccagaggcacttgtctccatttcagtgccctgctattggctggttagaaagtcaatattttatggagcctcatcaacctcccaagtcttgggtctcaattcccccttttggtgtgagcctctgaagactggttgagcatttgtgagaaacaaagttttgactactcaagactctagttaaaaaaaaaaaaaattgcaccaatgtgccatccggctgcagcgtctcaggggcatgattcggtttttgcaacagggagtagctcttcttgaaacattatgggatttctttcctaagttgacttcacttacattctgctcagcacatgcaaagcatttggttatcgggaggcagagtaagatgacaaccctattattgaaggtaagcagacctggcctgttcacaaagccctttttacatcttatttcattctgttaccaacagggtaactgtgaagtgggtgggcaggaactgtgacttcttttcaagtctcagaagatgtcagtcccccagggaggctgggcctccgagtgccagtgcaggtggctccccctcggccgtcctatgccacgtgccctctcctcgtcattctcagccccctcgcgtctggagtcacctcgctggtttatcgtcttgtggtccatctgcccgtgagcattccagccaggtctgtgggcttcgttttcacggccgccattttggctgcccgcagagtgcctggtgcaaagcggatgacactcagtatctagagcggcacttccgggtaatccacaaacacttatcaaacacttaggtgtcacttggggtgctcggaattgcaaacatgaggacaaaccctcactccatttggggcctgcagattcagcaagagtggaaaaaccagctttttaaaatggcagcctgggaatcccagaagtaggaagcacaagcttgtctttggcaggccaggccagctgctgacccgcacggccttcaggggccagccagtgcgaccatgattgaatgcacagccctgactcctttgtggcattggctcctgggtccaggtgggagcatctgattggcccccactggtcatgtgctaaccaggaagtggtgtgtgatgggctgagcctagggctcatacctgcatgtgttttgggggaaacagagagaaaggtgtggcctctccacttctgtggacaccccaaataggaagaagggtgcacacaaagcaccgcttcctccacgaagccctcctcaggcacatcgaggagaaccagctgcccaagctcttggctgctgcccttctgaggcctgcctggtaggtggcgtaggaggaggcttggta

SEQ ID NO: 31573 - DNA, 2300 bp, Homo sapien
gccagcatagggtgggtgttttggcaggattgacagatagggagaggggacttctccatgatcagagagggaggctgaggaacatgcgggagggtgggcctcagcatgataacaagagagctcccaggaggcctgacccctgctgagcaggactggccaccccaacccagtggggccactcctgccatcacatccactttacagatgaggttgtgcctgggcccccttgtggtcaggacttgaacccagcctgtctttctcccagcatagccattttgctggctccagctagagaggtgagggggtgtggacagagagtggggggctggccttaggatgtgaggtggggggcatgtgagcagacaggtgagagagagagaggagaacatgccaggtgggtgggggccaatgtgggtgtcggtcactttcctacggggtagaaagtgacaaagaacaagcacatccttccggcccttgcatttacctggtccttgaatggagtctgcacagctgggagattttggcttgttccacagtgaaaaggtagaggctggaacagggcagggcacttgccaaagcaggtgctggcagggccccagggcctctccccaggccagcccttgcatgacagcctgcagagtgctggtggggctgctggggggctttcatctcctcataggtccattctggggatttcaaaggcacgaaagctgtagcttcaaaaactccctctcaatctccaagaaatctgagacggcatcaccttccctcgtctttcccacagccccagtctccctgcccccaacgcctttggactctcctacctccactgcagtttggggagctgtctggagttcccccagaaccatttgaaacaagtggaggccattacagaccagcccccacctggagcatggctccactgatgccttagacccaagagcccctgcagctctggtcaccccactgcacttacccctcccaggcaagccacagagtccctcgctttccaggaaggctctgttgagctcctagggagggctgatggttcctcacccacacctctgaatccccactggggcttgtgtcccgtgcaggggactgtgattcattaggcggtgggtcacggtggaggaggtggcagcttggcaaaacaggaggcaaatattttttgagggcccactatgtgccaggctgattaccagagggaggttcctgtttggcagagccctgggtttggaggggagggagggaagggaggagggggacgcattttccagcctggttttggaggtacctagctctgtatttctttaactttctcactcgtcaggagaggtgggcatgaggagagatctcagagccctgcctgggggaggcccaatcacccctccagccatttcatccagttttgccttgtcggctgctggaccccctccaccagcttcttcacatgtacttaatgctcccaacgggccccagaacttgcgcgacccaccctcttctactaatgaagggagacagtgtccttcccctcccccgagtccccattctccaggtgcgccctcttcaactgcgaccccactccttccttcctagtcctttctgccttctgcctgcgaggctgctctcctcctgcccccttcccagcaccccggctcttggccttctctcccataactggagcacctgggcacccaaggtaccctccccccaagctcagctgatcaccctctccccgcaagctggcggtctccttcctccctcccccgtggcgcacccagcaccaaggtgcccaccgcgagggcccgagcacggcggtgcagcctcggcttgggcgccggctccacctgcagggccgcgggggcggagagcgggcggcgcgagggaggggcctgcgacagcggcggcggcggcggccccagcccgcgcagcccggctcggccccggcttggtcggcgcagcgcagcgccgcgcgcgtcccctcgccgccgtcgccgcagccaggcgcaccggcaccaggccccgccgccgggcgcacggacgcagcgcgcacgggccggccgggatgcgcgcctgggccccggcccgcccgaacccgcggccgccgcccgcccaccgcgcgctcgcttgaccgcggcgcccgcccccggccgcccccgcccgtccccctgccgcgatgccctcccttcggggccccggcggcccgcgcccctgctaggctgcggcggcatggcccgcgcgcccggcgcgacctctgcggattgcatcggtgtgtggcggcggggcatgcccagagc

SEQ ID NO: 31574 - DNA, 2300 bp, Homo sapien
tctaagcctctgaccccctccctcttccttcttggccttgaaagtccaatttcgtcacctccacctccaggaaggcctccagggtcctcccaggagccccaaaagccccagagcagcctctccccggggcagtgcctgtcttccaacacgaggtcatcctgcagcagcatcagcccctgttctctcagttcccagccctctgcctggcacagcgtcagggcatggcggggtttcctgataaatacatgtcccacgggtagccttacagcctgaggtggggtggacctgggtcaggtcccgggcagtcacttggcatggcctagtttcatatttacaacaaccctatgaataggcataaatatccccattttaaaggttagaacctggaggctctgggtcaggctgccaggagccatgggatgcatcgtccctgccccagggttaagtgacttgctcacactgcaggtgagctgtggaggtgggatgagcccctcagctgagctttctgcacacaccagggcatggcccatttccttgagtgtgcaagggagacaggcatgcaggtaataatacattcatttattctttcgacggaaggtagacagcccctcctttctcccaggtgccaaatctggtagtgaacaaaacgaagtctcacggagcgtatggtgtagcgggtgaggaagatgttaaccaaatgcacacgttactattgaattctatacagccatcaatgctgtagagaggggaggttcacagacgctctctttggccttccatgtgcaagacacaaaggaggaatagcagtccactgcacagagtggaggcagtgcttccaggcaggagggtcagcacgtgcaaagggcttgaggtaggaagggacttgaaggatccagtcgtgcaagggtggtggccaaaggaagccagctcattctaggcagaagagacacacagaggaggaaaggggggtgaggatggggagccatggggcctgtttgcagttgctggaaggaatgtagtacaagcatgtgggaggtacggccaaaaaagcaagttggggctaaaccctgaattgtttgcaatgcaggctgaggatgaggtttcctgagagacactgggtagccatagaaggtttggaggtaggagtatgccagggtccatgctgctgatcgggaagactgtttggcactggacgtagtctcaagcagttcgcccattaaagcaagaggaagtcccccagaactgtcccacttgctcaggaggacgaagagtgctgatgtcacagggtgcagactgaatgggagatggcgctggtgggcccctatcgcaaactctcacacctgcagaggtcaggctgttgctccttgtgagtcacctgggacaagtctgatgaagaagggcgagggcacacactacacttcgcaagggtagcgatggccgtttcgaggagcatcaatgccagagaacactagcatgatctgaaagagtccacgttgctgtataggcccctctggaacctgcgtttttcatgacagagctttgattcaaatgagaagcattttgcagaacatctcttcagagtgggggttggcggggggatacacatttggcatcagctttttttctgacaacaatttgctactagtaaccaaagtaacagaacccaaaacctaaaatagcctcttcgggctgggcacgccagagcctgttcttagaaagaaatgtttctaggctgtagtctgtccctgcagtgaaatgccaacccccgtgaagtgaagctgaactttcatctgagattgtcacagaagctgcccagacacttcccccaacccaggagactcccccaacttcactgcaatgaggaatcccctcccccaaccctagccacaaaagggtgtgtccccaaggccaggatggacactctcagtgctggtacagctcagaaaacagttgaggaggaaaaagaaaccaactcagaccagccattagaagagaccaaggggaaatgaaataaatgctttgtatcaacacgggcctgtgcacattgcacctagaccacatcatcatccctgactccccacggctcaaacagcacatcaaattcatcagcagtttccgtcagctcttcctgcaaaacacattcaagcccgaccatatgtcaccacccccactgctattcccaggtcccagccaccatcatgtctcacctggactattgcacgcacctcctacttggtctccccacttctgccccggccggggctggtgtgttctccacccagcaacacagcagtcagagg

SEQ ID NO: 31575 - DNA, 2300 bp, Homo sapien
taaccaattgccaatcaggaaatctttgaatcctcctctgacctggaagcaccacccacccacttcaagatgtcccacctttctgggccaaaccaatgtatactttacatatattgattcatgtctttgcctgtaacttctgtccccataaaatgtataaagctatagcccaaccaccttgggcacctgttctcaggacctcctgaggctgtgtcacaggccatggtcactcctatttggcttagaataaacgttctgagatattttagagtgtggcttttctcgtcaaccaaattctacaaagagcttggggggtgggtaatgttgtggagcccatctttggcagatacagtctgccaaagattgtgacactgccttatcgataaactcagtggcttaacacaattaaagcttatttctccctcttgtcacagctctttgggttcctcatggttccatgtggttcttcagagcctccattggtggctctaacctccctgaggtcctcggagtgccctccactggagcagtgggtgagtaagagagcagggctcacccacaggaggttgttaggggccagcctggaagaggagcacagtgcccgcccccacccatcccattgactagcacttagccacgtggccgcacctggttgcagaggctggagagtggagcccagctgtgagcctggccggtcatggggacatgtgttagtgagtactgtccacgtcaggctcagaccatctgacctgaggctatggggatgcaggggtccccagggggtggacaggacagaaggaggagggagacctgcttggagaacctgttctcagtttccatttgttacataatggacaagaggaccagcacttttgctcagagctgcagctctggttccgctaggaaatgccaggcaggggcacagccaagtggttctcagacagtaaaccccaagccacagacccttgctttcttgggcagggagtagtggacagggctgactccaggcaacagtcccaaacaggctgcaccaatgtgaccgcacctcccctgagtgcaggcaaggggtgctgtgctcacgctctcagcctgggtgcatccttactttgttcacagctcctctatcggacccatttcactgaggctcagcgaggttacctatgtcgccccaggtcaccatccagtaacccagaaagcttctcttggctcctccactaactgcgtgatcttggacaagtcagttactgtctctgaaagccagttctcctccttaaaatggagacagttgagccaggcatgctggtttatgcctgtaatcccagcactttgagaggcggaggcaggaggatcgcttgagctcaggagtttgggaccagcctgggcaacatagtgaggcccccatctctataaattttttttttaattagctgggtgtggcagtgtgcccctgtggtcccagctactcaggaggctgaggtgggaggatcacttgggcccgggaggtcaaggctgcagtgagccctgatcgcgccactgcactccggcctgggagacagagtgagatcctgtccaaaaaaaaaaaaaggagacagtcccataacaagccccccatggcgccgcccagatggggtttcgacgccagggagaggagggaaagggttatcagggaaggttcctggtggcagagctcacagggtccgtgctgagccgaattttgcacggtagcctcagagtcccggagccgagtccagagggcgggatgcaggtattgcgaagaggcacacgctccgagaggaaccaccagagcgtgggctttgggcgaggaggggtctcctctggttgggggagatctggcaggcttgggggagatggggctgaaaggatggacagggagggaaggccagaaagctggagacggggatggagagctaaaccgcaaagagcaggcgccctgccccgctgagggccccgcgcctccagctcctccttcccgagcttcccggggtcggcgtccagccggcaaccaatgggccccgcccccgcccgcagccaatgggccgcgtccccgcccgcgcggccgccccgcccctcgcggacccggaagtgggcctggcaccttcccggcctgccgcagggatggggcagctgtgctggctgccgctgctggcaccgctcctgttgctgcgaccgccaggggtccagtccgccggccccatccgggccttcgtggtgccccacagccacatggacgtgggctgggtctacactgtgcaggtaggtgccgaccacgccccgcgcgc

SEQ ID NO: 31576 - DNA, 2300 bp, Homo sapien
tggcgtccaggtgggcgtggtatccaggcgggcatggtatcgtgatgaccactgaggatgtggagcccctgccagactgaatggaatcgggcctcaccacccactctcaacatggctgcaaagctgtggaggaccccatctgacccacagggtgtggcctgtcccctgggccatgtgaccacccctcccagtctggttcaggaccagtgggggaagaacagggaatcaaggcaaatctgggcacatcccagacgccgaggagcaggaaagcaaaagcaataggaagctcccttctgagacagacagccactccctgggagggttcagccctcctgcctcctgcatgggccctgggcatcctcatcctctctgtcttgcatcaggacactggctccctggggtctctgagcccttgctgcctcctaccatccatcctccctggacgcccagagaatccctgctgaaacgcatgcctgtcctggcctccccatgcccacgtcacacatgaaggcctctgtgcagtctaggcccttctcagtggggtcctgcccacctggctcctcctcttcccctctgggtctcccaggccctttgctcacacagctgttctgtgtttcctaggcaccctgggcttgcctccgatcaggatccttcagcaccccaccccacctgccccagtgcagcctgtctctcccaccctgcccaaggcccatccagggttttctgggcagttcctagtctggctatgggaggaggcctgagttgggagccgtaagccctgggctcgctgcctgcccggcctgcctccttgggtgaccctggcagaggctgcctctgcagccccagcttctcagctcttccagggctggagcttagcagacttctgggtcatgccgtctcaagctcaccatcttcccttgtctcccagaaccattccaggcctggacgggcttctacacgtcccgcagctcactgaaggggctggcccggcgagccagcgccttgttgtatgccggggagtccatgttcacacgctacctgtggccggccccccgtgggcatctggaccccacctgggccctgcagcagctccagcagcttcgctgggccgtctccgaggtaacaccacatttagccacagtggcaggattggaacctcccatgctgcgcacctcccctcccttgtcctagccaatccttccagccctggggcactagaggccccactttacagaggggaaactgaggttccctttggttacaaggccagtgcatggtgaacccaggccaaggctgagaccacagcctgatccatccagctggtggcctcattaagctttgtagcagtttagcaaaagggataaaggacaaggtggagtggcatttgtgtccgacagccctgcctgcatccatatctcggctcagctgtgtgatgtcaggcacatgattcccacacccacccaagacctaattccctcctgtacaatgagaacaacgagcttgcccaggaggacggtggggcaattggatgtgctggtgtgcacagcctgcttggtgcagtggctgctgaatagccagttcatgagtttccgtctccacccatcccctactgtactgatgggaaaacagacccaagacagcctgtaacttgtcctcagtcacctatccaaaaaagggtcacaccagccatgacactgtaacagttccccaaaaggagctgctggcagaacatgtcattatgttgtgggagaaatgaggtgacttcagggtccttcagagcagggggtccagagatgggggacaatgagttcccacaagggcaggaaaagttgggcgagctcctcagcttctcttggcctcagttcctccttctgtaaaatggcggggactgcccccttctccactggcacctggcaagccagaatgagagccagcgcctagtaggtgccttgtaggtgctttgcagagtcaggtcctgatcctgttcttcctcccctctgggggttgctgcaggtccagcaccatgatgccatcactgggactgagtcccccaaggtgagagacatgtacgcaacgcacctggcctcggggatgctgggcatgcgcaagctgatggcctccatcgtcctagatgagctccagccccaggcacccatggcggccagctccggtgagcagggccctgcagggaggctgtggcccctttatgaagggagagcctgaggaggtcaggggaggggctcaacgaccccagcttcagactctgagtccacatcacccatatcgcccttccccatggt

SEQ ID NO: 31577 - DNA, 2300 bp, Homo sapien
acatgggtcaggccaactccggttccagagggcgccagacacgccacccagctgacccttcttggggaggcggaggaggggctgacatcactcattcactcagcaaagctcccgaacgcccatcctgggcccagccctgggctgggtgctgggcccctggacctgagcgaggccaggccccatcccaggacacagacatggatggtgacagtgtggagtggtgactcgggagccaggggaggggccctcggctggaactgagaccgaggaggagtttgtccagcacagggagaggcgaagggagggtatgggtctgagcagacccccacacacaccccttccccactcagatgcagtatccgttaggagtagattccctcagcatacatttctggagctcctactgtctgtcagcccctgttctaggcgctggggatggtgtactaaccaaacagacaaaatcccactgcctggggcatctattccagtaggggagacaggtgataagtaaaataagaaaaatatggaatatgataggcgatgaccaccgtgagggggacagtcactacagcaagttgcaggggctggggacacattttaaataggtgggccaggccgcatcaatgtgggatcaggcagacagggaacaggtatctgctgtatttgggataaaggctgggtcgggaggcgtgtacaccattattgggggggcctccccactggggcacaggaactgagggggcacagtgccctcctccagcctccctctccaaatcagacaccttggaggtgagcagaggccaggagggttaacctggaaaagtccgtccacgtggggatgagaagattgggggatggcccctcccaggagaaggtagtccaggtggagggcacagcgtggcacaggctcagaggcaggaaacggcaggagtgtcaggaaggaagggttggtgatgctggagccccaagggccagaggacagagtaaggtcaccgcagggaggaggctgggtcccagaggaggcttccttccccagttgcagcagacaagagtctcgaaaagcttgctttggttgctgcagtggatgggttggtaggcacaggagtggatgtggggacagcagtgcagatgctgggcagttacctagggaggggccacagcagctgtgaccaggcagaggccacagggaagggagatgaaaggcctcaagaaggcggtggggggccttggtggtgggtgggagtggctggaggatgggggatggggattcctgggggatggggaaggggagtgactgagggatgggatgactagggggtaggggtggagaaagccggacagcggggagcagaaggtgcagggtaggtgctggaagggccatcgttggatggggatgctgcagggagcagatttgggtgggatggggtagctggtgaggtcagctgttgacatccacgtggaggcgtcaaacaagaagctgtattcgtggatctcgggttccagaagaggtcagtggatttgggtttgcttttgggagtcatcactttggttgatgaaggatgattaaaggagctgggggtgttcaggagctcccagttcaggaggtgggagtaagagaagctttggggaccccaagaaccagctatcttcaggtcgctgaagggttctcccaggactgatgtggtttgtgggggtccaaggggagaaagccagaactgggggcagggaggagaaatcggcaggatccgagagatggaaagacactgctgcctcagcaagtagtgagcaccccattccagaaagtgtgagagctgacagttaacaagtctcatcctgctggccttgcagatccagaactcaacagagaccccatctgcgtatgacctgcttattctgaccacaatcccaggcctcagttaccggcactacaacatcagacccactgcaggggcccaagagggcacccaggagccggctgccactgtggcgagcacccttcaatttggccgcaggctgaggagacgcaccagccatgcgggcaggtacttggtgcctgtggcaaacgactgctacattgtgctgctcgaccaggataccaacctgatgcacagcatctgggagaggtaaggtgcagccattgctgtctctgaggcacaggcatgcctggagcctgggcatgtcaggcccctacctggattctccatttgctcacttgcctgggggaaggacagatggtggtgaaaccccttcctgctattgtgatctttaattttagaagtgtgagcctgggccagtgcagg

SEQ ID NO: 31578 - DNA, 2300 bp, Homo sapien
atacattttcgtttctcctgggtacatagctaggagtagaattactcagtcacaagctaactctatgtttaactctttgaggaactgcccgaccgttttccaaagcggctgcaccattttctgttcctcccagcagcagatgagggttctgatttcttcacatcctcgcccacacttgttattttctgtcttttcaattatagccattctcgtgggcgagaagtggcatctcatgatggtttcgatttgcatttccctgctaactaatggtgttgagcatctcttcatgtacttactggtcactagcatatcttctgtggtgagatgtgtctttagatcctttacctatttttaaattggcttgtcttttattattgagttgtaagagttctttatatattctagctacaagtcccttgtcagatttatgatttgcaaatccctcctcccattccatggcttgtctttttactcttttgatggcccctgggggagctttttaaaaggatcgtgcggggaaggggtccagggccagaggcctcaattcttttctttctcctcctccaccagcactcagtagaaccctccacagcctgcctccctttccttccccaccctcaccacaatcccacagagaagtgggtgcagaggccatccacctcattgtccgcccacagccaggccagactcagatacaaatacatcacttgtgcacttggttaggccaaatattgcattttacaattaaaatacttgaccccctcctgctcttctcccatcctctgtcctaacacaaacatcctaatagaagggagggagcacagaatttaaagtcggggctgaatttgagttctggcttgcacacttcctagatgtgtgatcttgggtacatgatgtcacaacttccagcctcggatgcctcgggagtgggatgggttaacagtccctgcctttgggggttgggagaatttaaccaggtgaagtcagtgaaggctctggcccatgacatggggtctgtacacatgggtgtcctgctggacagctcagagtcagcatgacaaaagcccgttcctgcactggtttcgcttgcagaccacagcctgggtgagccagttccatctcttgggggtgccctctgctgacggctcacggttcctgtctgcaggctctgtccgtctcctcgtttgtgacccattctgggacagcatggagtctaaggccacactggctgtgggtggggtctcagggcttctagatgagctgagtcacatggcctcgtgagtgctacgcaggccactcagatggcatctggagagagaggcttgccagccggtgtctgtaagaccttgtgcaggatgagaatgacatcttctctctcctgcctctgcagacagagtaaccgaacggtgcgcgtgacccaggaattcctggagtaccacgtcaacggggatgtgaaacagggccccatttccgataactacctgttcacaccgggcaaggccgcggtgcctgcgtgggaagctgtggaaatggagattgtggcgggacagcttgtgactgagatccggcagtacttctacaggtgcttcccctggggtgacccccacagcccggcacacagtcagcgcacgcgtgcaggcagctcagtgaatgagggtctgtctttgctctgaaccccagcttccgggccgtggttgacacgtggtctgatgaagaaatgaattgctctggtgtctgcatgctggctgcgtttgcgtgtgctgtgtcacgttggttgggagctaagttcagagctgggagagagacccacagaccctggggcccacagagcacctgttcttccatgatcagagcagacgtaaggcaggcccggcatggcagccctgcggtgtcggggaaccaggctgctcccagccgctcggggtcctgggtggtgctattgtccacatggcccaagaaggctccctgcctttcggcgtaccctgccctgcccaccctgcccacatgaaggaagggaagcaaaaaggaagcatctagaaggttcctggagcttcacttactgatgctcccttctcctccaggaacatgacagcacagaattacacgtatgcaatccgctcccggctcacccatgtgccgcagggccatgacggggagctgctctgccaccggatagagcaggagtaccaagccggccccctggagctgaaccgtgaggctgtcctgaggaccagcaccaacctaaacagccagcaggtcatctactcagacaacaacggctaccagatgcagcggaggcc

SEQ ID NO: 31579 - DNA, 2300 bp, Homo sapien
ggattaagaaaatgtggcacatatacaccatggaatactatgcagccataaaaaatgatgagttcatgtcctttgtagggacatggatgaaattggaaatcatcattctcagtaaactatcgcaaggacaaaaaactaaacaccgcatgttctcactcatagatgggaattgaaaatgagaacacatggacacgggaaggggaacatcacactctggggactgttgtggggtggggggaggggggaggcatagcattaggagatatacctaatgctaaatgacgagttaatgggtgtagcacaccagaatggcacatgtatacatatgtaactaaccagcacattgtgcacatgtaccctaaaacttaaagtataataataataaaaaaaatgaaagaaatgtgaaaaaaaaaaagaaagtttattttgccaaggttaaggacacacacccatgacatggcctcaggaggtcctgatgacatgtgcccaaggtggttggggtacagcttagttttatacattttagggagacatgggacatcaatcaatatatgtaagatgtacattggtttggtccagacaggccagacaacttgaagcagggcaggggctttcagttaataggtagataagagacaaacagttgcattcttttgagtttctgattggcctttccaaaggaggcagtcagagatgcatctatctcagtgagcagatgggtggctccgagttctgtcatttgtccacaaggaatttccttgtgagggaggtaggtagctttttaatcttagtagctatcttttttaggaatagaatgggaggcaggtttgcctgatgcagttcccagcttgactgtcccctttggtttagtgattatggggtcccaagatttattttcctttcacacaagccccaaagttgggtttttacaagagcaaccaaaatattaagaacctgagaaaagtcaaaacaaaacatatacttacgtttctctgaatccttaattctgctgtagtcaaaactgtgatgtgtccctttaccttgaaaatggaagccaaatccatgggatttatgtaagctggatttctgaaaagtttattgatgtttgggaatgggacaacaagctaggaaattaacgtatctctcctcattctgtgttgagtggatgttaaggcaaatttaccaatatgcgccaagctctgcccagggcgttagggcattaaggccacagagctaagaccccaaagagcctaggatccagtggaagggctcagaggctctggacagcgccttgcaccacacactgaacatgggtctgctggggcctcaggacggagcagccaggctccaccttggggtgtggggaggccggtttggtgaaaagacacccagacccttctgactgtcatccaaggaagaaggaaaactactctttaaaaaggcagaaagggccaggcgcacggctcatgcctgtaatctctgcactttgggaggcccgaagtggaaggatcacttgaggccagaagatcaaggctgcagtgagccatgatcccaccactggactccagcctgggcgacagaccgagaccctgcctcaataaaaaaaaaaaactttttaaataataataagtaaataaggcccggcacggtggcttacgcctgtaatcccagcactttgggaggccgaggtggatggatcacgaggtcaggagatcgagaccatcctggctaacacggtgaaaccccgtctctactaaaaatacaaaaaattagccgggtgcggtggcaggcgcctgtagtcccagctactcgcgaggctgaggcaggagaatggtgtgaaccccggaggtggagtttgcagtgagccgagatcgtgccactgcactccagcctgggcgatagagccagactctgtctccaaaaaaaaaaaaaaaaaaagtaaataaaacggctgaggggactcaggtccccctgcgtgaaaggaaggggctttaagcgtccacctggggtagctgcattatcacgtaggatcctcctcttctagtgtggaaggccctttttaattttcatttatattttatttatttattttgcgacggagtctcactctgatgcacaggctggagagcagtggcgcgatatgggctcactgcaacctccgcctcccgttttcaaacgattgtctcagcctcccaagcagctggggttacacgcgtgcaacacgacgcccggctaatttttgtatttttggtagagacggggtctcgccatgtcggccaggctggtctcgaattcctgac

SEQ ID NO: 31580 - DNA, 2300 bp, Homo sapien
tgaagcagggcaggggctttcagttaataggtagataagagacaaacagttgcattcttttgagtttctgattggcctttccaaaggaggcagtcagagatgcatctatctcagtgagcagatgggtggctccgagttctgtcatttgtccacaaggaatttccttgtgagggaggtaggtagctttttaatcttagtagctatcttttttaggaatagaatgggaggcaggtttgcctgatgcagttcccagcttgactgtcccctttggtttagtgattatggggtcccaagatttattttcctttcacacaagccccaaagttgggtttttacaagagcaaccaaaatattaagaacctgagaaaagtcaaaacaaaacatatacttacgtttctctgaatccttaattctgctgtagtcaaaactgtgatgtgtccctttaccttgaaaatggaagccaaatccatgggatttatgtaagctggatttctgaaaagtttattgatgtttgggaatgggacaacaagctaggaaattaacgtatctctcctcattctgtgttgagtggatgttaaggcaaatttaccaatatgcgccaagctctgcccagggcgttagggcattaaggccacagagctaagaccccaaagagcctaggatccagtggaagggctcagaggctctggacagcgccttgcaccacacactgaacatgggtctgctggggcctcaggacggagcagccaggctccaccttggggtgtggggaggccggtttggtgaaaagacacccagacccttctgactgtcatccaaggaagaaggaaaactactctttaaaaaggcagaaagggccaggcgcacggctcatgcctgtaatctctgcactttgggaggcccgaagtggaaggatcacttgaggccagaagatcaaggctgcagtgagccatgatcccaccactggactccagcctgggcgacagaccgagaccctgcctcaataaaaaaaaaaaactttttaaataataataagtaaataaggcccggcacggtggcttacgcctgtaatcccagcactttgggaggccgaggtggatggatcacgaggtcaggagatcgagaccatcctggctaacacggtgaaaccccgtctctactaaaaatacaaaaaattagccgggtgcggtggcaggcgcctgtagtcccagctactcgcgaggctgaggcaggagaatggtgtgaaccccggaggtggagtttgcagtgagccgagatcgtgccactgcactccagcctgggcgatagagccagactctgtctccaaaaaaaaaaaaaaaaaaagtaaataaaacggctgaggggactcaggtccccctgcgtgaaaggaaggggctttaagcgtccacctggggtagctgcattatcacgtaggatcctcctcttctagtgtggaaggccctttttaattttcatttatattttatttatttattttgcgacggagtctcactctgatgcacaggctggagagcagtggcgcgatatgggctcactgcaacctccgcctcccgttttcaaacgattgtctcagcctcccaagcagctggggttacacgcgtgcaacacgacgcccggctaatttttgtatttttggtagagacggggtctcgccatgtcggccaggctggtctcgaattcctgacctcaagccatccacccacctcgcctcccaacgtgctgagattacaggcgtgagccaccgcgcctgggaagtgcgggaggcctttttaaaaaatgtaaactcgcgtgctcaagaagccctatcggagggaaacacccagaagaggccaccctccaaacacagggtaaaacaggggtgacgcacagaggtaacgggaaagcaggaacgagcgagagcgtgcggtcccgtacctgcgcgtgcctgcgtgcgcgtccgtgcggccgcgacgccgccgccggtgcctctctttctagacgtgcgcgcgcccgcagctcgcccccctgaccgtaaagaggcccggctgtgtcgtgaaaggggccgcaacgcgcagagcgctggttgacggccgggactccattttgttcgccgttactctgcgcgtaagtcgcttgtccgtggcttctctgagaagaaaagttgaaaaagggtaaaagttttcaggaatattcgggctctctattgctaagcatagcgagtgtcggttttctctctccaacagacatcgctattgcggttccgaggcagtgggaagagatgcggcccctggacatcgtcg

SEQ ID NO: 31581 - DNA, 2300 bp, Homo sapien
cctcccaaagaccccacctcctaatatcatcacattggggattgctttgcaacatatgaattttggggggactcacatatttggaccatggcaagccccttaaaagcagagttttctccagctgggagcagaaggggatgacagagaggctggaaggataagaaggatccgacatgctcttactggctttgaagatggagagggccacgtttaaggaccggagagtgacctgtaggagctgagagtgacctctggccatcaagcatggagggtccccttaactttctgctagaggtacacagtgaataagcctagacacaatgacatgcagtgggtgcttaataaagatctcttgggaaatgagcattaaagcaacatttactgggctcctgctgtatgccaagcccatttcaagctgaggaaacagatgactaaactgactaagtacctgcccctagggcctgttttctcgcagaggcacttatatagtccagtgaagaaagaaatcttccagaatgattcctaaaggcatattcagagcctggcagggctgaggaaacagtggtgaatcagacccaccttggccttgggtgcccacagtgggtaaagccagactccaacttacagccaaagccccaggcagagtgaagcttatacccttaggaaaaaagtagggggaggctgggtcacagcactcagcatcagcaccgaggccgcagctctgtgttccaggagcatctgcccgaggcaagagggagcggaggccctggctgggggcaaatcccgacgctgtgagcacctggcttctcggagcctggaatattctaacgggaccactgaattcggttgtttattatttttatttatttattttgagacagggtctcgccctgtcactgggctggggtgcagtggcgcaatcaggcgttcagagctcacctcggtctcgacctgctgggctcaagcaatcttcccggctcagcctctcaagtagctgggactatcggcacgcgccaccacgcccagctaatttcttgtgttttttttggtagggttttttcccttgttgcccaggctggtatggaactcctgagctcaagcgatcctctcacctcagcctcccaaagtgctgggattataggcgtgagccacacgcccggcctgggtgtttatgatttagaatgttggtgagaggtgacagtgtgctggcagtcctcacagccctcgctcactctcggtgcctcctctgcctgggctcccactttggcagcacttgaggagcccttcagcccactgctgcactgtggaggcccctttctgggctggccaaggccagagccggctctctcagcttgcagggaggtgtggagggagaggcgcgagcgggcaccggggctgcacacggcgcttgcgggccagctggagttcagggtgggcgtgggcttggtgggccccgcactcggagcagccggctggccctgccagcccccggcaatgaggggcttagcacccgggccagcggctgcggagggtgtactgggtccctcagcagtgccagcccaccggcgctgtgctcgatttctcaccgggccttagctgcctttccgaggggcagggctcgggacctgcagcccgccatgcctgagcctcccaccccctccatgggctcctgtgctgcccgagcctcctcgacgagcaccaccccctgctccacggcgcccagtcccatcaccacccaagggctgaggagtgtgggcgcacggtgccgttctcgcaggcagctccacctgcagccctggtgtgggatccacttggtgaagccagctgggctcctgagtctggtggggatgtggagaacctttatgtctagctcagggattgtaaatacaccaatcagcaccgtgtgtctagctcagggtttgtgaatataccaatcgactctgctggggccttggagaacctttgtgtctagctcagggattgtaaacgcaccaatcagcaccctgtcaaaacagaccactcggctctaccaatcagcaggatgtgggtggggccagataagacaataaaagcaggctgccggagccagcagtggcaaccggctcaggtccccttctattgtggaagctttgttctttctctctttgcaataaatcctgctgctgctcactctttgggtccacactgcctttatgagccgtaacaggtctgcagtttcactcctgagccggcgagaccacgaacccaccagaaggaaaaaactccgaacacatccgaacatcagaaggaacaaactccag

SEQ ID NO: 31582 - DNA, 2300 bp, Homo sapien
taggcccacactcaaaggcctctctctcagcagagatcttccagagtgtcagcctccagcaagttccctaacctctcccaacacagcctccaccagcacatgggccgagactctccccacggggctgtggctcaacatagaaaaaccttggtgcacgatggcagcagcaggtctcacaagagccggctttctcagaacacactgcctctgcccaggtgtcctgcagtggaggctcagactggccccactggtgaccccttggggagcagggacaggtccattctgctcactcctgagctgggcagttccctcttgggataaggtcgcacagcacaggccaccatcataccaccccagccagagaagtgggagagagaaggaggctccctaccccagaggcagtgctcctcaggaagggcattcactgcgttatatagatatatatatacacacacacacacacacatatatatacacatatatacacatatatgtatacacacatatatacacacacacatatatacacacacacatatgtatatacacacacatatatatatagatatacacacacatatattttttgtttgtttgtttgtttgtttgcgatggagtctcactctgttgcccaggctggagtgcagtggtgtgatctcggctcactgcaacttccacttcccggtttcaagtgattctccagcctcagcctcccgagtagctgggactacaggcatgtaccaccacaccaggctaattttttgggggtttcaccatgttggccagtccggtcatcactttgttttaaaatttttatttatttatttatttttatttattttttgagacggagtctcgctctatcacccaggctggagtgcagtggcacgatcttggctcactgcaacccctgcctcctggttcaagtgattctcctgcttcagcctcctgagtagctgggattataggcatgcaccaccttgtctagctaatttttgtatttttagtaaagatggggttttaccatgttggccaggctggtcttgaactcctaacctcaagtgatctgcccacctcggcctcccaaagtgctggaattacaggcatgagccaccgtgcctggccccatttatttacttttagagacagtgtcttgctttctcacccagggtggagtgcagtggctcaatcacagctcactatagcctccaactcctgggcttaagtgatcctctcacctcagcctctccagtagctgggactacaggggcgctccaccatgcccgactattcactttaatctttcaccgctgtgggaggaaggatcaggacatccatcgggtggaaactgctgcactcccccacccgttcaggccactggagtgtcaccaaaccaccagggctgcccctgctggagtagctcacctgggtaactctgaggacaagcccccttggagactcttctcaggagggaggtggcattttccaagaaagggttcaacacagacctctgagtcagaggaccagttaaagagaaaattattctgactttattcaggaatgttgctgtaggggtcgtgattattgccatgcggggagttgcccttgaggcagctgggagtggctcacgcctgtaatcccagcactttgggaggccaaggcaggtggatcacttcagatcaggagttcgagaccagcctggccaacatgcaaaaccctgtctctactaaaagtacaaaaattagccaggcatggtggcgcgtgcctgtaatcccagctactcgggaggctgaggcaggagaatcgtttaagcctgggaggtggaggttgcagtgagctgagatcgcaccactgcactccatcctgggcgacagccagactctgtctcaaaaaaaaaaaaaaaaaaagaggccagatgaagagctcgaaccacgagcttctacatgttaaccagggtaaagagcaaccgctgacaggaaggggcccagcagtcaacccccgggaaggccaggatgtggccttgtttcggcaaggccgccctatcaccacggagatgggcaggcaggagacatccccagtcagtcgggcccaggtggggatcaggaggtttcaggaaaacacaagctatgcagtggggcaggtgaggcttggcctgcccagcctgtcctgagtgtcatgggaacagctctggaagtgactcctctgtcctctggaatctggatcagatggggccttctccagacatctgtgctcagcagatgcgacagacggcccctcgagtgtagcccaggatccagcac

SEQ ID NO: 31583 - DNA, 2300 bp, Homo sapien
ccaaagtgctgggattacaggcgtgagccactcccagctgcctcaagggcaactccccgcatggcaataatcacgacccctacagcaacattcctgaataaagtcagaataattttctctttaactggtcctctgactcagaggtctgtgttgaaccctttcttggaaaatgccacctccctcctgagaagagtctccaagggggcttgtcctcagagttacccaggtgagctactccagcaggggcagccctggtggtttggtgacactccagtggcctgaacgggtgggggagtgcagcagtttccacccgatggatgtcctgatccttcctcccacagcggtgaaagattaaagtgaatagtcgggcatggtggagcgcccctgtagtcccagctactggagaggctgaggtgagaggatcacttaagcccaggagttggaggctatagtgagctgtgattgagccactgcactccaccctgggtgagaaagcaagacactgtctctaaaagtaaataaatggggccaggcacggtggctcatgcctgtaattccagcactttgggaggccgaggtgggcagatcacttgaggttaggagttcaagaccagcctggccaacatggtaaaaccccatctttactaaaaatacaaaaattagctagacaaggtggtgcatgcctataatcccagctactcaggaggctgaagcaggagaatcacttgaaccaggaggcaggggttgcagtgagccaagatcgtgccactgcactccagcctgggtgatagagcgagactccgtctcaaaaaataaataaaaataaataaataaataaaaattttaaaacaaagtgatgaccggactggccaacatggtgaaacccccaaaaaattagcctggtgtggtggtacatgcctgtagtcccagctactcgggaggctgaggctggagaatcacttgaaaccgggaagtggaagttgcagtgagccgagatcacaccactgcactccagcctgggcaacagagtgagactccatcgcaaacaaacaaacaaacaaacaaaaaatatatgtgtgtgtatatctatatatatatgtgtgtgtatatacatatgtgtgtgtgtatatatgtgtgtgtgtatatatgtgtgtatacatatatgtgtatatatgtgtatatatatgtgtgtgtgtgtgtgtgtatatatatatctatataacgcagtgaatgcccttcctgaggagcactgcctctggggtagggagcctccttctctctcccacttctctggctggggtggtatgatggtggcctgtgctgtgcgaccttatcccaagagggaactgcccagctcaggagtgagcagaatggacctgtccctgctccccaaggggtcaccagtggggccagtctgagcctccactgcaggacacctgggcagaggcagtgtgttctgagaaagccggctcttgtgagacctgctgctgccatcgtgcaccaaggtttttctatgttgagccacagccccgtggggagagtctcggcccatgtgctggtggaggctgtgttgggagaggttagggaacttgctggaggctgacactctggaagatctctgctgagagagaggcctttgagtgtgggcctactttgaccggggcaggatgtgaacacaggcccctacctccatgctctccaggactcgctcagcctcccaagcacagaccctctgagtacctccgctatagagacggggaggggtgtgactgtccctgactctgcccagagtcccaggagcctttgtgccgtctaagccctgtgggtgatttgggtttggtaagtgccggggctcaaaaaacaacaccccaacgtggaagcctcagaaacaaaagtttctctgtcctgctcccaccctcctgtctccagctcctcctcctctgagaggcttccccaaaccctgccataaaacccagaaatatgactccagttctccactccctcccctttctgtgtagaaaccagcctaaagaaaccctctggcctgctttatttgactgtaggtcataagagctccattccagaaagagtcctgccccacacctagaaggaaggagagctgctcagagaggccccagggaatctgactcaacaggccctaccaggctctcctcttggtctgtgagcatccagccttacttttgtatccaatcatatttccatacttcgctgaactgtgtttatggatagtttccaccagatctttggatcttcatcttgaaggctgccgtgccacataa

SEQ ID NO: 31584 - DNA, 2300 bp, Homo sapien
gcactccagcctgggtgatagagcgagactccgtctcaaaaaataaataaaaataaataaataaataaaaattttaaaacaaagtgatgaccggactggccaacatggtgaaacccccaaaaaattagcctggtgtggtggtacatgcctgtagtcccagctactcgggaggctgaggctggagaatcacttgaaaccgggaagtggaagttgcagtgagccgagatcacaccactgcactccagcctgggcaacagagtgagactccatcgcaaacaaacaaacaaacaaacaaaaaatatatgtgtgtgtatatctatatatatatgtgtgtgtatatacatatgtgtgtgtgtatatatgtgtgtgtgtatatatgtgtgtatacatatatgtgtatatatgtgtatatatatgtgtgtgtgtgtgtgtgtatatatatatctatataacgcagtgaatgcccttcctgaggagcactgcctctggggtagggagcctccttctctctcccacttctctggctggggtggtatgatggtggcctgtgctgtgcgaccttatcccaagagggaactgcccagctcaggagtgagcagaatggacctgtccctgctccccaaggggtcaccagtggggccagtctgagcctccactgcaggacacctgggcagaggcagtgtgttctgagaaagccggctcttgtgagacctgctgctgccatcgtgcaccaaggtttttctatgttgagccacagccccgtggggagagtctcggcccatgtgctggtggaggctgtgttgggagaggttagggaacttgctggaggctgacactctggaagatctctgctgagagagaggcctttgagtgtgggcctactttgaccggggcaggatgtgaacacaggcccctacctccatgctctccaggactcgctcagcctcccaagcacagaccctctgagtacctccgctatagagacggggaggggtgtgactgtccctgactctgcccagagtcccaggagcctttgtgccgtctaagccctgtgggtgatttgggtttggtaagtgccggggctcaaaaaacaacaccccaacgtggaagcctcagaaacaaaagtttctctgtcctgctcccaccctcctgtctccagctcctcctcctctgagaggcttccccaaaccctgccataaaacccagaaatatgactccagttctccactccctcccctttctgtgtagaaaccagcctaaagaaaccctctggcctgctttatttgactgtaggtcataagagctccattccagaaagagtcctgccccacacctagaaggaaggagagctgctcagagaggccccagggaatctgactcaacaggccctaccaggctctcctcttggtctgtgagcatccagccttacttttgtatccaatcatatttccatacttcgctgaactgtgtttatggatagtttccaccagatctttggatcttcatcttgaaggctgccgtgccacataagctatgatcaaatacatctgttatgctcttctcctattcatctgccttctgcccgttgattttcagcaaactcccagaggatgaaggggagttttctgtttggccccacaggggaggagcgagcgagattgacgtggaagctgggcctctgaaggacacagagtgctctaagaaagggacgatggggcagatccatgttcacaaacacgcccatgtgaattcactctcagatgtctcctcgtgtcagcacgctgggtgccagcacgctctgatattgacacaaagggccacggagtcaccactcactccacacacactcaccccgtgcccacttacccagggagggccaggaatgaggatgccactgtggctcagtgatggcgccgagacacaggtgaacactgtaaaatgtggatgcctggaggcagcccacaccctgggccttggctgggggaaaggttccagaaacgtcatcacaacgatgcatttcatcagaactgagcacatgaatggggaggggcaggacttcctgaatgtcccaaccccactgtcccaccctctgtgtcaatatgaggctgccttataaagcaccaagaggctgccagtgggacattttctcggccctgccagcccccaggaggaaggtgggtctgaatctagcaccatgacggaactagagacagccatgggcatgatcatagacgtcttttcccgatattcgggcagcgagggcagcacgcagaccctgaccaagggggagctcaaggtgc

SEQ ID NO: 31585 - DNA, 2300 bp, Homo sapien
tcacctgagcccagggaggtcgaggctgcagtgagccgtgatcctgccactgcactccagcctgggtgacagagtgacatcttgtctcaaaaaaaaaaaaaaagaaaagaaaagaaaatagaagcaatattctgaagtgtttcatgtctttgaagtgattctagggctgaaaatttcaggctttcatttttgattatcagcatctatgtgggttagccccttagcaggtaggcagagtctggtggggcccgaaggggaggggaaggaaggaagaaagtgggggagtgagaaagaaggagaggacaggggtcaaagggaaggggaaatggagagggtacggcttctgttcagcccagccggaggctgccccgggcggaaggaagctggtcctggccgccctgaggggccttctgtgaggctcaggccggtggctcctccctggcagggagcccaagggaggtccacagctctgcgcagacaggtgccaggatggagcctcctcccgtccttcctgccagacccactaataccaggcaacaaggggcctgggaatgggagcagggaaagcgggcaagtgggaggcagagctggggcgtttatggccggcagccttggaggacagccccgagggctcaagggcttggcaagcttggcaaacttgcaaatggcagccctggattgcattccgcccctgcccccactgcacaggtttgagtcccactctcccaccaggcctgtcacaaatacactggggtcaaccccatgtttcaaggatcaagctgaccacaccctctccctgctcagatgctcccgcctcccctgcctttatgccagggtgggtccgttccttggctgggcttccagggcatttcaggatctgtccctcttgcctctgagccccttgaccgccgaccccaccgcagctctcagccctctgcctgccacgccttccccttcttccccagcccccgctgagtccagcactgccggcctggctcacctgcaggaagcctggtagctccttctccatcagcaccttgagctcccccttggtcagggtctgcgtgctgccctcgctgcccgaatatcgggaaaagacgtctatgatcatgcccatggctgtctctagttccgtcatggtgctagattcagacccaccttcctcctgggggctggcagggccgagaaaatgtcccactggcagcctcttggtgctttataaggcagcctcatattgacacagagggtgggacagtggggttgggacattcaggaagtcctgcccctccccattcatgtgctcagttctgatgaaatgcatcgttgtgatgacgtttctggaacctttcccccagccaaggcccagggtgtgggctgcctccaggcatccacattttacagtgttcacctgtgtctcggcgccatcactgagccacagtggcatcctcattcctggccctccctgggtaagtgggcacggggtgagtgtgtgtggagtgagtggtgactccgtggccctttgtgtcaatatcagagcgtgctggcacccagcgtgctgacacgaggagacatctgagagtgaattcacatgggcgtgtttgtgaacatggatctgccccatcgtccctttcttagagcactctgtgtccttcagaggcccagcttccacgtcaatctcgctcgctcctcccctgtggggccaaacagaaaactccccttcatcctctgggagtttgctgaaaatcaacgggcagaaggcagatgaataggagaagagcataacagatgtatttgatcatagcttatgtggcacggcagccttcaagatgaagatccaaagatctggtggaaactatccataaacacagttcagcgaagtatggaaatatgattggatacaaaagtaaggctggatgctcacagaccaagaggagagcctggtagggcctgttgagtcagattccctggggcctctctgagcagctctccttccttctaggtgtggggcaggactctttctggaatggagctcttatgacctacagtcaaataaagcaggccagagggtttctttaggctggtttctacacagaaaggggagggagtggagaactggagtcatatttctgggttttatggcagggtttggggaagcctctcagaggaggaggagctggagacaggagggtgggagcaggacagagaaacttttgtttctgaggcttccacgttggggtgttgttttttgagccccggcacttaccaaacccaaatcacccacagggcttagacggcacaaa

SEQ ID NO: 31586 - DNA, 2300 bp, Homo sapien
gttatgcaataataaaccactgaaggaatatgctactatttattcattttatttatttattctcctgctgatgaacatttgggttaactttggggctattataataaagttgctgtgaatattctcgtatatgtatttttataaacaattgcactcaaactctcttgagtgtataacaaggtgtcagtttgctagaacataggattggtatatgtttaatcttggttgatactgccaaatagttttccaaaattattgtaacaacttacattcccattattatgtgctgaatatatgtgtcccccaatatttttttatgttgaagccctaacccccagtgtggctgtacttggagtaaagcagtaagtaaggttaaataaggtcataaaagtgggggcatgatcctatagcttcatgttcttataagaagagacacaagagagcactctttcctgtaccccccaacactgcatgcacaaagaagagatcatgtgaggactgcagcaggaaggtggtcatctgcaattgaggaagagagccctcacctccagaaaccaaatttgctgacaccttaatcgtggacttctggcctccagaactgtgagaagataaatgtctgtttttaagccaaccagtctatagtattttgttatggtgtccagagtagactaagacatccatcaagaatgtataagagttccagttgttccacatcttccccaacacttggtattgtatttgaaattttagtcattctagtggatgtacagtgcttcctcattgtggttttcatctgcatttccctgttgaatcatgacgttgaacaccttttcatatacttattagccatttgaatattctcttttgttaagtaccagcctacgtcttttgcccatttaaaaattttgtcttttccttcttgatctgtaggagttctcaatatattctgcatatgagtcctttgtcagtataactattgaaaatatcttttttcacggtgtcttgctctttccctcttcatgtttttttgatgaacatctgctagaatgttggtgtttgcaaaactgtttcacgcatgtcatcttacaaatccctcttcccactgacagatattcaggctggggccattggtctttatcagactggaaaactgaagctctgatctgtggcacttgtgttaagaaggatgccccctctacacacactcatattactactagtgtggcactgggtggctaagcctagcaacagacttcctccattccacaatggcattaggttagtgatcaaaatgtactgaccatcaaagccacatttactaggtccctgctgattttcaggtcctgtgtgtggagggacataaaggtgatcaagaccagaacctgtccccaaacagcctccagtctggtagaagcacttatgtactagagaagaattcctctctctaaagcatcccctaagaccctgcttgacgccaggctgacaggaggggcggaggacagaactgaaacagaagtagccctttaccttgaggaccttacagactggcgaagagagaccaaaaaccaccggccagaatcacccaaggcagcgagagaatttccccccaggacaaaagtatgagccaggggtggggaggacagaaggacgtgttccattctaaaacagtgagcagggactgtggacccacattgctctgggctcaaatcacgacttttagcacggtttttacctctaggttcgttgtgagggctaaatgaattcatataagttaattcaagcttgtgcatgcttagatagtaagcgctgtgaacgccagccagtcttattcaaatatagggaagggagggtcacttttacttttaaaaaataataaaagtaaaagcccgctgaagggaagctttagatgaagacgcgaacaaacctgccgccaccgatctaaattagagggcgaggaggggcgccgggaagcagctggtgatggacgtgcgcgcgcccgaggcccctttacgtgcacgcgcccgctacctggtcttgccgaaggcgtgaccgtaaaggggcccggctctgtcgtgaaagggccgcaaaaaggccgagggcgagttgacggctgcgactccattttgtaggccgcttatttgtgtgcatccacggcgattcttcccgcagagttgtgaagcgaaaggcttacaattaaaaggaagaaaaaaaaataaagataattcgggagtacaattgacaaagcgtgtgggtcgctcagcctccagcagtaactgctgatctccagttcttggagggtt

SEQ ID NO: 31587 - DNA, 2300 bp, Homo sapien
tctattgagtttctttttttctttctttcttttaaaattttatttatttatttatttatttattttgagatggagtctcaccctgtcgcccaggctggagagcagtggcgtgatctcggctcactgcaacctgcgcctcccaggtccaagcaattcttctgcctcagtctcccaagtagctgggattacaggtgtgtacgaccacaaccggctaatttttgtatttttaaaagagggtttcaccatgttggccaggctggtcttgtactcgtgatctcaaatgatccacccacctcagcctcccaaagtgctgggattacaggcgtaagccaccgcgcccagacattttgagtctctgattagcctctccaaaggtggcaatcagatacgcatttatctcagtgagcggagaagtgactgtgaatagaatgtgaggcaggtttgccctaagcagtttccaacttgacttttcttttagcttagtaattgtaggaccccaagatttatcttcctttcgcaggttggaaggaaagagatgccacactacctttcatgaactaatgtccaaatcatacatcatcacttctgtgtttttcagtttattatgagcaaatgaagtcactaagtccagtacatactcgacaagagggaatacacaagagtgagaataccaggagtaagaaatcactgggagtcatcttgaaggctggctagcaatcacagtttgccccctgactaccaattcttcatgccattttaacgtgctaaccacactcccctctatccaaggtccccaaaagttacatttttttaaatctcatgtagttttaggtattactatcctattgtcacatcagctttaagtccagaattttgtcttctcaataagatcagatgtagatgaggctttctgagcttagttccttaaattcagctcctagagtacaattcttcttgatctgtagacttttgaaactaaggagacaagttctctgcccccatgcctggaatatacagttgtggggctggcacaggataatcactacagacctgttctgctccactacgactagattagccactgccactcctgttcaaaaagggggaaattggaagtacaaacaagttgccagcccacagtaactctgccatccagtctcaaggtctaggactccatgactcccagttccaccatctgggctcctggtttcatgccctgagttatacttccttttttgtgaaatgtggcatgtgtttgccaatgagtctttttctcagtctgattcctgcttgtacaagtttggggagaggggatccaaaggcctgttcctttcagtccaatctgcaatgtttgtgtcaatataattatctttaaaaaactttataggtctcctgtgaatctcatcggggttcactccgttaaacaaaagtgctacctacaaatccctttgagataagtccatctctatcttgggcttctgctaatactgacgaacaagccttaagccttctggaggccttgtggtttgactgatggactctgtgagccacaccattaatctctttaaggagctgttagtctaactgaatggtattctcaggcaccgtctttgcttttttttttgagattttaaaggatttaaccgtcacatctcaacttcacctttgtttttttctggcagtaccctggatttgatatttgcttggaaactattactatttcttagttttacgccatttgcaatcaggcgaagctgaggactttaaaaatcatccaaagtcgtcaaggtccatcccttttgtgtttcgtcttgcttatctcatttattttactataaacagcaaaaagaaatgaaggacaggagggagacgttcatgggtgctggacatgtcctacctgttggtctggatagaagatgcatggttgtatggatgtgtacaaagtcatcaatgtgcacacttaaaatgtatgcactgtattgtattcctgctataccttcgcttaaaaaagaaaaaaaaggttgaatgtgagttcgggcgtgagaaaacagcagcgcgcatgcgtgagcgtgagcgcgcatgcgtgagcgtgagcgcgctgggaggccggaaacaaaggtggatgcgcgtgaacagacgccctcgcaggccgccggaagcaaaggcgtgagcgcgcgtgcgtgcgtgtgcgggtgcgtgagcgtgagcgcgcggaggccggaagcgagcgctgcgcagtcgggtggtcgcgggccatggagggtagcttttcggatggcggagcgctgccggaggggctc

SEQ ID NO: 31588 - DNA, 2300 bp, Homo sapien
tttttatcaaaataatttggaggacaggaggctattttgttaagaaaacaaagtaaacaagacactttctttccctaatctgtcatctttccccaccagctccaaatcctattaatacaagataattcctacttaaaaacctcttcttccaagaagtcttcaggttctactagttcatggtagaactagtataaaaactggtctgtggcaaagtaataaaaaaaaaggtcaataaactctgtgtgtgtgtgtgtgtgtgtgtgtgtcactatacaggtgccaaccgtgtttcctttcttcagaactgagatatactgttattacttttcaaaaaattttgctgttaatactcttttgtaaaatatgatgtagatgacagatatgtcaccaatgtagcaaaaatcaaaagctgaccatcctttgcaaatcccccatactttggtctgtgaaatcctggagcctggaggcacctgtgaactaggctctgaagctctgctactctcccctcctctactcccaagtggccctggatttcccataccctttccattctcgacactgtttttagagtttgagttccaggagcacagggactgtgcgttcccggcactgagccaggtccacaacaagcactcagaagaaactgactgaatgaacgtgtgatttatgacgatatacattcacctgagcgaatgctcagagaatacaattagaagcaaactggttaagggagacagtagtgtaaaggaaacgaaaccccatatttcagagccaggagcctgggttcacattctgtctcctgcaagaggtggtttagcaaggtcagaaggccctgtccactcggtagcagccaggcttgggtgaaatcactttctttcagcctcagcttcctcaccagttaaatgcggatgacaaagatttgtcccacgatttttgtaaagaacaaaaagatatgttcgcagaaaaaacactctgtagatagtacgtaagcgacagttcctcggtttgtccttccatggatgcatggagcatctagccaactcagcagatgacccctctccagtgtttcagcatctgcttctcccacaagcccgtgagctggtgcaggaaattctccaacaggttctgaacagaaaagcatagtgcctggcacctagtgggtgctgcataaatgaacaaatgaccccaggtaagtcactcctcccattggacctctttcttctaagtaatctcccttccttttccaggtccatgatacttatttgcttttttagaacaggcctaggagtcacatttagggaaggtaggtggctgtgaagacactttgattaaaaggttaatgcacatttttggtttccactttcgaagcttccagaatttatttttgcctagttaataaaaaaagagccatgtcacatttctttagcttgtcttctgggttccttaacaacaacaacaaaaaattaaagtctttattttaagccgcctactccagccatcccaggacgcggcgaggagggggcgcggacaggtggcgcgcgagcccgggaaggcgggggctgcaccgggccgcgggcggggccgtgcacgccgagccccacttccccagcgcgggccgggggcggggcgcggcggcagagttcgggggcttctgccgagggcagtcccacgtgcccctccgcgggagacgtctcctctccgacgcccagcacgctggggggctcccgcttcctgcctgccctctctactgcttgccctctcacctcccagcggcttccgccgccccggccaagctgcacggcgcgtcccgggccctagacccccacccgccaggcaccagccccggcctgtcccctcgcgccgtcagcccgcggcccaccgcccgcgcgcgcccgcagcccagccggagggaggggcaggggcggggaccggccggcgctgatgtaatcccggcacccgggcggaaggatatggagcgcgcccctggttggcggggcgctgaggccagttgccgggtaacggagcggagcggctcccggcgcgccgcctcccgccctccgcggagtggcgctggggccgccgccgccgctttacgtaaggcgcaggccagggccgcccggcgctcggcagccgcccgcagcccctcggagccagaggagaggcgcccccgccggccgccgcgccgcccggcagcctcggcaggtactgcgggcaggcggcggggagggagggcgcggagcagcccctcggccgggtgggcgcgggccggggaggccggacgctcgccgccgtggggctcc

SEQ ID NO: 31589 - DNA, 2300 bp, Homo sapien
gtgaccgcacacagccacacggctaaatcctgctcgccgtgctaattttgtcagactcaagttgcaatgaagatttgtctagaacacgtctgggcgctgagggcaacaggtaaggcgtgggtcaaatcacgctgcggatgcaggtgacgacaggctccgggagagacggagtgggcgcagcaggatggcgagtgaggaaaaggcaggcagagggcgccaggtgcaaatctgcaggaccacagacttcggttctggatacagaacaatggttccttgtcattgtagggttttagaccctaagactcggaattagggctggaagggatttgggagccccaagcagatctattaatccaacgcattaaattgctaattaagtcacgactgaagcagtctgtacttttccactagggtttacttagaaaaagctggggaggccttgttttaagaggtatgaaggaggcctcgtattatttttacttaaaacccccagaaatttaagcatttataaagtttctgtgatgcagcactgcgagggatgttaatgtttttgctttcaagagatcgcctttaaaaatctctcttgcttctgcgtcatatctcatagatgctcagggtttttacagccatgagctggagaggagacccaagttcggggttccctagcccatccctaacgaccgcagtagagacaaatcttccatttcatgcttccagatgcttcctgtaatgcggaaactcctcctgcccctgacctttctgagtggctgagtcttcccttagattgggctgcagtcagtctctcccgggtttcctctctggtaatttatctgccagtgacaaccctcagggctcctggttggcaggagccaaagccaagtggaaatccaggacttctggctcccagcgctgggtctctcctcttgccctcaagtccccagagtctaacgacaacccaataacgtcaaataccaactatttgccaggcccagggaaaatagcagtaaacaagataagcccggctttcctcatggaacccacagcctagaaggggaatggagacccactgcccgtcaacaggggctcctcacatactctctaccagctcatggagggctctggggcagggaacctggcttctgcccctctcagctactgacccacccgggtccttgggcggagggcttcatctctgagcccgtttcccgctttgtacaatggctctgatcatagatcccgtctctggagtttgtgcaatgttgaggccaaatatgcagataacgccaggccagtggcttccaaacccgcgtgcacattacacagcttcccaaactgatgatgcttccatctcatcttcagagactgtgacttaatcggcctgggcttcagaatattaaaagctccgcaggcaatactaaagtgcagaccagtttgggaactacagcgccaggcaccgtgtcacagcgcgataagagagaacgttcggaaaagccctttatagattaagagactgaggctggctgggaggacgccacggcgccgctcccaagaccaccgcggcggggcctgagctccggtgtcacgcaaagcttcccttccgcggcggggcccgggccgtctcccgcacaccggccggggcaggggagccccatcgatgcgctccgccgctcggctccctacgcctgagccctgcccgctcgagccccttccccctcccggccgcttcccacttccaagatggctgcgggtggagccgaccaggtaaggggccccctgtcggatgtccgtgggggccctgcgggcacaaaggcccgctcaaggcagctcctcgccactccggttggttctccggcaaaaaaaaagggccggcgacgccgctccggaggcccgcggcgggcggcccccggaagagggacagccgggcgagcgccgagctccagacgcggcggcacgggcggaagaacgggcgcgggccggcagggggcggggcgcaagtgcgtgggggcgtgcccagggggcgggcgagggggcggggcgaagcgagggtgcgcgccgctgttcgccgcgggctgctcgcgcgcacctgcgggtcggacccgctgcctaccgcgtgcccggcgtcctcgtcgcgcgagttgccggtcccgcggggcctgggctgcgggcccacgggtcccggggatggcgtcggagccgcgctaactccggtactgagagcctcccgcgagggccgggccgcgggccgcgagggagggcagggcgcgcggggccgccacctgctgcagcgccggccgaggcgg

SEQ ID NO: 31590 - DNA, 2300 bp, Homo sapien
ctttatgttgctcctgacatcgtcttcctgtggggaaggcagacacttgctgtgaagctgtggagtgtcagtaacattcaggaatggcgtgaactgaaccaaaaaagaccttcctcagcttgcacatctgttcctgtgacttgtcccacagacaaggcagtgtttctgccctggtttctggaaggtgttgatgtccttagaaaatgcacagagggcaaggttgttttgtgggatggggtaaaaggagaatgaatttgctccagatacgtcagacctcctgtgttcatggaacttcctcaggcttgcaggcagcctcaggaaacagtacgcccatcttcctggaggctccaggtgtgtgtttaggtcctttgccagcccaccttccttctgccctaggtgaggttaggttcagcctgggaggtggcgattcagtatgaaatgcaggagaactggtgtgggaccacaggaatacacgggctttgagaaacccatgggcaagcccattcctgcaaagcagttcttcagccatcagccacttgctactcataaattaacttccctttgcccagatagggatagaatctgttctgcttttcagatgttagtggaaaatatcatagaataatgcagtaattaaaacggtttcctcctatttcctatcttaaataggagattatttaaaatatttacacatcttttttatttttagaatattcagtacaagtaacactgaattatttcatgccttctgtatttttcatgtgcacacatcttactagattgccacatcaaatcagttcctgtttatgttgagcgagctgggtttgtaactgcgagctgtttcaactccagttttgctgattctttgttgtgaatagctgtggtttatctcaagaatcctgtaagattctgtatatggaagaatggtgagtcatctagagttgcagaatagcccttttgggccccacagcagtccagtttcagtccagttttcctgttcattcccccttgcctctagcaagaggcttttacaacccaggctctgggtaccaagtgttacaggtacatgtttataggcgtttgaaagttagaggttagctttaagctctgacctccttttaggtttcagatctgggtgttaaacacattttctgtggtgggaggagtgaggcggggaaggcgggtcaaaaggagtgggctctgccttccccgcccccacatcctgcagaaccaggcacgaggaagaaggaaggtgaggggccagtgggtgggatgaggaaccatatctcctgggtcacccttaccctaatacctggctgttcattcactgtaagttttttgcctgggatagattttatcccttttagaggttcgtttgagagcagttatttttaaagcagaagaaattgagtggcaggcaaaattcctgggacaaatacattaatatctagttaggtggatgaatgttcgctgctgtaacaaacttgaaatatacataaagcttcaaacacaacggaggttgatttccaggccatgctcccctaggttccttccgtcctgtggccccatcgttttcagcagaagcttgctgggttgttcggtattacaccaaagcaggggagagcgtgtgtagggaccagtgtgggagttctgagagccagccgtgcctgaagcggcacacacaactccactcagagttaattggctggaatgctgcccctacctgtgagggaagccaggaaagaggactgcgcccaggacaacgaggaaatgggtttggtgaataactgggagcctcggctgtgatgtcttttccttcctccctctgcccctctcccttcttcttgagaattaaatgcctgaaaccgattagttgaatacccctctcattctcttgcccaagtgatagttcccaccacctggaggatgaagtccagaccagttggtgtggcctacggggcgtgcaggatctggctgctgcctgcatctctggccaccagtggtgccagtgctcagagccagtgacgccctgcctctgcaccttgcctgttctgctgcctctcccgggcaaattcttgtttgtcccttaggattcagcttaagtgacacctcctctaggaagccttctttgatcaccccaacctctcccagacctctaatgtggaccccacagtccctggacttctttgagaccacactagcccactccccgccccctcctggaaccttgagcttctggagagctggggccacaccgtcctcctgtggttttccgagccggtgcaggtggtcagcagata

SEQ ID NO: 31591 - DNA, 2300 bp, Homo sapien
ttgttggtttaaaaagcgggggaaaagcctgcttcaatgcacatttgttttaagagcgaaaagaaaggatcatgattctcaaacaatgaagaagtattcctaagcctggcacagaggtgctgtgcctgtggtcccaactactcaagaggctgagacaaggatcacttgagcccaggagttcaaggttgcagtaagccataaccgcaccagggcaacaggacaagaccctgtctcaaaaaaaaaaaaaaaaaaaaaaagaaagaaagaaagaaagaaaaaagaaagtactcctggtagaaagacaagaaaggtcatcaatgctacttatgaactggaggaacactacaaaacagccaatgatgtcaataacctgctactggaagccccctgacttccaggaaggagcctctggctccctggaaatctattttacctagaagaggaaagggtcatcagtcaaatcctgtgcttaaatctccgaccccgctgtctgcagtatcaagattcaccagtgaaaataacctgaggatttgggagcgcgcctggaataaagctgccaaggcaggctggccatccgagtggtacctatcaaaagactgacttgaactaatgctgtgacagcacggccaccacatctgcacaggctgaggacccagggaagcgctgggggacagcggcaggcctggtctgagccagcaccaccagcagaatgaccttgagctcctcctccatccacaagcctgtttcctcatctgttacacttgaagattaaatgagaaccagcataagctgcagagccaaagcaggtgcccagaaatgataggagtatgactgtcactatatactatgaaattactcttcacaacattccactctaagagggttgcttgtggaaaagggcacgaaactgaaagtgtccgcaacaccgcggctggtctcacacttggccatttgtaaaagcaattgtcttggaggggggagcccagtttagcatctgggaggggctgttttgccattttgagggggaagaatggcctgcacaggtcttagaaaggtcccaccttccaaaaggcagccccggctaacccctgaagcctgacctcacagtaagtaaagccactgagaacatctgagtggttcctctggcctgggttctttaacaagctgcagtcccctcctggaaagcgttctctaagttactgggaatgttggcattctgggaagcactctcaggagtccttttctaatagtcatattcctcccagagcatcaaaagttaatatgcgggctggtgaatgaaacatattcaaaggaactaggttttaacacgcccggttgctgttgcaacctgaccacctcattgggctctagagctcggagcgcagtctcatctccatacaaaggctcatcggatcgcaggcgaggcccttctgacctctaagggggctgctgggcctggcccggctctgaaaacagggtaaggaggactcaaaggacgtgctcgctcacgctgtctctcgtcgtcctagtaaacgtgaaccagaagaaaatacgtggaaacacagacacaaagagtaccagggaggagagcgcatcagcagcatgcacagcaagcttcggctgttgaggacagatacacgtgatgctcgcacacccgcacaaccgcacacatgcacactcgcaccctccacctgcgcggggccgcagggctggcaggcccaggacaggacaggcccacgggaccgggcaggcctggggcgcagggagaggcaccggcccgcaccccgactcaccatgaacgccggggccttagaggcgcgcggccggaggctccatgcccagcgagcggagggccggcctccctccctccctcccggaccgcgggcgggcgggcggacgcggcggctcctcagactcgcggggcggggcggggcggcaggccgctcaatcgcgcgcagacacagcgaggcgatccgcgctgccggctcggcgcgtcaggcctggctggagactcccaagggggcggggctgatgagcggcgaggggcgggcacaaggggcggggctggggcgtccccgtggtacggccccaccggccgtaaacaccggggacgcgcgccgacaggcggagagccagcttctgccttaaagatcacccgagagctgagaaacgtgttgccaaaagaaattgcacaaaaatagtcgcactagtgagctctgggtggcggggtgattgtgagcagtttttacgggctaccgtggctcctgtttttcacaaagtattaacaggtgggtttaaaa

SEQ ID NO: 31592 - DNA, 2300 bp, Homo sapien
tatggtccacttctatgaggtccctaagagcagtcaaactcagagacaaaaagtagaatgatgggtgctaggggttggggagacggggagtaggaagttagtatttaatgggggcagtttgatttgggaaaatgagaaagctctggtgatggatggtggtgtggttgtacagtatgaatgttcttaatgccactgaactgtatacttaaaatggtaaatttgaccacacacacaaaaaagtatatgtaaactaaatgcatggtatttctcagagctgctatttgtagattaagagtaatgctcaaggctgggcatggtggctcacacctgtaatcccagcactttgagaagccaaggcgggtggtcaggagtttgagaccagcctggccaacatggtaaaaccctgtctctactaaaaatacaaaaattagctgggcctggtggtgggcacctgtaatcccagcttctcaggaggctaaggcaggagaattgcttgaacccgggaggcggaggtttcagtgagccaagattgcatcactgcaccccaccctgggtgacagagcaaaactccgtctaaaaaaaaaaaaaaaaagcagtgctcgaactgttggaagtcagcatggagcttgcatttggaaggggatagggctgggagcacaggagggacttccagagttccagtaacgttcggttgttttgatcaggatggtaatttcagggatttttctattttgtggtaacaattgtgttctttttttctttcttttttttttgaggtgtagtctcgctctgttgcccaggctgaagtgcagtggtgctatctcggctcactgcaacctctgtcacctggattcaagcaattctcctaccttagcctccccagtagctgggactacaggcccctgccatcatgcccagctaatttttgtatttttagtagagacgggatttcaccactttggccgggctggtctcgaactcctgacctcaggtgatccacccgccttggcttcccaaagtgctgggattacaggcgtgagccaccgcgcctggccaactgaatcgtattcttctttgtgtactttcctgtctagatgttagactttgcaagcttactaaagggtggataatgcctgagccttctggagtccgtcaggtgtgaagtgagcgctggagctgatgctcgctctgcttcagggcggttttcctggtgtgttcgcagtgtgacaggaaaatcaccttgcctggaaatggtccatatcagttagtagattgttgtttttctaaattgtgatttctagagctgaaagaagcccagcgaaggaagaagcagctggaagaaagatgcagagtcgaggaaagcattggaaacgctgtgctcacctggaataatgagatcttacctaactgggaaacaatgtaagatgtggctctgggtgtggctgaactgcagagcatgtctttctagaatctgtgggccacagctgtagtcgtcatagccagcagtgacaccctggatgcagcgagttgaagttgcatcatcttccttccctctaccctggctcagcctgcgccatcccttgcttggagactgtgatagccccttcccctcccttccagttcaccttcttctcatctcctgagccagcttctaaagcatgagtcagtgtcccctcccttacctagaatttcagtaacttcctgtgactgtcagtacacagtttgaacccttagcaggcaacacccttagtgaggtggcctgccttcctcggcagcctcaccctcggatgcctctcctccacttggacagagccctctccctagggagccccccataggtgttgctccttttaaacctggggcctcgcatgttccaggccctgtgtctggagtgctcttgtcctgtacttcctcagccagcaaactcctgtgtgctctccaaagctcagggaagactttgctgcccctaccctggctctagggccctgtggttctgtgtgcacacagctgtctgttcaggcctctgtcttcctctctttgaggatagtgaccccagtgtccagtagagtgcacctggcagagtctggcagctgctgccctctttacatctgaggggcagctgtgggtcttgtttttattctcgtgttcagaacggtgggggccagtgtgcgggcagaagtcccaaggctgcgcacagaggcattcggggagcttggatgccagcttcccttctgctctcgtcccacatgtcagcactgcaggggtcacgcggccctgctcagggtctccactaggaaaat

SEQ ID NO: 31593 - DNA, 2300 bp, Homo sapien
tagccaggatggtctcgacctcctgacctcgtgatccacccgcctcggcctcccaaagtgctgggatttacaggcgtgagccgccgcgcccgggccaaaatttcattttttggtacagattaatgcatttcttcagaggatccaagaacatgtttcattagacttgaacactgtcaggccaggcacggtggctcacgcctgtaatcccagcactttgggaggccgaggcaggtgtatcacttgaggccaggagttcgagaccagcctggccaacatggtgaaacctcatctctactaaaaatacaaaaattagttgggcatggtggcctgtgcctgtaatccccgccacctaggaggttaaggcgggagaatcgcttgaacccgggaggtggaggttgcagtgagccgagatcctgtcactgcactccagccagggagacagagaccctgtcccaaggaaaataataataataataataataataataataataataataataataataattgaagactgtcattgaagcagaaacaaccatcaacagtgagtagactgaactccctttcattgaaaaagggacgatgaagaaacatcagctcctctcctgtttatcatctctcctgtttcctggatatttttattgccccctaagctcgtgctagtcacatataaaaaaaatttttttttgagacaagagtctcgctctgtcgcccaggctggagtgcagtggtgcgatctcagctcactgcaagctctgcctccagggttcacaccattctcctgccccagcctcccgagtagctgggactacaggcgcccgccaccaggtctggctaattttttgtatttttagtagagatggggtttcaccgtgttagccaggatggtctcgatctcctgacctcacgatctgcccacctcggcctcccaaaatgctgggattatagaggtgagccacctagcccggcccaaaatcacttaaatttaagattaatctaaggggattagtgagcttctaactgaaacagtgtctcgggactacataatttaataaatccaaagaatttaataattagcttaatgcacagggtttttttgtaccttgcccattcgctgaacttttaaaccctcctacatatgaaagaggaacagtactctttagtattacatcactgaaattatagaattgctcagacttgagacttttgacagtttttcatgagaagtcagttacattaaatcaccctttgtttgcttttctggacctatttttgctcaatcccagataaaactcctaacccaggtttgggctcagcactgatttggaagctaaaacgttttgagataaatacaaaatagagtcccgtcccaaatgacacaggcctttttaatagcaacgaaggtaaaataaagcaggacagcacgtcctgaggatgaagtgttttgcagactcttctcatcgatctggtcaagaagggagaaaggctttggcctccctgatcttctgcctcacgcctctgcaggacaaagtgaggctagcgtggtggcgcttcagggattccaggcgccggtgaagcagttcggtcttgtccaccttttcttccaagtcccgaagaagtgagtccttgcctagaaggccgcacttctgattcagtctgatgttgtccgtccgcagcccctctcgggcttgcttcgtcttggtcaggatgtctcttcctagggcggcctgggcctcgatttctgccagctgtgtctttttgcacgcgttctccatgtccatgaagtgcagcttttccttcacgtgggttattacttgcacactgttggtcaccttgctgcgaagttttaaaagttcctcatttcgttcctcaattttctcattgaaggtttggttctcaatcttcagctgttcaaagtcaataagaagcagaccctgggtcaggtcctcctgggtcctcatcctggtttcaaaatgcaccaggctctgcttcagctgaatgttctccagccgcacggcgctcatctccttctcctttttatcctccaacgcctggatctgctccacctctcgcagagcagcctggcgcccgcccctcatccgacagctgcccatggcctgcatcaccacctgcttcttgagtgcctggaagcgtcgccactccttctccaccctggtgagcttctcctggcactgccgcttcaactggcccagctcctggtggtaccactgcaggtcgtctgcctgctgcttcttcagctcctccagcatgcccagatggcgcaggtacgcttgctc

SEQ ID NO: 31594 - DNA, 2300 bp, Homo sapien
caaagtgaggctagcgtggtggcgcttcagggattccaggcgccggtgaagcagttcggtcttgtccaccttttcttccaagtcccgaagaagtgagtccttgcctagaaggccgcacttctgattcagtctgatgttgtccgtccgcagcccctctcgggcttgcttcgtcttggtcaggatgtctcttcctagggcggcctgggcctcgatttctgccagctgtgtctttttgcacgcgttctccatgtccatgaagtgcagcttttccttcacgtgggttattacttgcacactgttggtcaccttgctgcgaagttttaaaagttcctcatttcgttcctcaattttctcattgaaggtttggttctcaatcttcagctgttcaaagtcaataagaagcagaccctgggtcaggtcctcctgggtcctcatcctggtttcaaaatgcaccaggctctgcttcagctgaatgttctccagccgcacggcgctcatctccttctcctttttatcctccaacgcctggatctgctccacctctcgcagagcagcctggcgcccgcccctcatccgacagctgcccatggcctgcatcaccacctgcttcttgagtgcctggaagcgtcgccactccttctccaccctggtgagcttctcctggcactgccgcttcaactggcccagctcctggtggtaccactgcaggtcgtctgcctgctgcttcttcagctcctccagcatgcccagatggcgcaggtacgcttgctctttctcgggggcctcggcctctgcgccccggtcagccacctcagcggcctccaggcccttctttctgcgcagcgcctcgaagatcttgtgctgcaggtataggttgtagcgctgggagcggttccgctccaccagcagggaacggtactggtccaggaggtcgctgcgcagctgctgctcctgcagcttctggacctcctcggaccactcgaggtcctcaaactcgtcccttccatagaggcgcttcccctcttcctggcttttggccgggcgtccttccccatccctctccttgctctccgcgccgtctctctgcgtctcctccttgtcctcttcctccccctccacccgctctgtctcggcctccggggctgcagcagcctcttcctcatcgatcctggtcagcggcagagaggcctggaacctgacttccttcccctctgccgcctgctccagttcctccgcccccgcctccgcctctagttcctcgggcccggctccgggctccggctgggcgggctcctcagccccaacctcggccggctcttcgggctcgggctggggctcggccggcctccccggctctccaggcccctcctcgcccgcagcctcggctgccgttagccctttcggggcctcggcctgctcgtccgcggcggtgcctccctgcgaagccgcttgctcctcctcctcctcctccggctccgactccagctccccgggttcgggagaggtcggagggccagagctggccttgatcttggacggccgcgcggccaggctttccccgtctccgccttccccgccggggtccttagtgtgctcagagctgacgtccatctcctcccggctcggccagcgcagcggaccccggcaggacgctgttaggtttcccggggcaacagaaggcgcgcgcgctgggcccggcgattggccaggcgacaggccgtcgtccagcgccttctccccgctgcccggcgagagcaagccaatgggaggccgcgagctgacgataggcgagattgattggaagcggccgtgggctctcgccgcgaggggcgtggcgcccccgccgggctttctgcctgcccatttcccaccgccgggcctggggcggggcgttcaggaggctctgggaaaggcggcggtggccggcgcggggggcgcgcaggcgcagagcggcgggccgggcgtccgcaaggtggcgcccgcggggcgcctgcgcgatgcggcggggcgacagctgcggcggcggtggcggccgggccgggccggacggcgcctgcgtactgaggggggacgcggcccggctggctggctctggcggcggctgggctggggccgcggtggcggcagccgcggcggcgggcggcggttgctcgtgcgcggcggcggcggcgggtcccgcgggcggcggggcgctgacggccgggggcgcggcggctgcggcgggccgggcggcgggcggcgagcgggggaagatggcggagctggggaagaagtactgcgtgtactgcctggccgaggtg

SEQ ID NO: 31595 - DNA, 2300 bp, Homo sapien
gaaggacaaggtgggacggagtttctgaaaaatggagatcccagtgctggtggccattaggtaagggtttgtaaaggagcatcttctctaaggagttgggaggagaatcaacattccagggcttcagaatgagtatgtgaggcggccctgagactcactcaggaaaggaaagcaaaaggcaatcaaagcagcccaggcaggactgctggagaggtggcagcgagatggatgctgttccgagaagcaggcacctggtgtagcaggggaagactctggaaagctaagggcgctgggggtgtctcactcccctcctcctcagggtgcccggggatggccacatgtctttggtggttatgagcgggaatacggctagagattttctcctttctaatacggatgcaagcttccagagtggaaggagagctgagagaccgcccagagagaaccatgttcctctctcaaggacagaacctagcacacgatgttgctagcgtaagtggatccagtccagctctcaccgctccccacacagggctgtctctacagaaacctcaaaggtaaagagagcaaaacccaagccccaggcctcccaggccaggcctctttgttcattctttactgaccattcgcacaaggtcgtgggttgtggggacccaagcataaaccaggcacgctacccacaaaagactctgtgcactgcggaccacacagggcacatgcatacagtgacagaaagcaaacggggccgccccagagaccccgagacaagccgcagggcgcccaccgctctccttccctggtgctcccaccgctttctgtcgagtctgtgggcctgcctgtctccacgaactcaggtaaggcaccgagtcttgcccaacgtctgcactccgcaaacgcctgtgaaggcgtccctgaaggtgagggaaatggctctgctgtcagaagccagcgttcaaagccccactcggccccgtctcggctgtgtgaccttgggcgcgtcacagcctctcagagcataggttccgacaggtgcccgactataaaccggcagcgtcgccctccccacctccggggccttctggggtgcggagcgagcgagcaggtccagcgctgcctgcgcgcccgattacaggagaggcgcgggccttccagtgccctagccgggacccggcccccgtcgcgccgctcacccagtttccgaagccgaactgctcgatggcgtccagcagcagctgctcctcgcgactggtccagccgccctcggcctcgggcccccagagcgtgaagcgcccgccgtccaccagctggtagccgtggtagcggcggtggtggccgatctcggcgccggccgagaagcactcggggcacagctcgatgtcctggcactcggtgcagcggaagcgcagcgggctcacctcggccaggcagtacacgcagtacttcttccccagctccgccatcttcccccgctcgccgcccgccgcccggcccgccgcagccgccgcgcccccggccgtcagcgccccgccgcccgcgggacccgccgccgccgccgcgcacgagcaaccgccgcccgccgccgcggctgccgccaccgcggccccagcccagccgccgccagagccagccagccgggccgcgtcccccctcagtacgcaggcgccgtccggcccggcccggccgccaccgccgccgcagctgtcgccccgccgcatcgcgcaggcgccccgcgggcgccaccttgcggacgcccggcccgccgctctgcgcctgcgcgccccccgcgccggccaccgccgcctttcccagagcctcctgaacgccccgccccaggcccggcggtgggaaatgggcaggcagaaagcccggcgggggcgccacgcccctcgcggcgagagcccacggccgcttccaatcaatctcgcctatcgtcagctcgcggcctcccattggcttgctctcgccgggcagcggggagaaggcgctggacgacggcctgtcgcctggccaatcgccgggcccagcgcgcgcgccttctgttgccccgggaaacctaacagcgtcctgccggggtccgctgcgctggccgagccgggaggagatggacgtcagctctgagcacactaaggaccccggcggggaaggcggagacggggaaagcctggccgcgcggccgtccaagatcaaggccagctctggccctccgacctctcccgaacccggggagctggagtcggagccggaggaggaggaggaggagcaagcggcttcgcagggaggcaccgccgcggacgagcagg

SEQ ID NO: 31596 - DNA, 2300 bp, Homo sapien
tgccctgcccctcccagccactctcccatccgggctctccctccccctcccgccatccttaatggtcatccctggaagcccgcacagtggaggctcctgccccggcggggaaggtaagtccccacttcccatggttcccaaccatgcctcacagctccctggggttctttccatccatccaaatttccagacctcggcctcagaggtgacaatccagcagatctcaggggatccctgggaattctaggggatcctgcggcatggctggtgaacaatgaaacggatggttctaggcatggagtcagaagccttgggttgaaattccacgttcccacatcacccacagttgtttcctcgtttgtaaaagtggggagcacctgtctcagggattaggggacggggagatggtgagaggggcgcgtgtcaaagcacctgctcagggcctggcactggcgagcagacactgcgtgatcacagagcctgagccagcaacactcttgtacccagcacccagggcttttcaccagcttcctccctcaccccaagctggcttttgcctggccctgaatacaccagactcttaaaacacaaaacccttccttcctccacactctcctctacctgcacagccatcttgtgtccttccctccgcaggacatcctgaggcccacttgcccacacggcacctgccaggtgaggcagctgtcttcctcctagcctgttctcaccacaggggctggcgcacaccaggccccgaggctgtgctaactgaatgaatgagcgagagaatgaatgcacgcacaaggcagtgaccatcgatgtgtctggccttctgccacctcctgggtgtccaccatcatctcaaagggtgcagctctactcaggacaccccacctggctccaagaaggagcctgagtgttgacgtgtgtgcacaaggccttccatggttcacagagaacttcacatgctcatttgattcaaaaccacaagggccagcttgaaccccacttccccgccaaagccctcctgaccaccacctgcagaggagcactggccctcctaaagctcctcagtgtcagcccaatttctttggcaaccaatcaacagctccggctcctctgccaccactgcgacttgccctcagctgtcacctgtgtttgcgtctgtgttcctgtgctccagcagggcctgcatcctctaactcttggaatcctgcgcagaacccatcacaaaccggccttctagagacgccagaccccgctaatctgactctaggccactgcttgccaactcttacccactgtagccaaggtcctttaacctgttctctctgcccctcgctatcaaacatacacaccagcacacgggttgtccctaagcccccaggtgtcactgttaaccctgctcagctacatcccgtccccttcaggccccatcccccagccctggtacaaaatgtgaccacaaagctgccagatttggccacaatccaccctctcccatgaatcccacatgtagttgtacaacccccaggccaggtgtcaccatttgccatctgaaagtagaactcaacaggtctcatctttcgtcacatcactgtcgccagcccccacaccatctccttccacactcacagtcacagcccatgagtccaggccctgcctccacactaatctccagtgaatcaggtcaagcccttctgccactcctgcggtggcaccgatggcctcccagcctctgacccacattgcttaatgctctcacccagaatgggttagggcccaggctttggaatcacataggcctgcgttcattcctggctctatcacatgaatgccatggaatccctgacaaggcgcttagtttcttacagctgctgttcttcaactgtaagaataagaacccacccccgagggttgctaggaagatcccacaggacacatatgggaagagcctggcccagagcgggcagaggctaaatatgccaaagtgggacacgccagctctgtgcacatagctggatacatgctcagaagagcaccacccatctcagagctgcagaacagcctcagaggaagaaaaataaagtcccgggggataacgcaacgaggttctgccagggagatggcagcacgaccaaatactggtgcctcaccactccgggggggtgggtggtcacgggccagtgcaccccctgagtcctggttgcaatgcaggctctcaggcctcaccgtaacctcgcgctggtgcaacgggagaacgccctgaccgcagcctggccaggctcgctgtgcaccaa

SEQ ID NO: 31597 - DNA, 2300 bp, Homo sapien
actcagcagttcgagaccagcctgggtaacatggtgaaaccccgtctctactaaaaagacgaaaaattagccaagcatggtggcacacacctctaataccagctactagggaggctgaggcatgagaatcgcttgaaccgggaggcagagtttgcagtgagctgagatcgcgccactgcactccagcctgggcaacagaatgagactctgtctcaaaatatatatataaaataaaataaattttatcgcagaaaactacaaacatatgcaaaagaaaatcgtcataactcctatggcattcatcacccagcttcaaccgttactaacatttgccacttgtgtttcacctgtccttgaattttttttcatggagaatttacaaagcgaataccagacataggggcaatttgctgtaaatacttccgtttgcatctctaaaggttaggacattttacccaccagccgttactgctccctaccaaaagtatcgatactcccagttttcatctaatacccagctttatattccaatttcccccacctatctctcaaatgccccgtttaagctagtttattctatcatgatccaagtaagttccacacattccattcaatgacgtcttttaagctcatttattctctaatagttcagttccactttcttttgtttcctccaggctcgaattaattatattatcatcataattatactattatcttaattattggtattaattgacacggtcatttgtcctgtacaacatcccatttggggtttagctgtttgcgtctttctgcaaggggcatattacctggcaaacagtaggtattaatcagcatgggttgaatggtttcaatggcagaaaagcaaaagaataaaggtttggtcctttactcaagtggtcctacattcactaatgtaacaagcaggcaaaactccgcttgagaagccaccagctcgcgccctgggatcctggggagggcatgggctccagccctgggatcccggggagggcacaggatcgagccctgggatcccggggagggcagggactctaagtctgggatcctggtgagggcacgggctacagccctcagatcttggccgccagaactgcactccaggccacgcggtgctgaagcgggagccaggccctatctcctgcgggaaccccgcttgggggccggcaccggggccataagaacacgcggccctctgttcttgggggtatgcgctacagcagcatggacctcggtcaggttatgaaaacgtgtgcatttatgagctttagttgtgccccaatgttttctatgcgctgttcttagtctgtttttcgtgttttgagaaaactgaagataacagaaaggtacaaaacacacgcccatattcccatcatccagcatcaaaaccgccaacatttcgtcccatttgtttcccgggttttgtttcctgtttcaccagaaatcactggtggagacggagaccccagtgccttctctccgcctcgggcgcctggagaagcagcttcggggtcggggcgccctcccaagcggttgcctccgcggttctcaagcaactacgccgccgtttgggtggcgctcgcgccgagacttcattttcatttagcaaacatggagtgctccgcgccgctctggagccggggtgtgagggtgaacagggctccccacgctcgttcccagagcaaaggaaggcccgcggtgtcagcgcaagggcgggtgcgggccgggaaacgacaagctgccgcctcactcctacccaaaaccaggctctgaagtccctcccggcccgcgacgcgcgcgccccaccccggcgctggccccgccccctcacgctgcctcctcattggctcctcccggcatcgccacgcccacaggaggctcctcccaatgctcacttcacctttcacctcttcagggcctccggtacgcctcaggccccgcccaccggggggtggggaaagatgctcttccgtgacccacaattattggtgactattgcctgtccataacaggaaaagcgattacggattggctgaggcgaagtagtagggcagaaaagtgggtatagctgcctgcacgcacgcttggtgcgtgcgcggcgactgcgacgggcagtggcagtcatggcggctcagtgcgtgaggttggcgcggcgcagtcttcctgctttggcgttgtctctcaggtaaggggcacttggtctccctgggtggaggtggcagcgcgacctcccgctccgatgggggcctttcccggccccggggcctccttcccggcct

SEQ ID NO: 31598 - DNA, 2300 bp, Homo sapien
gggcccgacgggtcccataattcaaggctggcgtggaggaagtcaaggcaaggagggcccagagagaaggctggaatccgaggggatcaggggcttgaaggaggcccctctgcagctcggtcactaaccccagtgtgtcgggaatcaagagtataggagggtggccgggcgcggtggctcatgcctgtaatcccaacactttgggaggccgaggcaggcagatcatttgaggtcaggagttggatactagcctggccaatatggtgaaaccccatctctactaaaaatacaaaaattagcggggcctggcggtatgtgcctgtaatcccagctactcgggaggctgaggcaggagaatcacttgaacccgggaggcagaggttgcagtgagccaagactgcgccactgtgctccagcctgggagacagagtaagaccttgtctcaaaaaaaaagagtataggaggtgaatgaagacaacaaggaagggaggggcaggcaggggcagtgacaggggaggaaaggagaaaaacagttccctcagacctcccggggcacctgctagctctgggtcacagttctgcccaacagccctgacaggcccttgtcctcagcccaagaagcaaagacctcccactgtggccaggaccccgatggagaaaggcagaggcgatgcctaaattagcttgggcaatccaggaatccttcctgggggaggtgacaaccaggttgggacctgagtcaaacgatagctattagctaggcaatgagcttcggttggggtgttcaggaggggaggaaagaacattccaggtaagtcagcagaatcttcaaaggccagtgcagcaaagcagagggtctgcaggagctcaatgtggctgagggctggggtgcaggcagaaggttgaggctggggtgcaggcaggggtgcatggggccagctatcctagagatgtgagcttcatcctattggcagcagggagccacccaggatggtgagaggaaccacctgaccggacgcatggagtggccagccaacagcacctctgctgtgttccaactcaggggagaaaccacacacaggacttggcaaatgggaaaccaagatacccccttattgctaaggaaagggattttggagaacatggcttctgtctgcaggccagtgagatgcctaacatgagctccagcgctggacaaactgaccatgggcctccacagcctgggcaggtgtctgtcatcgtggggcagagggaagatggtaggcccctgtcgacccacctcatctacaaactctgcctctgagtaggaggagggggacctccccagtggaagcgaacatcaggagagggtcgtcaggcgcttgctcctggcagagcccacaggcagggtggaggagcttgggagaacagaagccgagagccccgccagtcctccagacagctcctctgtaaggactgagccagatgcgggaactagaggcagcgtctgtccctcagtgtttaggactcaactgccatgtaatccaggcacagaaaactgacgccgggggacaggcttttgtggactagccagtcagggacaggactggacccgtgccctgggcccctgactccccgcccacagcttttccctcacagcgttttccacttgcactttgctcccgaggacttcctcaagctgagtttggtgcacacggccagtgctcctggcagctgtccagtcatctgcgtggccaagtgctacacacagcaggaaaatgtcaccagagacacgaatcccagcgtgacaaaacaagacacgatcaccatcaggcctgagcccactctacagatggagtaagaggccaagcagcctgaccagcctgaccagcctgaccagcgagttctcagcacaaagagcatccccgcactcctgaatcctgtgggaggctgagtccagcgagatgtcccggggtagaacctggctccgcgacgagggcggggaaggggcggagccaaggaagggcggggttcggggcaagggcggggcagggcggggccggggcactggtgattggaagcctggtgggcggggcccaggacctccctgccctctccgccattaactcggagcccggcgcagtggaaagcgggccaagaagcagaggtccaggttccaactcttgattctatcacaaaacactgcacccgaggcagccaggcagcttccgaagacctcgtaagtgccccgccatttgctgggtgctggggatacagacatgaaaagaaaaataaaagactcagccctgcctccgggaact

SEQ ID NO: 31599 - DNA, 2300 bp, Homo sapien
cccacactggagtgctgcggcatgatctcggctcaccgcagccttgacctcctgggctcaagcgatcctttaacctcagcttcccaagtagtttggaccacacccagctaatattttaaatatatatatattttaatagagatggggtctcactacattacccaggctggtctctgactcctagcctcaagcattcctcccaacttggccgcccacagtgttgggattacagtgtgagccactgcacctggccaagtttcttgaggatagtacttggaggccttctttatttaaaacaaaacaaaaccagttaacactgagagagaccgcagagattgtgcagcctcttcttttacagttggcaaaatggaggctcgggagtttggggaaggccctgtgatggttcctgtctaagctgggaggaaccgaaccatctcatttctaactccatgttcagtgatctcctgccagccacggtctgcagccctcttttggtcccccacttttcctcatctcccctcccctccacccttcactgaccccactctgttcttctctgcttcctgtgtgagaccagatgttcccacagctgcagagtcctcccttccctcttcccattgggtttgaagctgacaggttcaggatttacatggtggggtgagagggaacggcacattcggagtgtggggccttcttaggcatctggccagacctcctcctccccaagtcccagcgctgggtacagcgtgaatgcaggtagcctgtgcccagtgctttgggatatgatttcctggggagggagatgggtgctccaattctctgggagccagagggaacccccaattctccatctttcccaaatgttcgaggccttgcccctctgccccagtaggctctctctggagccaagggacccagctgggaggtggggtatgactgggaccccggcccaagggctcctatctggcgcggggcctctgggggaaggccatgggcagggtggccctggcctggcagaggctctgaccctggccttgcctcgggaagcgcctgccgtgcttgttcctggaggcccgtctgacactcagggtggctgctctgtgaagtcatttttatcgctactgaactaaagtggccacgagaccttgggtggggacttgctgtgctccgagcctcagtttccacattcctcactgcgcctgccaggtccctaggacctcaccccctgccccctccccacgcctccccacacaggagcttgtcctgttcagggtagctccctcgtggcccctgggttgggagatgaagccactgcacgtcccgatgtctgagccagaggcctggcagtccttggggcagttctgctgaggacaccttaggggcctctgcactgcacccccccaccccgctccggccgcctagcaggcctccccagggaccttcacgggcttcaccccctctccactgccacctcttcagaggccccttgaggagaaccctttataatctgcgccgggagccctggttctagctcagagttcttttgcctatatatgtgtcctcctgggttggtctgtctccctcaggctgtcagctcccggacagggacctggctgttcccagcgggagcccagagccgcagaaccgtggctggacctggagagagggagggaggacgggaagaggtgggagagccgggaaggaggaccggaggaaccaccgagctgggaaggggatcctggcctggaggtggggccgcgctcgggtacgccgggcttcccacgagcgcctgggcggcgggccggccggcaggtggcggtgcgcgctcggcgtcgcgggtggcgccggggccgccgagtcccctcctcccgccgctccctcccctcgccggctcctttctctgcgctctcgctcgcgctccccagcgccctcctgctctcccggccgcggtcccctcgtccgcgccgccccgccgccggctccgctgccgcccctggcgaccatggcgcaccgggggccctcgcgcgcctcgaagggccccggccccaccgcccgagccccgagccccggggctccgccgccgccgcgctcgccgcgctcgcggccgctcctgctgctgctgctgctgctgggcgcctgcggggcggcggggcgctcccctgagcccgggcgcctgggtcctcacgcccaactgacccgggtgccgcggagccctcccgcggggcgcgcggagcccggtggcggcgaggaccggcaggcgcgcggcacggagccaggcgccccgggtccgagtcccggtc

SEQ ID NO: 31600 - DNA, 2300 bp, Homo sapien
cggtcgttggtgttggaaaacaccccagtccccgaaacaaaacagacatggagcaatcagaattcctcaaatgctgctgaggggagtgggaacgggcacaaccactttggaaagcgatccagcagtacctgctcaacacacacgacgcatgcccaatccgtgccgctcctccataagacccagcagagaagggaagacacgtgtgcatccaagacatacacagaagtgttcggggcagcgttacttctactggctcccaagtggaattgttccaaaggcccatcaagggtcgagtagacaaatccaccatggtgcactgacctaattaatacacacccagggcccagtggggcattccacctgcccagtggaattctacccagaaacgacaatgtcggctctacagctaaacacagcagcgtgggtcaatcatacaaagacaatgccgagccaagaagtccttcattatcgggatgttgtgccaggctcaagggatgtcaggatgaggaggacattctggcctcctgggtcgcaccccctcagtgcaagagaccaaggcagcgccgtgggggtggggtctcaagagactcgcaggaagtctggcacacagctgcgttcacgccaaggggcaggcccttctgtttgcttcagcctggtgcccaaagtcctggtgggatgcgagtgggtgccctgggaatgtcaggcgatggactgaatgaatggcaggcccatcataagcccatagaaatgtatcaacacgtgcttggctgagccaagtccaggtaaggacacccacgtctccagccccacctggggtatgacctggaggtgctggccagctgccatcctgcagctgagcacacccaggctcacctgttccctaagactgtcccctccactggtccccagcaaccagagtccttggaagtcactgcaagaactcagcaaatcctattttccgtcttctcttcctgacccctgtacccagcaggagggctggcgggaagcaccctgcactattgcattcctcatgtgtggctgttgcaatttcaggccaggctgcccgacccacataactgggaagtgtgttcctacagagcacccaagcccaggaagctgagctgaggacacccacatgtggggctaggggagccccctgccatcaaacctctggcctgcccactccatggctgtttggcaattaggccagaggtgaggctgactccagatttctccatttaatgaacaggacccgacgcaaggcgcctgtgcgtgctcacccagctgactctcttgcctaagaactattttaaaaactaaggaagaagaaaaagataagataacagatgacacagaaacgaaacaaacctcttttgtgtgtgtgtaccttcaacaaacatttaatctacgcctactacagaccagcccacactcagcctttgattgacatttctagaatgaagagaccggctgggctcgaggacctgagtttgcaagtggcttttgcggtgtggcagtgaggtccacagctctcccacttcacagtttaagacctgaagctcaaagagactaactccccaaacagcacagccaggggcagaaccccagctgggcacgtggccctgaggccacgttagaaaacagtggcatccagggggtggccagtcattgggaacactcgatcttcagcaaataaggcagagggtgcctttccgtacctcccagaatgggggcagagactcctcggggtgtgaggggggctcacattccaggaggggacccaggccacacaagtcaggagaggacagtgagctgcagggaagggaaccccaggaactactgcagcagggggagggtgggggacacagcccaggggccaggagggcttcctaggagccgagcttcattcacgtatcagctaggctcagaaaactgctaagagtttatcttatccaggggaaaagaggggagggatagtgttccaggcactccaagagcaaaggcgaagaggccaggaatccccgggcacagggtgtgagtcaggctgtgggagtggccaggaggtggggccgcccttccgtgcctcctctggggccaggcaggagagccaggtttatagcagcagccactgctgggtactctggagccagagagtccctgggcagcatgctgtgtgccctgctcctcctgcccagcctcctgggggccaccagggcagccccacctcaggcccccaggagtgtgcaaagggctccacggtgtggtgtcaggatctgcagacagctgccaggtgcggggct

SEQ ID NO: 31601 - DNA, 2300 bp, Homo sapien
cccacctacacattcaggcaggagggaatgatcacaaggtggttcagtaacatgccaggcccactgtaactcgaacaggggccaaaaccccatcaatatcctgaccaccacaaacccttgctatgattggtgagccacatggtctggttgcccaaggaatttgctcgaggtcagagacagcgtccattcactcccccaaaactgtgaggagtcttccttggtgcacatcactccagtaagtgtctttggggaaggttaggaggaaatctttgttataaattcatgccaggaccatgcctaaggggctataacatccccccgtattcaagggccttcgggtctgccacctggctcaggtctggggatggattgataagggccctaagtttctcggtgactcaagcagggtctctaattcccagagccagatagggcatctttgtttctctgtttgctttgtgcagatcaagggaagaccttagtggcctgtgtggggacctcaatcccagagacaccctgatcccttcatcaccactgacactctgtgggttcaaccatgatgattatggctgagctcttgtttcccatcccaatacacaagcccactttgtctctggaaattaagagctgccattatacctatggaatgcgagaacccagtttcagtggggatggctcctgttctcagctctgagttgaaaaagcagtcatcatagagcttttcaagaaagatcttggaaccagtggacgcctcccaacaccttagccaatggagtgtcctctgggccctgcaagtgcatgatgacacagagggtgaggctgcagcacatgaccaccagacccacgtgacacgcccatcccccccatgcctgacggtttcctccccatgtgcccatgggaggcctgcttcactttgcaatccgccacagccagaagcccaagtcctctatatcctctccatgacttataattgaatgattagtcaaagaaaatgggacagtctctaaagctgaaaagataacccacagagaaaggatttctgctcgattaaagtcttacgggtgtcgtgggataagtcacggatcagtacgtgcccaatacttgacgagtgtaaaacagaccttgggccgggtgcagtggctcacgcctgtaatcccagcactttgggaggctgaggcaggcggatcacctgaggtccggagttcgagaccagcctggccaacatggagaaacctgtctctactacaaatacaaaattagccgggcgtggtggcaggtgcctgtaatccagctactccagaggctgaggcaggagaatggcttgaagccgggaggcggaggttggtgtgagccgagatcacgccattgcactccagcctgggcaacaagagcgaaactccgtctaaaaaaagaaaaacagaccttgaatgctcggccggtgagctgactcatggaaagcacctggaacaaagcctggcacagagcggacgccgtgagaggatccgccgctgctgctgcggttaaatgagtgtttctgaaaagcttcctgggccaagccagtgctagacagcaacaaggcagcaacaggcagccagcgcctgcccccaaagagttcccagtctctgggaatgtgaaacaggcttaaaaccaggggtaatatcataggaaaagtgcaaggaaaggattctcctgatggattcatccagagcgatgggacctgaaagcattgtgcatattgattgcagaagaagcagacctgtgcagggagagaagcatcagaacacgcacctgtgcagggagataagcatcagaacacgcacctgtgcaggaagagagaggcattgggacacacacctgtgcagggagagaggcattagagaggcagggaaggaggtgatatggtttggctgtatccccatccaaatctcagcttgaattatatttcccagaattcccatgcattgtgggagggacccaggggaaggtaattgaatcatgggggctggtcttccccgttattctcgtgatagtgagtaagtctcacgatacctggagggtttatcaagggttcctgcttttgctgcttcctcgttttcttttgctgctgccacgtaagaagtgtctttcgcctcccgccatgattctgaggcctccccagccatgtgcaactgtaagtccagttaagcctttattttcttcccagtctggggtatgtctttatcagcagcgtgaaaacaaactaatacaggaggaattgggccaagcagctgtgcggcacacttgggaagcagggctgtccc

SEQ ID NO: 31602 - DNA, 2300 bp, Homo sapien
aggcggcaggtgcgtcctcagcctcaggtgggaacctgcactcagggcctctgccatctgcgggctgcttccagcgctggggatcttagtgcctcccagggcctcctatttcttggaaagttttcatttttagatagtttttgtttcttcatgttaagccaaaatctgcctgcctgtgactcttactctacttgtatcatttgcagctcctcaaaataagtgaaatcggtttccagtttgaaggcagctgtcgtgcccccatcctggccatccgaaacctgatggcttgctaacttctcacgtgctttaggtgaattccatagtcccacatcaacaccaggcatctggtaactggttcgttgcacatgttaaatgaggggcttccagatacggcctgtgtggtgtcatgaaaagcccccaaaacttgtgatgccgtagccacggctctcctagtttatgcgaatttgcatttaaagcttgatcgatcgtgtgaaggatttgttttatccacactcccatccctgggcctcctcagtgtgaccctagacgtcttcacctcgcctggtcttgtccgaggcggctgacctgtggccttgtgtctccgcaggctatctgaacgtgctctccaacagccgctggcgagagcgctggtgccgagtgaaagataacaagctcattttccacaaggacaggaccgacctgaagacccatattgtgtctattccgctccgtggctgcgaggtgatcccgggtttggattctaaacatcctctgacgttccggctgctgcgcaacggccaggaggttgcagtattggaggtaggatatttcccaggggctgtactccacagagggacacacgcggtgatcttcctttcaaaaggcgaatgctgactcctctatcaaaattcctcccatctcgctgacagtacctcttttgggcccaccctcttttctctcactgcccagtccatgagtctttgctttacttcttgcctcagttttttttctgggagatacgacaatgacggcaccccagcaccactttctacccatttgtacacatcagattgacttgcctccttgtctgagttcctctttatgcctggttgcagggaaattaaatacacaatcccatagagtacattgcttttctaaagcacctggaaaataacttgttttaaaatttccaggaaagctctttcccccaggagctctttgaaatggtggtaaatgtttcctttggaatgttctggacttctttacagatggaagactttttggggccatctgaatgccttatagacggcggccagtgagccacatgacacagacactgaaagagcgcctttgctgtttcggagccctgggcttggtgcacgctttgttatttatttggctgcttcactagaatttcttactcatgaaagcagaaaagacagttaaaactcatagctacatactcaaaactttcattattgaaagtttttaatttttcatcatagaaaacattctgttgatgttttctacccagttttagacctttttttcctgtgatttttccctttatttctgagtcttttcccccacttagtgttattatgaccaagatgcaaacatacacacacagacagatctgtgcattcacacgccagatggtcgcatccatgtcacgcaccttgtgctgtagaatcgatagaaaccagttcatgtgaggcgtgctgggtggccggtgtgtggcagaaactcacctggtgtgggagccggctctacatgcgtgcacagtgacactcatcggcagaggagagagtgcctggggctgcgacctaagccacggctgcccagtcaggcagtctttctgaagatcttgaatttcatacataggagttcattgcagggactgttttcatagaggctgcttttttttttggtggggatgaaaaatagatgaacactgtctttttcctgcagggctcaggacgtaagggaaggtcagaagcacgcattgctgcccccgtggctggttttgcagcagtgtgatctaacagagagggctgggctcagatgggcttgggacagctgggttccagtctcagctctgtgcagaccctgaccacggccaaagcttttgttctctctcagcttctttacccaccgtaaaacacgaatgctgagctagagtcagtgtaccttgtaaacatttatgtaggctgaaaactggagggtggatggcggtggaaaaaagctgaaaacttaaataaagaaactgtactcttgatgtaacaatgcgggtctcccat

SEQ ID NO: 31603 - DNA, 2300 bp, Homo sapien
ggaagactctgtctcaaaaaaaaaaaaaaaaaaaaaaaaagaaaaaggcaatctgacctcccacagataggtagttgggaagtttttcagtagccttttcagaaaattgtagacattcttctttgatactacaccaaaacttgacaagtggcggtttcctaactgttagttgtgatgtggcatctgaagctgtgccatcctctgttacattagaatagtttagtttattttgctctttaggtggatcttttacccatacatgactttgttacatcatggttcactgagttgtgcagatcttccaaataaatgtcaacatatgacattaggcaatataaatcacatttgttcatgtcactgctgatctcagtagaaaagcctccagtattaggaggcagtaagctcttatggggtggatacaaagtttcaaaaattattttttcacttggaagctcaacttttgttcttggccacaaatggtatcagttgtttaccttgaagtgatgagctcatgtgttcattcttgagaacatgtctgccaggtactcaagtctaagtcattgcagtttgcctgtcattcactctctccagtaaagatagtgctgtgtgcaacaagtggcttcgggtggcttggaactcaaacactcacaagagtgatttttctctagacgactgtggtatttcgtgtgcaggagggcttcatgcgtgcttcccatgtcattcaatgatacgttaaaaaggtgtgtgttggtcgggtgtggtggctcacgtctgtaatcccagtgctttgggaggcccagatgggtggatcacgaggtcaggagatcgagactatcctggctaacacggtgaaaccccgtctctactaaaaatacaaaaaattagctgggcgtggtggcgggcgcctgtagtcccagctactcaggaggctgaggcaggagaatggcatgaacccaggaggcggagctttcagtgagcccagatcgtgccactgcactccagcctgggcgacagtgagactccgtctcaaaaaaaaaaaaaaaaaaaaaaaaaaggtgtgtcttcaaaggttagatttaagaaaagccattattttttactgctttctcaaagacactcctaagtgaaagtggggtttttttttttttttttttgagacagagtctcccactgtcgcccaggctggagtgcagtggtgcaatcttggctcactgaaacctccgcctcccaggttcaagcgattcttgtgccccagcctcctcagtagctgggattacaggcacatgccaccacgcccggctactttttgtatttttaatagagatggccatgttggccaggctggtctcgaacttctgaccttaggtgatccgcctgcctgggtctcccaaagtgctgggattacagacgtgagccaccgcgcccagcccaagtagtttttttttttttttttttttaaaaaaaaaaaaaggaaaaaaaacctgtgagtatatggtgaaggatatcatgaccgctaggatagtttggtgtcacttccttgattcgtgctaagatgctagcagttttaccttggcatttacaccattaatgcagaaaaaggtgaataatgtcttagcattctgaaaatagtttgggcctcgggccttgtgggctccctgaaaggaggagttcacatccccagaggctaagatcatcatctacaaactgctgacctaagccagcattccagtcttgtggatatcagaggaaaagtcaagtctaccatcattctagaaggaaaaggcatggtgggaattcagcacctgaacttgtatttacaccagcctcggcatctggcctcctttgtgctaactgcataaacatgctcacagttgtcctgggctggagccagctttgcaaaagcagagagctgggtgttgagtttctgaaaccatgccctactggttattagaaaactctttggcattttaaactcccatctccttcttgacattgaaatttaatatcgtggaattgacaccaaatgatgacgtcaggcctttgggttgtcacaccatctgttggcagcctggctttggagcttctcccagttgaattttgctgccttaaagcagaagcaaaggagtagtgcatttgttaagaagaagacgcctgaatcttttagtggacctgctttcagcaaacttgttttttaggtcagaatactatatccaatgatcaagctaaacatgaaatgcttcgagtaagactcagtattcatactttgacatttgcaaatcactgggtctaataatactctt

SEQ ID NO: 31604 - DNA, 2300 bp, Homo sapien
aggcttcaaaccattacacaaagccaagtacatctactcaaggcactctcaaaattccatttactcccattttactctccaaaataaaatgttaggttgaaacatacttcacatgacacttaaaagatcaacaaaatgctcctgaaaaaaagatctgagctcaacaactccattaatgagaaaaaaacaaaccaattggatatagtgaagatgttgcacataaaacaattatgaagaatatgaaagatattgccaaaaagttgcttaaggtttcatcatagatacttgtccttaactctgagataaagtatatacacatgtaactcaacttgtttaaaaggaaaaaaaggggaagaagaaaagaaacttccactttagaatccacattttcaaaggcttccgttatttacaccattgctggtaagagaatttttctctactatatttgcttgaaagaattaaaggtgtagggctgaaaagattcttagaaattatgtagtttacgatcctcaaaggtgagaaaaatgaagcccagaagagaaggccttccaggaaaattccagagccggacgtagacccagtacattgtttctgtttttattttgagacgaagtcttactctatcgcccaggctggagtgcagtggagttatttcaactcactgcaacctccgcctcctgggttcaagctattctcctgcctcagcctcatgagtagctgcgattacaggcacccaccaccatgcccggctaatttttgtatttttagtagagacggggtttcaccatgttggccaggctggtctcgaactcctgacctcaaatgatccgcctgcctcgacctcccaaagttctgggattacaggcgtgagccaccgcgcccggccgacctgctaagttttaatcaagtactctgcactatgcaacaaacattaggaagtaatagaaaaagattaatctaaaaaccctctggagagtcaaagaattgcagatttaaaatagcatgaatacttggattcatggtattgaaaaaggagctcgcatttacccgcatgcacaaactgcgcctgcccacctctatcagagcatttttcaagctgtgctacagttaaccatgtattacccaaagccaatctgtcctggcagatcataagctcttaaagaccaggacttcaggagaacaagcaaagcttcagagagaagggagccacctcaacagagtccatagcaatgggtcggcatgagctgatgactggaggtgcggcgtagagtgggggtctggggcagcggagggcagagaaagcaaaagggcccgcatgacacgctagagggctaggagccacagctgcggtaattagctcagttttgtcttgtatgcctgttacttaaacaccatctcttgttcagaaagaacttcaggttgggtatttggactccttgagccttctgctgtttgtctccgggatctttaactctcctaaaaggggaaaactgtccagttcgattttgcttcctgggacataacaggtttttcaaaagtttgatgaaagcattcactaaggagtgattccactttctttggtggctgagaaatacagcgtctgaggggcagcatcaggtcttcccatcaagctgaggtcggagtctccccacccacggacctcaccctcgctctcccctcataaatctgacctctaactgtaactgccttggcctcattccgtgggtgtggatgctcctgcttgaaacgcattttccagcccgccaaattcttgggagagtttcttccactctccaggcgctgagagctacaaagttcaatctggctttccagattttttttttcttcccattactaacggaagaaatcaagaagctccgggcagtagggccctgctccctccaatcagagcccagcccggggccagagcaggaagcgcggcggtgggacgcgcggtgacagccccgcgccccccggggcccgccggccaggggagaggacggtgcggccgctgcgcgacagctccgggcccgcgcctctcgcttccacccgccgggcaggtgagaggataaatcacggggcggggcagtgcgcccccaccaaccgcgccccccgcgcacggacccccattacactcgcgtcccaggcggggtcgacccagacgagccacggggcggcgcagagccccactcgcagggcggccgggacccacgcgcgtgggtccacgcaacaacctataggtgacaaaacactcaggaagccgtcatgcggggccaagaaagagcccccatccagagtca

SEQ ID NO: 31605 - DNA, 2300 bp, Homo sapien
cagccatcatcaagacctcacctgtgcatccacccatcccagcagcatccctgagtgagtgccttcagggcgcaggtcctgttttgcacatggaagtgaatcagagtgggacactgccttgccttagagaggtcacacttctttttttttttttaacttgtgatagagtctcgctctgttgcccaggctggagtgcagcggcgtgactttggctcactgcaacctccgcctcctaggttcaagcaattttcctgcctcagcctcctgggtagctgggattataggcacgtgttaccatgcctggctaattgttgtattttagtttcaccatattggccaggctggtcccagactcctggcctcaagtgatctgccccccttggcctcccaaagtgctgggattacaggcgtgagtcactgcactgggcaagaggtcacacttcatgccaagtgggaggcagccactcagacagcaccccagctggcgctgggagtgaggggtgctcagcgtcctaggaaggcagagggctgcgtgagaggtttggggaggaaggactggaggaggatttgagattttcacctgagcagctaggtggatggaggggctgtttactgagaatcacaagaatgtggatgagcaggttggggcactgataaagcactctgttttggcccgcagaaaatttgagatgcctccctggtgtccagctaggcctttgggagaggtcagggctgggcatctgacttggatggatgtctctggcaggcagcagagcatgtggatggtttgtgaagcccagaagggcatgagatttcctgtagcagtgcccactgtgaatggaagggcatttggcctgagcccagacatgtacaagttgggcagagaagggggtgggtccctgggacccacagaggagcagctatggaggtacagaaaaaccaagtgtgtgggggtcacatgatgcaggaagctcaaataagatgaggaaagaggttttaaagatgatcagggttggggacagtagttcatgcctgtaatcccaacactttgagaggctgagatgagacgatagcttgaggccaggagtttgagaccagcctgggcaacatagggagaccccatttctagaaataaataaatacattggtacttggcatttcaggtggggaacagcaaacacgtgaaagctctgaggcaggaaagcgaagtgattagtgcttgcttgctcctggttcctttatcaggccttaaagagatgcagagacatctcaggtactccttggccgagctccttcagggagggcctaagttcgcttctacttcacatctttaaaaaaaaattttttttttggagacagagtctcactctgtcgcccaggctggagtgcacgcagtggcacgatctcggctcactgcaacctccacctcctgggttcaagcgattctcctgcctcagcctccccagtagctgggactacaggtacgcgccaccacaatcggcaaagtttttgtatttttagtagagacggggtttcatcttgttggccaggctggtttcgaactcctgacctcaagtgatccacctgcctcggcctcccaaagtgctgggattacaggtgtgagccaccgtgcccggccctacttcactcctaacgcccgccatacgtgcttccaaatgtttgctgaatgactacaagatgaacgagtgaatgggattacgtttcttcgagcggcaggcaatcctattccttggacctcagtttccctttctgtaaagcaagcctttctctcgctctctgccctaaaagcctgagctctgggtttgagatgagcgcgtcctgtagagccgactccaggtagacgttgagctgggtattctaggaggcgatgatcgggccggctctttgaggcgggtcctcccgcgggaccccgcaagcccagtcccagcaccgccccgcccaacctccctttgttccctcaggccccgcccactccgcgcagctcgcttcccattggccggggggcgggccctgggcgcccggctccgctgggggcgggacggcgggcggcgggcggggccgtgtgcgcctgcgtggtgtctgtcccggccgcagccccacgccggctgcagctccgcgagccgagccggatctcgagcggggtacacgggctgaggcggcggcggcggccccgccccggggctccattgttaaggcggctgcggctctgtcggctgttcagctgcgctccagtcggcccaggcgccgcggcgaggagcgagcgctgcgaggtggcggcc

SEQ ID NO: 31606 - DNA, 2300 bp, Homo sapien
tggactttgactcgcacgcacagccacgtgcgtccgcgtagctctgagaataccctaggagttccacaaccgtgcacagtgccagaagacggcagccagtcttcccccttggccatcttgcagggaacagagggcccagggtggaccctggggctccctgagcacctgggacagcaggttctaggcgctgtgctcaggaacccaccatgtggaggggacagatcaccaacggggaaccgcagagcgctgtgcctagcgcagcgtgcgcaaagaaatggtgctgagcccccagtggtcgtctgtgccagctgcagagtggggaactcaggcacctgggagcagctttcaaatggggttggagctgtccacacaggaagggtctgtggagaccgcccaggcagtgggcatcctatgagcaagaaagctggccagtcccacgggcacagcatcctggactctccccttcccaagccactgttgctgtccttctgtcacgccccactgctgtgctaaggacaccctactccccaggcagcacgaggacctcggcctccaaggggccacatctcctggtccctgcccatccacacaccctcgtgccgcctgtctcttgccgcccaacctctctttctcttccagaatgccaatctggccccctgtggagcagacccggatgccagctggggcatgcgaggtacacagagcggggaccctgtgggtctctggctggggcaggggtcgctaacacattccacaagacttgttctgaaaccaccccatccgcagcctgcagaaggctccgggagtgccgggcggggacacctcgggggagggcgtgctggtttccctgcctctcctggccaaaagtcagttccactccaagctagctttacccgcgatgctccctctgtcccatccatggccacggcggccctgtcctgcattgtatggcactctgtgtcacttgggaaagcagagtcacaggcacaaggcttccagggtctgagcgggacggcgctgggccaaaccctgcctgcgccttgctccccgtgtggctgccggcacgccgcgtgaactctccgggttcagcagggctactaggaggtttgtgttaccagagcggccacctggtcgtgtggcaggtgcctgacacctcccacaggctcacctcctgtcagcctctgtgcccgcgagtggcgggggagccttgctctgctggactgggttgcatggggacggagagcatcagtgcaccacagcctgctccctctaagtggccttcagtccccgggcctcagagccagcaggtccagaaccacacggggcaagtggtgaaactcagggaccggctcccgacacggggtctcccttccgagactggcttgaggaccaggttctgtagatactgctttctgtgggttctgtgtgcgtggaggccctacgatccacactatttcattttcgtgataagacgctttcagtctggaagtaagacattagggggcagagctcagtagtttgaaaaagagaaaatgtagagttaataaggtaagacggtgagagatgggagaggctcagaacatagcaagatgtcagtctccacaacaccctctaaaagtttcccctgaaatgcccgctgtacaggcaggtaaactgaggctggcatctttctcagggtggcccagaccaccagagagacagcatcacagctgaaaagcacagtgccgccctccggcttccagcctggcctgcagcctgaccatgcctcctgctctggtttcccgggggaggccctcagggcccctctgcctgcagctctgagattagggcctcagtgcaggctgctcggggaccatgcatggcccaggtgactgcaggggggagacaggggtaccccagggcagggattgcactcaccttggacgacatcttgcactttctaaaccatttcgtggtctccgctctctctctcttacagaatacaaggtaagcggggccgctcccacactgacctccgtgccgcgccacacctgcccaggttaaaagtcctttctgttgtgctttacctatgaaatgtgtgtgtcaggtgcagacgcaagtatgtattctcggtgaccttctgctcagttctttggtgccagcatacacttgcttcgtgaggtgaccctgtggtttcctcccccaacagatctatccgtatgactccctcatcgtcacaaaccgaattcgcgtgaaactgcccaaagacgtggaccggacgagactggaggtaagcgggggactgccggggcaggggactc

SEQ ID NO: 31607 - DNA, 2300 bp, Homo sapien
agacagagttttactcttgtcattcaggctagagtgcagtggcgcaatctcggctcactgcaacctccacctcctgggttcaagccattctcctgcttcagcctcccaagtagctgggattacaggcgtgagccaccacgcctggctgatttttgtatttttggtagagatagaatgtcaccatgttggcaggctggtctcgaactcccgacctcaggtgatctgcctacctcagcctcccaaaatgccggggttacaggcgtgagccaccatgcccaaccttttgtcatttgtagccattcctaattcttgtatttcagttatctgttgtaaatgttgcctgcttatctatttagggtctttgtgccttctgtgcgggtggatcacataaggctgcagatgttctgtctgtcctataagtattttcctgggtggcgatcatatctgatatttacagccagtgatgcatcccagggacgacgtcctgcctggccctctcctctctccccttctcctggggccgtggcctctccctccctcacccctccccttgctcagcccttgctggcacaccccaccctgtaggaggtggtgagggctctggaggagcctgcaggataggatggagcctggcctgatgcactgcctggcagtccaaagccacgtttccgttctccgcgaagaacagcccagaccttccacactgtcctggactgcgctccctgcccacacagcggccttgtcttctgcttgacaaagagttggcagccagacctcagcgaggacggcctgggtggctcactctctatgagaccccatttctatcctgactctctcccttgccctgctgcttcccgcacaccacccccacccctaccacgcctgtgcctgggtccagccgctctggccatcgccccctctgccgtgcttgatcctgtctcctcccatcttccccaccttacctgccagggcttcccctccagtggcgttttagagagtgttcatctctcccgttaaaaacagcagcctggtatggaagtccccactgcagagactcagcctctcctctcccttcgcaccggccccactgcctctcagagaccctctctgtgctcctccacctgtactctccctgctcttctgcagatccgggggctttgtgtgcaggaaaccctaaggcctttaagcctcctcttaccgacccctccctacttccccaggggccttgcagggcctgcgttccccactcaggtgctgtccctgaccctgctcctcttatgcgctggtggctctgatgctcagccaggccaacaccacatgcaggcactctccctccgccacatacacactgcctcccaccactcacctgggcgtccagctggatccacccacgtgcccggccatcagccactgagagtcggtggcagagccagactggagcccggggtgcgcaggtttcccccaaccctttgtcttctcctggtgcacagatgcaggtttgcatttttggcttaatagcatagccacgttggaacatctggtggcctaaagtggggtgtatcttgggtgcagtcagctgcggctgttgctgctgctggtgcaggagcctcacctgccccgcgtttctgacacccatgggcagcagcccccacaccagagaggccctggcctggggtcgggggcagaccccacccaaactggggctgctctgcctcaggcacgctccgcactgggcgagcaaagtgggtttcatcaggcagccccccctccccttgatggattgggaggcaagcgtcccatgtctgcaatgtaagcatccctgatatttaatgccaaatacagaatttggggtgcgccctggttcatcgggaaggaaccatcctaattcgaggaacaggagcaaaacaggtctgggttttttcctcctcctctgctgtggaggagaaagggcctcctggggaagattaatgcttttgttttcgcctctgccggggaggcgagtctgtggcggcgtggctgagtcggcgggctctgcacagctctgagcatcctccccgggtgcaaggtgggaactgcgggcggggacaagcctggctccgcagaaggggagctgccgccgccgcggtggcactgcctgatgctcggcccagtgtgccggtgccccgctgggtgacagtggactcccagggcgcagcaggagcaggtgacagactgttggctgaaggtgagggtgtccaccctcgcaggcacacgttccagggagcacggcactcaagcagggccgtcagactgggctctgg

SEQ ID NO: 31608 - DNA, 2300 bp, Homo sapien
tttcttgtctatcttcttcactaggactagaaagcccagcacactgaaggtgtttgagaatcctaaggggtatgtatgcactgtgagttgaaggatatagaaactgaggcacacagagggcaagcaagttgcctgaggtcacacctggcctgtagtaccatggacagagaaccaagtctgtttcaatcgattcaattcaaccagcagattcgctgaagtcccagttcagcagacacggagcaggaaggaaagaaaagacctggctcaagccccaccctgtcactaacttgctgggtgacttgaggcagtatgtctttgggccttggtttctgcccttgtgaaagaagatgttggaaccacatggccccgaggcccttccaggttgagaactgttaaggctccccagccccttgtcctgggctctggaaccagtctggaatggggcacccacatccaccctctggctcacagggtcttggcagagaggtgtgagggctccctgccgtcctcaccaggctgtgtgggggaaatcatggcacccctgggaggttctcaggagcctttggaaacagagggaggaaacagaggctgcgggggagcctgaccgagagctccttagagggcaagtggcagcagggtgtacctacggcaggtgggtgcctggcctacctctcaggctatgatccaggagtgccaggtgccagcactctcccctcccctctatccttctctccgtttattcaacagatatttgcagactgcctgctctgtgccaggccctatgttagccacagagaataataatagcaaagcaaagacatttattgatctcaactcacactgggtcatggcacacattagttcactgatccttagatctggcgccccctcaattacatggcacaagatcccagtggactggcatgggaaccctgcggctgcgggcagaatcacctagctgggcctcctggatttctagggtgtgtggggcttggctggttccccaggacttcagctcccccactgagccactgtactcctggcctcccatcctggcccctcttgggggagatggctgctgctgagggagggggaggagtacctgctcctgcctcagtgttccattcagtctacattttctgtgcccaatcttcttccacttgttgaaagcatctccaaacagccctggcccaagccaaaagtccttggcctctctctccatgccaggttcccgcgattctgcatcctaaatgctcctccagcccaggccctccgcgcctggtgggcatccttgtgtttgccggctcctcccgacctctctgcagctcgccttttgtcgcaccaggcacacagtggggacccctgctcctccccgttccctgactccctctcctgcacccgcgtccaggccctgtgctgggcgcctgatgtcacagggtagccggtcaccgtggaggctggggccggggactgcgccgaagtgagccgcgccacctctcccggtgcaccccccagctgggcgccagccggcgaggagcgacgggagcctggggtgggtggcgaggcgcggacagcccaagcccggaggcaggaaacctgcgcacgaatccccaccagtgcaagcctcgccgacggatgcgggctaatcctgcccgagcaccgcccccgcctcagtttccctctctgtaaactggtaaagaagagttggcccagaaggtcttcaggcgccttgtagctcgactactcaagaagagctgcaccaagctcgcttttccctgcgccgctctcctagcgactcccggattccgtgagcggcagtccccacgtcgcccctcaggccgtggcgacagctctgcagagatctaagaacgattgcgaaaggcctcagccgccgtcgcccgtctgcgcctgcgctggccgcgaagcgtgctgggacttgtagtccgatcgccccgcagctggggagccaggcggagcggtggcgtcgaggtgcctacacttcccagggtgctcccgggcggcagcgggggcgcggggcggggccgccaggaggggcgtgagagtgggcgtggcacgggcgtggcctgcgcgccgtggggctgcggcggcgctgcctggcgtgtgcgcaaggagcgggcgcggagccggcgggcgggcggaggatagcgcgggcgcggcacctgcgggcccgagggtctggctgtcgcagcgccgggccgccccgactccgagcggctgctgagatgagtgcaggtgggtgctggggaccgagggaccaacgggtccccgcgctggctcgc

SEQ ID NO: 31609 - DNA, 2300 bp, Homo sapien
cggagcatacctggagccccagaggctggagcaggcaggaagaggcctcccctggagcttctggagggagcatggcccttccgacagcttgattttggacttttggcctccagaactgtaagagatgacatttctgctgtctggagaccccagtttgtggcacacagttgtggcagccccatgaaactgatagagtgactgcccctcgacgaggccagagagaacaccatcttcctcctcagacgcagccggggctggggagccgtgtccccgcagggaagaagagctggtctgggagctgcggcccctctgcctgtgggtcagactttcagattgctgccactggggattctctcaaagtgtcctttggtgcctctgaaccctccaacccaccgtgtgctcactgagcatgttgatggcatggaaggtggggcctggccaggccgggccggggagcctggaggctgggcccctaaggggcttgggcctcacctgggccatcctcgagttcttttcagggcagcgaggggcatgcctagggcatctgcagctgcacccccgatcccgggccctggcctcagtggggcggagggagggtgtgacttgagggctcaccgtgcaggatgcagggacttgaggtaagcgtcagcccctgggcagagcctgtgattagagaaaggtgaacaggacgggagggcgaggatgaaggacgcaggtgtgggctggaggggctttgacctgagtagctcacctgggctgggagttctcagcctggggtgacttcacccccaggggatcaatatctgagctatgtttggctgctatgattagaggagggggctactggcatccagtgggtggaggccagggaccagctaaaaccctccagtgcacaggacagccccccgccctgcaacaaagaaggatgcggccccaaatgtcggtagtgccttggttgaaaagcccagccctaaagccttcagaaccagtcagacctggttccagtcttatcttcttgttggtcactggccttgggcatgtcacattacctccctgagccttagttttcctgtctgtgagatggatacataactatttgacttagggattattcttggttttctcaaaccaggtgtgtgtaaagctccgacctatcacagcacaggctggagggatccctcccattcccacttcctagagctgggccggagcccgcagcccacacccaccacgtgggtgctcacactcctgtgttggcaagggcatcagagcaggcagacaggcgggaccaacagggcaatttgagttcagttctgcctcttgtcccagctgacgtgagcccaggccaggcttcctcagcaggcaggggcgagattacgtgctttggccttgggtctgcctggctgggaaggtttctgctctcaaacctggctcaggcctggagacggtgggagggtaaagaggtagacccgttgggacaggccaggctagcaaggagagcttgcggtgaggaggaggggagcccatctcttcccctaaatgttcccattgatggagccagtggcccggagggcacccgggcagagacggaagaaattgcacgtgagcgtttgtgtgcatacgtgtgcctgtccatgtgtgcacacacttgtgcttgtgagtctctgtgtgcccatgcatatgtatgtgtgtctgcatgcacatgcgtgtgtgtgtgcatgcatgtatgtgtgcaggcatgcgtgtgtgtgtgtgtgcagtaaatggaagaggaacagagatcagagctgaggctggcagggctgaggcagccggtggctggtggacttccccaatcccagcctggcgggggactgggtgcccctagcctctactacagagcctgggggctgggcagcgggcaggcaggacagggcctggacctcgtccaggaaagagctaatgatcaaccggctgcggtgtctgtgcagccgccctgggcctgcctctccgtcaccggccctcaggcgcagggaggaagtagggcaggaagcagggggcggaggccgctgtgcagtcagcctggctgtgggcggcccctgcctgctccgtccagctggagacagccccgtggggccagccagcgctgggccaggagcggccacctggttcctgcgtgctacggccctgtgggcctgggagctgcctctgaggaacacgccgcaggtatggggggctccggggcaggcggggcgtggactggccgagcaggctgctgtctgccagtcttgccatggttggatctttacactttcttgagg

SEQ ID NO: 31610 - DNA, 2300 bp, Homo sapien
cctggcctgcaggggacatgagtccacttgtccccaccactccacaggacaggcactcaccccgaaagaaacaggctgggagctaggcagtggtccaaggcctttataggggtggggcaaggttgagatctaaacccggggcttgggctccccaggagctcactgcccaggccttcggggtcaggtgtgtgggttggaggctggcaggtggagtacagtgccccacagacttcccagcccaggtcagaccaactgcccaacctccgtctgcccctccagacctgaccctgcagctgctggctgtgcggaggaagagcagactgcgggaccccggcctacagcagaccctccggggccagctccgcctgctggagaatgatagccgggagatggcccgcgtgcttggggtgagtagccctctggggcctgctcagggatgggagctggagtcagggggagggaggggctgaggtgcagtgtctgagactggggacacaggaggcaggcctcagagagcgagagccactcaggacagtggtggccttggaggggcggctgtgatacccagtgggtggcgagggcttgtttctcccacttgctttgtggagggcactgtgatcgtccctctgctctcccacagccccagcaacaggggacctcgagctgtccctttctccacctgccctccacccacaaggactgtcaaagtctctttgatggggagttaaggacaagtgtgaagttagtcttattttttctggtgacaaagccagcctcctgtgggcttctgcacataccagccttctggggaggctggcacagggtgtgtcttgacctggcagacctccccatggctgagggctgggggcttgggagctgggctgggcgttaccaccactgactggggttggaccagcctggccttggccggtgcctcttagcctctgtgaactccgcttcctcagccacatactggggatgcttagaattacgtccccgggagctgacttgagggttatgtgattaactcacaccaagcacctgcaggctgctggacacatagtacctgctcaacacgtggggctgtcgtgcatgatgtcgggcacaggtgaactgggtcagcatgctggctccgggtttgaatctcagctgagccactgacaggtcagaccttgaataagaaatggggccttcagcgggacatggtggctcacacctgtaatcctagcactttgggcgaacgacgaagaaggatcacttgagcccaggagtttaagaccagcttcagcaacatagggagacctcgtctctacaaaaaaatttaaaaagttagccaggcgtgatggtgtgcacctgtgggagagtaaaatgggtggattatctgagcccaggaggttgaggctgcaatgaaccatggttatgccactgcactccagcctgggcagcagagtggggcctcatctctggaaaaaaaaaaaaaaagaaagaaacggggccttattttttgtctctgaaatggagactctaatagtaccccccgacacacacttcccgagtcggaagagttccagtgttagctgctgttattttttcatgcccctatcaacactgattaatagaaatcagaggagaggggatgctggcggggggatggaaatcagagctgatgctgcaggtggggctggggccactcagggctgagagcacagccgaacagggaccagcttaggtcgggagaagcggcggtcactggtgtgtgggggataaggcaggtagagtgctgagggggaggtgtagagggtgaggagccagggcatgggggccacgtgagctctgggaagggcaggggcttctccccacaggctctggggagccacggctggcttgagagcaggggaggagctgacttgggctgtgaaggaatctgccctgggtgtgtcgtcccccgccggggccacatctgcaagatgtctctgtcatgtggacgctgtcctcctgacagatgccccagagctcctggggacctctcgaattcctatttctttctcttaaggaattatcagccaggctgctgtccatccacagtgaccaggaccggatcgtggtgacgtttaagacttttgaagaaatctggaagttttccacctaccatgctctcggtaaagaggtgaccctcccagaattggtcatggggacgcccgtcggaaggtgctggttacacaccgtgcacttagattacaaactggtgctttgtttatttatttattgatgtattgttttaagacgaagtcttgctctgt

SEQ ID NO: 31611 - DNA, 2300 bp, Homo sapien
tgcaagacctgcccaggctgcccccaggagccagcgtcctggggtctctgtgcggcatccagcgacgtgagcttgcaggaccccgaggagccctccttctgcttggaagccgaggatgactgggaggacccagaggccctgagctcactgctgctgttcctgaacgcccctgggtacaaggccagcttccgtggcctgtacgatgtggcgctgccgtggctgagcagcgtgttccgcagcttcagcgacgaggaggagctgactgggcgcctggcacaggcccggggggcggccaagaaagctggcctcctcatggccctggccaggctctgcttcctcctggggcggctgtgcagcaggaggctcaagctgtcccaggcccgggtgtactttgaggaagcgctgggggccctggagggcagcttcggggacctgttcctagtggtggctgtgtacgccaacctggccagcatttaccggaagcagaagaaccgggagaagtgtgcacaggtggtgcccaaagccatggccctgctcctggggacgcctgaccacatctgcagcaccgaggcggagggggagctcctgcagctggcgctgcggcgggcggtgggtggccagagcctgcaggccgaggcccgggcctgcttcctgctggccaggcaccacgtgcacctcaagcagcccgaggaggccctgcccttcctagagcggctgctgcttttgcacagggactcgggagccccagaggccgcgtggctctcagactgctacctactcctggctgacatctacagccgcaagtgcctgccccacctggtgctgagctgtgtcaaggtggcctcattgcggacacggggctcgctggccggctcgctgaggagtgtgaacctggtgctccagaacgccccccagccccacagcctccctgcccaaacttcccactacctcaggcaagcgctggcctccctgaccccgggcacaggccaggcgctgcgcggccccctctacaccagcttggcccagctgtacagccaccatggctgccacggcccggccatcaccttcatgacgcaggcagtggaagccagtgctattgccggagtccgtgccatcgtggaccacctggtggccctggcctggctgcacgtgcttcatgggcagagcccggtggccctggacatcctgcagtctgtccgggatgcagtggtggccagcgaggaccaggagggcgtgattgccaacatggtggccgtggctctgaagaggacgggccggacgaggcaggcagctgagagctactaccgcgccctgcgggtggctcgggacctgggccagcaaaggaaccaggcagtggggctggccaacttcggggccctgtgcctgcatgcgggtgccagcaggctggcccagcactacctcctggaggccgtgcggctgttctcgaggctgccccttggggagtgtggccgggacttcacccacgtgctcctgcagctgggccatctctgcacccgccagggcccggcccagcagggcaagggctactacgagtgggcccttctggtcgccgtggagatgggccacgtggagagtgagtgccccagttccttctgtgtgccttccggggccactcgggtcagggcacacctggggtttgtgattcagacacaagcggtggtttttccaccatcgaaagtgctgagtcatggcaaacagcagatgttggcaagcgccctggagacaggcagttcccacgcagggccaggccctctctgccctactgggggagccagctcctcccggtttgcccagggaccatcctgccttgagcactgaaagtcctgcatgctgggaatccctgaagtctgggcaacgggcggtgggtcaccctagacataaccctggaagcgaggcaggctccgctgagctgggacttggggcccctccatgagccaggccctgaacgccggtgcttgtgcccatgttatctgcttgacatctcggcagccctgtgcacctgtcatcccacttcacagaggacgcaggggcgggtggttacccaaagccgcagaaaagtttatgcaaaagcagctcgttgtgcagagtgtgccacgtcccacccacaaatggggcttgtggggtccttgggtggcaggggctgagcatgggaaagtgagcttcaggccagagaagccacaaaagggtgagtggtgtgatggcggggcagctcttggccccgggttagggaagcctctttagtctggggccagagggttgagaagatttagtcaagtaat

SEQ ID NO: 31612 - DNA, 2300 bp, Homo sapien
ctgcttgacatctcggcagccctgtgcacctgtcatcccacttcacagaggacgcaggggcgggtggttacccaaagccgcagaaaagtttatgcaaaagcagctcgttgtgcagagtgtgccacgtcccacccacaaatggggcttgtggggtccttgggtggcaggggctgagcatgggaaagtgagcttcaggccagagaagccacaaaagggtgagtggtgtgatggcggggcagctcttggccccgggttagggaagcctctttagtctggggccagagggttgagaagatttagtcaagtaatacgtggtgggtgaggggctggtggtgtagcctgtgtgaaggcccaggggtgagcgagtaggggtgagtgagtgggggtgtgatgggggtgagtgagcagggggtgagtgagtgggggtgtgatgggggtgagcagggggtgagtgagcgggggtgtgagcgggtgagcggggatgagtggggtgtaagtgggggtgagtgagcagggcctatgcagggaggtgcagagttgggcgtgggttggttgggtgctggatggtgagaagctctgctggagagctaagcagggcctggggcctcaggctgtggcttggccttttccctaagggcactggggagccatctgcccaaggaggagtgggggggttcagacccaggcttcttccccagggccattctctgactgcaaggagaccctccagaaacccggcaccccagcccccacagcagcctccggtgggtcctggcacaatagcctgtggcacctcctacgaggccctccccggggtgctgggggattcagacttggaaacgcaggccagggaacgaggatcatgcttccctgtctccccaccccgcgttgaacagtcgaggagaccgggggccaggggacgaggatcatgcttccctgtctccccaccccgcgttgaacagtcgaggagaccgggggccaggggacgaggatcatgcttccctgtctccccaccccgcgttgaacagtcgagaagaccgagggtggggctgataccccacatgcttacttgtggtcatttttgagtcacttttggtagtttgtgtctttctaggagtttggctgttgcgtctagatgatctgatttgttggcatacaattgttcgtagtgttctcatggaatccttttatttctgtcaggtcagcaataatgttccctctttcatttctgattttagaaacttgggtttttaatttttaatttatttatttttattagagatggggtctcgtcatgttcccccaggctggtcttgaatgctggcctcaagcgatcctcccacctcggcctcacaaagtgctgggatgacaggcgtgagccatggtgctcggtctctgattttagtcatttgtgtcccatctttcttttcttggtcagtctggtgaaagatttgtcaattttgttaatatttttgaaaaacccacctttgggtctgttgattagctcttttgtttttccattctctgtatttttacttcccatttccactctcatgtttattattttcttccttttactcgctttgggtttagttcattcttctttttctagtttcttaaggtggaaggttgggtttttgatttgagatttttcttctttctttgcatgtagacatttagagttacacatttccctttcagcactgccttagctgcatcttggaatttttgatatgctgtgcttttttttttttttttttagacagagttttgctctgttgctcaggctggagtgcagtggtgcaatctcggctcactgcaacctctacccgggttcaagccattctcctgcctcggcctcctgagtagctgggattacagacatgcaccaccacacccggctaatttttgtatttttttgtagagacgggggtttcaccatgtttcccaggctagtctcaaactcctggactcaagcgatcctcccgcctcggcctcccgcagtgctgggatgacaggcatgagccattgctctggcccgtgctgtgcgtttgttttcattcttctcaaattagttttcagtttccctgatggtctcttctttcactcactggttgtttaggagtgtgtcatttccacatatttttgactttcccaaatttccttcactgttgatgtccagtttcacgccagtacaactgaagaacactcctgctttggtctcagtccttttccattcactgaggctcattgtggggcctggcacgtggcctgtcttggggaatgtcccatgggcgctt

SEQ ID NO: 31613 - DNA, 2300 bp, Homo sapien
tgcactcccccagccctgttctaaggatcctaacgcccacctctcaggcgcttcgtgaagactgagtcaagtgtatgcagagcgctccagcagcctcagggcctacacatcggtagctgtggttccttggaagctgtggcaggctgtgcaaactctgacctgctgcagcgccggtcctggactctctcagagactcagtttccccattgtagaggaaaagcttaggggaaatgagctcttgggcccttcccagggacttagttttctgcgcactgaaggatccagggatggaaaagtgttgatcttcagggccaggtgtctgcaggaaaacacaggccccccaaaaagccagctctgggccacagtagcccaccaaggcttactcgaggggcaggcatcctgggcacgtgaaaaattctccttgcgccttaggcaagcccaccctgcagagacatgaaccgggagccctggccaaggttgagggaggttcagcccagccctgaggtccccaactcctagcattctgggtcattccaaaaaatggcctgaaattctccacatcttcaaagtaaagtgcacttgaggtttgtagaggcagaaacgcaggtgctattgccccttgtcaaagggccttttagggggagaagctccaggtcccttctctccccgtcccctgggacccttcaacctttcactctctctgggtcctatgggggctcacacttggcgccccgcctcctcccacctcatcctccccagacatcttgtctgatggggccgctccctactcaacgcctccccaggcctttgaggacccagggccctcagggatcaggcccctccaccttcccattccccgaggccctttaacctccagctccccctccctcctctggaccagaggtacccctccccattcttaacttgggtatctgtgaacctggatggaaaaacgtctttatttaccccaacaactccaactgaagtccagcattcattcctttgggggtgcagttgaccccagccagcagggcctgtggctccacggccagcagaagcagtgtttacatccccatgttaccgccctcaccgaaggtgtctccagtggcagccctctgcacagggctgctgcgaagtgtccactggtatcagacgacagaccgaccagaacctgccattaacatgctgataaagaagcccataggccacgctgtcatgaattgtttcatgtattttgataactgtgttttgatagaattgttcccctttgtgaccccatggtctttgttttatgcgtttaaatctacttgacgacatcgttctgaaaaggacacccaggcttcgccaggcagcccagggtactaggaacacacacagtgtgaagaccgcagctccaggctgtgcgcgcggcgttatctcctgctgccccgacctgcttttgcttgggagcctctgcccaggtcacggccagctcccgcttcccatccttcctcttcaggcttgacattcacctccaaggggggttctgccttctctcacaactccgcagccttcaccccatcagctgacgcactgtcaccagattctgactctcgtgatgggacctgggtctgaaggggccctgcagaaaatgcaggagcaatgatgagaatggaaacagcttccggttccgtggacagcgaggactcgggaacactgctcagccatggcctctgtggttcttccaacgaccctatgaggttgagaaatgctgtcaattcccctttcctggaggaggaaactgaggcacagaggagactggacacggacagacccctccagagcggggagaacgcatcccccaacgtttctgggataggctgggcccgggggtccccaccagaaaggacccctgcgtgtctgtagcctcgggttttctcgaccaggccgaccagagtcccaaggcctgccgggtgggtccaggcccggaaggccaggcggggccctgtcggggcctgggcggggctggcggaggggccgggccgccccttccagcgagggcgggctgggcggtcgcctttaaaggcgcgggacccgccgcccgcggaccgtcaggctggagggagctggtccctgcgctccctgcgccctggggatgcccctgccgccctgacgcccgccagcctgagccaccggcgcatgtgaccgcgcgtccgccccagtcccatccgtaggcgcccggcgcccggccccgcagcggcctcgttgtccccgccggcccccgcccggtctcccgcgctgccacccgccgccggccctgc

SEQ ID NO: 31614 - DNA, 2300 bp, Homo sapien
agggaccttactgagaggggcctctaaccccctaaatctgagaagggactctaaccctcctgagttgggcctctaacccaaggttgagcaagcgtccttacctttccttaagaggggcctctaacccactgtgtcttaggacagactctaactcccctacgttgggcctctaacccaatcccatcctttacccaggtaccccaccacttattcaaagtcggccaaccagtggtgcagtctacttcttttgggttgaggggtctcctcagtatcgtcccttccatgattcaccagaaagacgttaccagaccctaccacttacccaaagttactctttgggtctggggtttccacactatagtcacttctgtggtcgccagaaagatgttacaggaccccatcacttaaccaaagtaaacctttgagtcaagggtttccacactatggttctttccatggtcaccagaaagatgttacaggaaaggggtcccaatccagaccccgagagagggttcttggatctcacgcaagaaagaattcagtgcaagttcatgaagtgaaagcaaatttattaagaaagtaaaggaataaaaaaagggctacccatagacaaagcagccctgagggctgctggttgcccatttttatggttatttcttgatgatatgctaatcagggtgtggattattcatgtctcccctttttagaccatatagggtagcatcctgacgttgccatggcacctgcaaactgtcatggtgctggtgggagtgtagcagtgaggatgaccagaggtcactcttgtggccatcttggttttggtgggatttagccagcttccttattgcagcctgttttatcagcaaggtctttaagacctgtatcttgtgctgacctcctatctcatcctgtgacttagactacctaaccatcggggaatgcagcccagtaggtctcagcctcattttacccagctcatattcaagatggagttgctctggttcacacgtctctgacaggtagattcaaaaatttcctgattggcaatgggttgaaagagttaagctttgtctaaaaagttgaactcagcttgagttaaggtgggggcgggggtggttgtggaagccaaggtttttgttatgttgatgaagcctccggatggcaggcttcagagagaatagatgtgcatgtctcttataggcccttaaaaggtgtcagagtctccagaaaaagcctaataagggaagcagattctctgcagaatgcacatttcccccatgagagacagctttgcaagggccatttcaacatatgtcaaggaaatatattttgaggtaaaatactttgattccttcggggctactatgtgtcatgtgatgctataccggagtcccgttgaattgggtatcttattgctacagagagtctgttttgtcagtctaggatctctgtttttattttaatgttggtcagttgtgtctaaattccagagcggggcaggtataatggggcatcccgagccctccttcccattcatggcctgaactggtttttcaggtttctttgggtcccggtggctgcaaggggatgcactcagttggctgggggacttagaattttagttttggtttacagcaggatttgatgggcatgcatatttatcaatgtgaaagtgttgtctgtgggcggcggagggcttgggccgtgtccaggccacgcactgcaagggtgcagcccccacacacggtccctgctcctaaagctgttgcccccactgcaagagtggagtaggttgaggtgtagccatgacattctggaaactacattttttgtaatagtcattttgaaaataaaacatttgaaaatactgtgcagcaaaaacttgaataattggaataaaaatgttcagtttaatgtcattgcttgctgccaccgttttctgattgtaaaactaacgtgattattaggtactattttggtaatgtagaaaactttaaagatgaaaatagatatcacttataactccacatggagaaatagttgcccctccaatttaattgatttacttttgggccacaggggcccagaatttgattcattgtactccttggttcatgccagtgttcctgcacccagcactgaagctgaacattgacagtgatttgcccctgccccagagtcctccctgcattcccctcgagggcccccgtctcctggccctggtgtccacttttctctcagctgctgggaacgtgttagtgtgcactgttctcctttccctcacctgctggcttcatgtt

SEQ ID NO: 31615 - DNA, 2300 bp, Homo sapien
atcgagaccatcctggctaacatggtgaaaccctgtctctactaaaaaaaaaaaaacacaaaaaaattagctgggcgtggtggcgggtagctgtagtcccagctactcgggaggctgaggcaggagaattgtgtgaacctgggaggtggagtttgcagtgagccgagatcacaccactgcactccagccttggcaacagagcgagactccatctcaaaaaaaaaaaaaaaatcagcatatatatatattcgaaaaaatatatataaatatatatatacaaatatatgtaaatatatagaaatatatacacgtaaatatatatatttacatatatatgtaaaaaaatatatgtaaatatatatataaatatatatatagtgaatacttcgtttgtaaagcaagcccagggtaacatcaagcagaagctacaggcatgaatatcacccagtctataaaagtggccaccaaggcgtatgttagctgtgaccaaggaacaaaacaggaaagagcaaaagcaacaagtgcggcagctaggcacgccaagggttaaattcctctccccggctcagctctatctagaaaaaaagaggaggctagagaccggtgccaagagaagagcaaaacaaaaagaaagactcacagtaagtgtaaaaaagagaatcagaagaaaatgggagagacagcagtgcgcgggggcagggcctgtgccactgcctggccccgccaggtggccatagaagcaggagaactcaggaaggaaaaagaaaaacaaagacttaaggaaaaaggccaatctgttagcaacagctcttataaaaagagagattagcaatgcgagaggacgtggacacggatgtagacgtggaagaagtcaagttaggcaaggattcgagagccggccaaggctagagagacattaatgtgtgagatgaaaaaagaaaggacactagaagggtgaatgttcagaaggcaataaaagaaatggccaaggctgcaagacaaagaggccattggccaagggctgccgcaccttggaggaaccaaatactgatctgatcaggctggcaggagctaaagaatgtaaagactagggcagactaggcaccttcttattaggctcccaggagcccattgtcacattagaagttaaaagcagcaggattctgccatatctggattccaatttctcactgatggctaagccactagatagagttacaaaggggggaaagaaaaagaacccctcctctaagaaacttaaacaggaaaaagagccataccttgtgaaaacttgcttatagactttacagaactgcctcatgctggaggctatcggtacatgctagtgcttgtttgcacctttccagggtaagttaaagttttccccaccaggacagaaaaagtacaagaagtgactaaagtattgttaaaagacattatccccaggtttagactgcctctaactttaaagtcagacaataggccagcatttgtagctgaaatagggcaggatttaacaagactgttaaaaataaaatggaagttacacacagcctattggctgcaaagttcaagaaaaagtggagtgcatgaactggacactcgagcagctactgaaaaaaatattgccaggaaattcatttaagataaaatcaggcttttgcctatggtcctccttcaagtcagctgcaccctcaccaaacaaactaggtatttaccctataagattttgttcggtcggccacccccaaatcacaggtcaaattaaaggtgacctccaagaactaaaggaattaaccttaagaaagcaaatgcagattttagaaatagccatacaaagtgtttataattaaatacataaaaatgcctataagcctgacacccctttaaatctagtgactctgtttaagttaaaaagtaaaatctaatttttctaggacccatataggatgggccttatactgtaatcttttccactcccactgctgttaaaagttgcaggtgttgtgtcttagatccatcacagtcagctaacactggcagctcaggacaagtagaccagccagcaggacacagatcttcctacccggctgattcggagacgagaccaagctgttgctgaggacgacagccctgctctggtcactccggaggctgaccagtctacacacggctgaagcttgaagaaacaacaagcccggctctagtcacgcactggcagctgaatagtctacgcatggccgaagcttgaggacttgtcaagcaagtaaacgtagttaaaaatcttaagactaatagtt

SEQ ID NO: 31616 - DNA, 2300 bp, Homo sapien
tatataaggtgtccccattgtacacatactacttagtcaggaaacccagacccgtccagcccagcaacaattccgagtctttaagtcattctttaaacacataaaccagaagttacaagagcctcctcctttagcaaaacaaacaaacaacctatttgctcagctggctgaaaacattgccagcagcctagacgtttcttcatgttatgtttataaaaaggctaacatgagagaccaatggccttgagaagcaaaagatttaatgcctcaagattactttaactctttccccaagcagatgccaagttcaagcatttggctcttaaaaactcctattattaagaaatactgtgttgcttgctaggaaaaaagcttttaagacccagtaaaaaaactaacctgcttaggacatgacaaagttggcacatgtgcctgtactggtttaacacaggtttgatcctaggtctttatttaaaagatagtttccagctataagagaatttaaaaccctcactgcaagtgtattacataaaacactatcactctgtctcccaaagagactcaaagtaaaaataaaagcgagaactcccactaatttgtgaaaattctcaaaggaagggataaggagaccactactactcctgctgccctcctccctgccaccttgcctagttcataagacaggaggaaaagagagaaagcaaaaagttagaaagaaacaaaagtcagataaatagccagacaaccttggcaccaccacgtggccctaggagttaaaaaaaataataataataacatcaacccccgacctaaactacttgtgttatctgtaaattccagacattgtatgaaaaaagcattgcaaaactttctgttctgttagctgattcatgtagcccccagtcacgtttcccatgcttgctcaatttatcacgaccctttcacgtggacccttaaagtcgtaagcctttaaacaggccaagaatttcttttttggggagctcagctcttaagacgcaagtctgccgatgctcccggccgaataaacctctttcttctttaatccggtgtctgaggagttttgtctgtggcttgtcctgctacagtaggtgacagatgactttcatccctcatgggacaacgttacatcattcttatgaaacagccatggctgcactcagacttaggaaggcactggctgtaatgccagcactaaaagcaaaccagaacccaagtggagaaaagttagctttcataagaggactcatcttttacgttcacaaacttaggctccctgacttttatcggtaatcagtactgaggacaatgcgttccacacccgctggctggctgatgtttgattctgtaactataccacgcccagaattctctcaaaagggaataaaacacaggtcaaattcctcacccacacactccacagttcaacccctgccagggaaaccaaaagcaggaaaggatctccagcggcgccattctcatttccggtcccagcaccccgcctccatgacgtcaacgcgccgcgccaccgggctgcgtcatctcggcgcgccgctgccagggctgtacacctgctggctgccatggctgaggtgggccgtaccgggatcagctacccaggcgcgcttctcccacagggcttctgggctgcggtcgaagtgtggctggagaggccgcaggtggcaaacaaacggctttgcggcgcccgcctggaggcccgctggagcgccgccctgccctgcgcggaggcccgcggccccgggactagcgcaggctcggagcagaaggagcggggtccgggacccggccagggttcccccggagggggcccgggtcccaggtcgctatcaggacccgagcagggcacggcatgttgcgaacttgaggaggcccagggccagtgccagcaagaggaggcacagagggaagccgcctcagtgcccctgagggactccgggcaccccggccatgctgaaggaagggagggcgacttccccgccgcagatctggattcgctttgggaggatttctcccaaagtctcgcccgtggcaattcggagttgctggccttcctcaccagctccggggcgggatcgcagccagaggcgcagcgtgagctcgacgtggttctcagaaccgtcatcccgaaaactagcccacattgcccccttacaactcccaggagggaaatagtcgtgcaaggtaagagtgttttgatagtggacggatatgattagataaaaaagcattcatagaacctcgggtcaatgaaaaagtcctaa

SEQ ID NO: 31617 - DNA, 2300 bp, Homo sapien
tccaagtatgagaagaattcaaccccattgctggctctgagatgtaggaagctgcatgaaagaaccagaaagaagcctccagcaactgacagccagcaagggaacaaggaccccagtcctacataaaaaattggattctaccaacgaactgaatgagcctgagaacagattccttcccagaacctccaaataagagcccagccggcaggctgtttgattttggcctcgtgagagagacccacagcggagaaaccagcagagccaatggggattcctaacctacagaactgagacaatcaattttttgtactgaccaatgaatttgcagtaatttgttacagtggcaatacgaaacacatgctgctgaataaagtttcaggtaagagtggctgaggctgaagtgtcaaggtcacgggcagtaaaaataaatgccagagatttaacgaacgctgaggactagtaggttcccatccatccagtctctatgctctttcacagttatttgtctcagcataaatagctctctttatgttggggaaaaggcttatggcatgcctgtataaactggccataaaaatatgagacaataagttgtggaaagccacaagaggcctctgaggaggaaagccttcttattgtcatgatgttcccatgctctgggcgagacctactgtcttacctataaacactgtgttcaaggagaaagacactcctttgaatcactacaatgtggtcagacatgcaggctcctagttaagcacgctcccactggttattctccgacaagttaaagataacgctgtttgagcacaaaggagattcatttaaaccgccactgctatagatgacatgtatgatgcactgtctccctttcaccctttcgccccgaacgtccgcttcttagatctaagtgattgtactcaatagtgtggagaccagagctcccaggctttggcagcctccattttgcaattggccccctggcccccaatctttatgcactcttaacctgtctcgtctcattccttcgtcgccaccggactttgagtaccctacgggtggtgttgaggctggtccccaacacttttacacctacagctttacctgctaaactcctaggtattacgcaatatccagctagtccttcactgtctctttgaagccttccagacaccaccccaatcaattatcccatcttctgtactaaggacacacatttctatgcgcccactcaaaaaactatgaaacacctaacaacctccctaggacatcgcagaggaactagtacccttaggactttttcattgacccgaggttctatgaatgcttttttatctaatcatatccgtccactatcaaaacactcttaccttgcacgactatttccctcctgggagttgtaagggggcaatgtgggctagttttcgggatgacggttctgagaaccacgtcgagctcacgctgcgcctctggctgcgatcccgccccggagctggtgaggaaggccagcaactccgaattgccacgggcgagactttgggagaaatcctcccaaagcgaatccagatctgcggcggggaagtcgccctcccttccttcagcatggccggggtgcccggagtccctcaggggcactgaggcggcttccctctgtgcctcctcttgctggcactggccctgggcctcctcaagttcgcaacatgccgtgccctgctcgggtcctgatagcgacctgggacccgggccccctccgggggaaccctggccgggtcccggaccccgctccttctgctccgagcctgcgctagtcccggggccgcgggcctccgcgcagggcagggcggcgctccagcgggcctccaggcgggcgccgcaaagccgtttgtttgccacctgcggcctctccagccacacttcgaccgcagcccagaagccctgtgggagaagcgcgcctgggtagctgatcccggtacggcccacctcagccatggcagccagcaggtgtacagccctggcagcggcgcgccgagatgacgcagcccggtggcgcggcgcgttgacgtcatggaggcggggtgctgggaccggaaatgagaatggcgccgctggagatcctttcctgcttttggtttccctggcaggggttgaactgtggagtgtgtgggtgaggaatttgacctgtgttttattcccttttgagagaattctgggcgtggtatagttacagaatcaaacatcagccagccagcgggtgtggaacgcattgtcctcagtactgattaccgataaaagtcagggag

SEQ ID NO: 31618 - DNA, 2300 bp, Homo sapien
tgaggaacacgtgtcttccggccctggcctagaaccttctagccctttcctcagctggctcgctagctggctacatttggacatgccctctgatttaatcatcttggtttacttatctataagaatgtttagagtaggctgggtttggtggctcaagcctgtaattcccagcacttcgggaggccgaggcgggcagatcacttgaggtcaggagtttgagaccagcctggccaacatggtgaaaccctgtctctactaaaaatacaaaattagccaggcgtggtggcaggagcccatagttccagctactggggaggctgaggcaggagaattgcttgaacccaggaggcggaggttgcagtgaccagagattgcatcattgcactctagcctgggcggcaagagcaacactccatctcaaaaaaagaaaaaaaaaaaagaatgtttagtgtagatgatttcaagtttcctttcactcagagttttctttgaccagtttgtgtctaaattattcttgcgtagagtgaattaccacctgactttgttttgtttttctcttcacttagattctatgggaagaagaaagggctgagaggagactaactgccaggcagtcctttgtggacctgggatgtggaaatggcctcctggtccacatcctgagcagtgagggggtaaggcccggctccatcaccttttctggtaacttgtccagagtttcctcaagtcaggcacagggttcactgacatctttttctgctgatacagcctggatttggagtcagccagctatcagagtaggtagagacttataaatttctgttaatctgataaacaaacagctcctaaaacaagggaaacgtggtgatctcattggacctaagaggaagtccccgggccccggcatggacctataaaatgacaggctttgggtagcatggatgtttttttgctgtcagatttttcttttgaaacccaccatctcaaggagctggagggagataaaaagcaaggcaggttctgcacttgagaagcttcaggccaggcacggggctcacgcctgcaatcctaacacttgggtggccgaggcgggtggatcacttgagcccgggagtttgagaccagcctgggcaacatagtgaaaccccatctctgcaaaaaaaagaaaaacaaataagagaagcttcagttctggctcggacggccagtcatgtatacacagacaacagtatggaacagtgtggtgtgtggtactgggttttgcccttattttctggatgttcagctgatgcagtgaaagcactcttgggctgagagcggcacctgcccaggtagcacggtcagtaggggtgggtgtcttgtgcctggaacttcctgccagcaacttatacccctcctggtgcgtccagcgcgtcaggtgccattaccccatgatatgatggccagcttagccacttcctgctagggggcaacagctggaacctgcagcccaatattgatggttccaaactgattatcttcctgctatgctgtactgtacagtactgtactgataggctgcgcatatttgtctacacctgtaagagcttgaaatggttgttacaatgccctttttcaagtgtgttattaaagaatgagtttctaatcataatacctataagctggttgtgggggtggtagtgtatcaggtggcagcttggtagctggtacctggagacagctgggaggtgtctcgtgcacccctcctcttctgcaggcttggcagaaataagtttgccctatgagagccaatgagtgtggccaaggtgcaagaagagccagcagctgaccttgactgagagcagagaattggctcacgttctcaggtgtgctccctggggcactggccctggaaatgttcccacactaaaggccactgtggtcactcaactccatgtcccatcttgaactccatgtcccatcataatgaccattagcgcagtacaccttcttacctgccttgcaggggtgtgggtatctgttttagacagctgagaaattctggtgtcatccatgaatgctaatgacacacttgaaaaagggcactgtaacaaccattccaagctcttagaggcgtaggcaaatatgtgcaggccatcagtacagtactgtgcagtacagcagcaagaaaatcagcttggtaccaccagactgggctgcaggttccagctgttgctgctagcaggaagtggctaagctggccatcgtatcacagggtaatggcacctggtgcgctggacacatcaggatgggtatgagtt

SEQ ID NO: 31619 - DNA, 2300 bp, Homo sapien
ccatgcgatgtccccaggctggtctctctccccctatgctgtgcttgctgacgcctcagctccacttgctccacgcaggacagagcaagtcgggtagccgctggccggtcccctgttggctgggggtcattgtttggcgtcatctttagctgctgcaaactgaaagcatcctgagccacagagccagggtggggagtgggaagagtgagccctgccccacaggcggaggcctggactcctgtggccctcgccccacgggcctgggcaggcggaggtcctggtacccagttcccctgctccccaacgccctgtgactccaggactgccagggtatggggaggcaggagggccctccacccgcttgtccattcactcagcccgcaaagcaaggcagacacatccctggccttctggagccggtggtgcagtgagggaggggggagatgtagcaggtgctcacccaggtgccagtggtgtacacacttccatcatctgcagcttccaggtgtgcacagagggggcaggaacagggcagggagccatggtttaccagcgccagcggctggggagtttgccataacttgctttgtggcgctttttttttttttttcctctttctgtaagtattttaaagcaaattctagctagcatgctatttcacccctaagtacttccacgtgcatctttaagaatagtaggtgtcttcttgtgtcaccaccatgccctaagcacacatttctgtgagttgtgatgtgcagggagaactggcctggcccgagtgggctcaggagggctttacttaggaaatgacacttgagctgggcctggaaggaaaagaggagtcaggaacagagaacagctttaggcagagcgaacagcatttgcaaagagccagggttgggaggagtaagagtgggagctggtcgggttacagccgccatgaccaggaaaaggactgggcctctgatgggtagggatgacaccgaagtcacagtgggaaggagtggcctggcttacaccctagcttctgggtcccctgcccatgaagtagccgtggggatcaggtgcagtacagtgtctggctctctgggtgtgtgagagagcacaggtgtgtgtgccattcctcatgtgtacacaagagtgcaagcgtgtgggtttgtgcacacacacacactgcctttgtgtgcctgcctgctcctggagagctgaacttggctttcagctgaactggcctctctaggtgagagctgctgttgggtggggggccggtgagcatggttggagcctgtgtttctcggggcaggcgcagaagcgtgtccctgaggctgcccccagagtagacactgggcctgcagtgctggctgggctgggcctgctggctgggctgggcctgctgcctggagtctgctcttccttgcatagagctttaggcagttagaatacttcccacctccacggggcctctttctgtctttcccaacacttgtttttgttggtttcctgaaatactgtctttttcacccatgatgagtctgcttgtatgtcagtgtttttctgtgcaggtcaccctgggggggcaaacttgtttttggaaacgcttctgagtaggaggcctgggaattgggttccaaataaacattctcctccagtcatgcgaaaactatgctctgaagctgggtcttatctctgtatgaggtttaggttttgttttaagctaacgtggctagtctcagaaaatgtttatgagagtgaggaattggaaatgtttccagatggcttcaggtcagccagccctgagcatgacccatgagggccacaagggccagccctgcctctgtccctgccccttcctgaggccgccaaggggcggcgcgctgcatccatgctggctggtatggagcctggcaccgtgctgccgggtacacgcggggcctcatctcatcctgcactcatggcagagcaggcctttcctccttgaacatgtagacaagtctcagagaggtcagtgcgccggcccgatgtctcccagtgagtggagaggccacgccacagtccgggccaggtctgacccagcactggcacccctgagcctatggcatcatccgaggactgtaatcctcaacccgttcctcagagcaacttggtgaaagggagtgtctgtctgctgtcagaagcagtggtggagatggcggctcctgtgctgaggtagagtcccaggggatgcgcacggtaaggagggaggaggcggcaggaacttgggtggagcagactgtggctctgtggttccatttcaaaatgag

SEQ ID NO: 31620 - DNA, 2300 bp, Homo sapien
caggtcagggcatcaggccagaggcccctcactgtttgggatcatggggagttggggggaagctctggcccctggggctcctcctgagcaccctttagagggttccaggtccctcagtggccaggatgtgcccttctgtgctgcgccaggaggtgctgctgtggggacatgggcagagtgtcgcgggactgccttaacaggagacttcaggttaagaaacctcagctccaatgttgggaggcgagacagagaggcagccgtgggagggcaaacagggtcaggcctggccttggcggtgcttccagccaggctgtgagggtgagcccccaactgtggcgccgttctctgggctcatttctctagtttcaggggaaactgtaaaacatcagtctgtcaaaagcacacaggctcgttattgccacacacaaggtgatttgaaggcagaattcgagctttaattcctacactttcaagttctctttggaagtcggtgagccagacttcctcactgaggctcctttattcccccgagccttctgtcgtgagcggtttcctagcttccagcgagaaccaggaaggaggtggttgctttggccatgtttcacggggagttgttggattcccacaaggaaacggccaaatgggagcgtaggggggtatctcggcccaatttgggcggcggggtcaggaggcagcctagaggaggcctgcgaggcctgggacccaggtgacgagcgggcccacagcagccctctcctggccccaccccactctgatgtccctccagctccccagtttggagatcagccctggccattgggtcccagtggcactttcagagggggtatctaaactactgcacataggcaggtcccccttcgtgttcctgttccagagctcattggcctctgttactccacacttgcacctggaggggctccggttgggaggcgcatgtaaacccagtgcaccgggacggcaccaaggagcagaggctgccctgcaccagccccgtccttagactgcgtggagggacctgcgccttgcccctctttctgcccgtaatgctgacacagtcctcagaggtcggggctgcagcacagatgttttctcgtgtttcggctctcacaccgtggtccctccttcctccactcaagtgatccttctaaaatggtggctctgcaggacctgcctctcagccagagggaaggtcggtggcctcaatgatgaggccacaagggacccagctctgtcctctgccctcccctctggctgtccctcgaatgtggccagtcctggtgcagtctgtcctgggacactcgggtttgctgctgctttgcctaaaatgctcttcctgggtctgcgcagggctgccgctcacttcccgcagggctcaccttccccggccttgcctgaagacacatcccatacctcagtcactcccactggaggcagactcactgtgaccagcaggaactctaggctgtgttccggttgtatccctgaccctggattggcacctcccgtggcgtgggagctaaagagaggctggtgaattaaggaactttcaggtttacttctcagtgtgtcttctctgttccaaaccacagttgtgaatgggagagttcacatccgcgactggcgagaggagacactgtggaagacaaagcaaccggaagcgaaacagagactgctctctgaagcctgcaaaacccgcctctgctggttcttcatgcatcaccctgatggctgcgctctgtccacggactgctgcccgtttgcccatgggcctgcggagctgcggccaccccggaccaccccgaggaagaagatttcatgagctgcatccttgccagccgaggcctggttggggaggccaaaccaaggagagcttccccagcagtcgtcagtgctgtggtctctgctctggctgtgtttcagcccacctcctcccagctttctccacatcctcacagtgatgaaccgtatttcataaacatcacacgccagagaagccacagttactcggaagcccccagctgactgcctggcttgtttcagatgcagccgcttgaaacgtgcgcagcatcttcatatcataaagattgtgcacggatccttacaatgtctcctgggggagagcggctgaggctgccttgcacaggcccttcccagggcgctgtccgacgcctgccccaccatgtccacatctgtgaagaggatggggctcctcgagaagtaagaccgtatctgccagcgtttctcaccacactggagagcagctgctctggagcagggat

SEQ ID NO: 31621 - DNA, 2300 bp, Homo sapien
ttgctcttgcccctgtcacaacccaggcaccctggctgcacctgcaaactgcactccatggtggcagccctgccctgccagtgccagccccgtctgcctcaccaccccagtccctgagctccctggggctgaacgccacttctctggattctaaataggcccccgcagggtacctgttgctgtatctaccacttcccccagcctcctggtctgggtcctgctgattctggtcattactcaccttctgctctacccaccctcccctgcatgctgcccccagccgcagaggaatgccccctccatgtcccactccctccaccaacaacagctgatctgtcctttctcctggctgcgtgacctctcaggaagaggcggtgctacactgagggccctggcagcctctctaggtccctgtccctcacctttcaaaggagagataggacagaggtggcagaaactggctggagcaggcttctgtccgggtgctgctccggctgtgactcctcacccctcagagctgcatcttccatctgcgaacaggaggctgcagcccctgaggaggtggcatctctgcctgtgggaagtcaggtgcactgaggccagatgcagggagggtgctccaggctcaagggtgcaggaggagcctcctgccctgggaggccagcactcagccccagctctgccaccttgacctcccagcacctctgcagcccgggcatcctagtctgcaagacgtggtagggtggatggagatccccagggttcctccgtggccctggacaggcagccggtgtggggggcatgagtcacgccctgtgggggaaggggagcagcaaatgtgcctgccctccgctgcactagctgcactgtttcatgcccatgcaaccctaagagatgggagtcctcactgtcaccctctcattcagatgaggaagcagagacagagaggctgagacacttgctcaaggccactgatatggttgggctctgtgtccccacccaaatgtcatcttgaattgtaatctgcaggtgttgagggaagaacctggtgggaggtgattggatcacaggggcggtttcccccatgctgttctggtgatagtgagggagttctcatgaggtttgatggttttgtaaggggctcttcctccttcttgcacttctgtctcctgccaccatgtgagatgtgcctgcttccccttccaccatgattgtaagtttcctgaggactccccaaccatgtggaactgtgagtcaagtaaacatctttgctttataaattatccagccttgggtatttcttcacagcagtgtgaaaatggacgaatacacacagcaaatcacagcaccatagttggggacgagggctgtgtggccctgagtatgtgctcctgatgaggacatgggacaccagctagagaaggggcactccctgctctcatggggacattcacaaggagacctggtgctcagtgcaatgtctggggacctccttgagaccagggcacgtgggtgtcacaagctgctgaggggctgtgccctgctgacactgctgagggcgcttggagtgcagaaatattttcaacagaagtggagcagaagggatttctcctaaaccctctgttacccagaaaacggcatggactggaattccgcatttctttaacagtctgtttagccagatcctgactccaccaaaaacaaagaagccctcagccgcctgctggggtgggaggtagtgactgtccttccagcccgggcaccactccatgctcattgctgatttggcctcacttaacctttggtgctgggctctgccgcattccagggtccctgtgtgacctgggcagccccttcccccctcagcctggggtcctctcgggctgggaggtgatggctctgccccagggggagcgggccaagtgctacgtgtgcacttctctgtggaattctcacctcctgggccagcccctgggcggaaggaggctgctggccccgcgtggcctgccctgttggaggctccgccagagcccacgtctgcagtgcttggagccatttcttggcacaaatataaaaacaactccagctctgccgtgctccaagtgagaaatgctgcttggtgagctgggctggctgggctgctggccctcggtcagccgcctgcaacaggcagggccacgggaacctcatcagcagagcttcctggaggcagcgtgggtggaattgtggaattgtcatcagacaggcctgggatggagcttccccactggaacgcagctggctgtggacagggagtcagc

SEQ ID NO: 31622 - DNA, 2300 bp, Homo sapien
aggagtactgccttactttttaaagaagtggtgaaaatatttaatattttcatatactttttctttttggaagataaaaggattaggtccagcatttcaccctacagaggatttaaatttttcatcaggaatgagatttgagtgtaagaagatgaaacgatattatactgataagaccacagggttcaaaaccaccccctacaacccagggaaggggggcagccaggctggcaagatctgaggccagaagcactggggctttggggagagcagcaaacagaacagatctagacctatcaaggtgccctcaccagagtccagagatctcaccacacacattttctcattcatgcagttgtccagtacatccttgcagatgagcaaatggcctgcctttcataatacaggctggtggagcttccccatgctcatgtctcagaagagatgctctctgctcccctgcaagtggaattgtctccctttggagtagttgagaggtgacagaggctgctgtgagtggctagaccaaagtctccctgtgaagccacgtgatgactccaccgctccccagagctgcacatggtcgctcagaagccttggaggggttgggggaggcccctgctctcaagcccccactatcacaatcactttgtcccagctattcacctgcaaacttgcttgatctgcagaagctgcagagtggcccactcttcctggacatgtcaggaaaactttgacgtggctgctctagcttcagggaaggtctaatttggtgaaaatttgaaagcaggtttgtgggagtgccagggagaaatggggagagagaaagcctctgtatttgatggatggcaatggcttggagctggtgtgatggcctctctggatgacaaggacattggacttagagccagaaggactgaggtatgaatctcggcattcctggtttgtagttatggggacttggcagagacacttgaatgaaacttcctttgcccaggtataagacggaccccctaataaaggttgactgtgttctgatccttcactgcctgctgggatgtcctcagcattttgtgcatgttggccaatttaaccctaacagcaaccaccagaggcagatgctattgctggctattaatatccccatgtgacagatgagaatgtgaggcccaaggggtttaagtggggctatgaatatccccatgtgacagatgagaatgtgaggcccaaggcacagaaccaggggtgccccagcatgccagttgtgcacctgtggcttttcccttggccactttgcagcaccggcacgagagaggcccacagggtgagcctccacaccaccagccaccctttgtccctcagaaagggctggcagagcctgcaggtgagggtgggtgtggggaggggtgggcaatcgtctgcccttcatttctgtcatgttgtggctgtcactggggagaaaatgccaaaaagcttcctggaagaagcagcttccaggaggcttcaccatatccttgtcctgccaagtggccacgaatggattagaagattcccactgggtgagaaggctcagaagccaccacagaggatggcggaggtgggagaggcctcgcaccgcggggctccaggagccaggtgaaggacaggcatttctgtatggcacccagttctgggtgggtcctcccaaggtgcccccttctttgtctctccctctgttgcttttctctcctcttccctcttcttccccccacttcctcttcactttttcttcactttttcttcttcttctctttccttcccccatgcctttctcaaccttgtttccacttcttgtcgctcttcttgcttcaacaaacgtcgatgcagtcacagttcctgggctgaggctgggggatgggaggaagtcctgagggcagcccccgcccccttccccgccccgtcactccctctgccccgcctgcacagcttcttgccaattcattcccgcccctaccgcccctataagccaccaggtcgctccagtttggtgccagcgcctggagggagaggcgtggcgagggctgtgctgcctaggatccactgagtggctcttgctggcgtgtcagctgcgcgcgaaccagggctgggaggctcggctggaggtgtgaccagggcagggactgacctggcccggaacagaagcgcgcagagtcccatcctgccacgccacgaggagagaagaaggaaagatacagtgttaggaaagagacctccctcgcccctacgccccgcgcccctgcgcctcgcttcagcctcaggac

SEQ ID NO: 31623 - DNA, 2300 bp, Homo sapien
cttgctgaccctcgccctcctgcctcacctgggcacccatccgtagccaagcctccagaacccttcctggtccctgtcgaagcagtccttcctctcacccaccctccaccaagcagagccagctcctagaaatgcagctgagagcaggttgtgttcctgccagaagccctgagaagtccccaggctatggtctctgctcctgagcctggcattgctggccctttctgttctctgtcctcactgctccccactcctatctacgtggcctcgggctaaagtactgggtgccctagtctactggcctctccccagggggcctggatcctttctgggccttctcttggtacttcctcctcctctgcttagccaagtccttccacctgactgaggcagacacaaccctccctcctcaggtgctcatagccccagcacccttctctcaagggtccagccatagggtgggtaggaacagggtcagacccacttttatccccagcacccgctctgcagcaagtgctggggatgccggcatgcacacaccatgtccagctggggagcaggcttccaacgactgacaggctcctccggctgccatgctgaccctaccccaacctcatgagccccaaggtgggccgctcttttgagcggtgagtctgtgctcttttgatgacacaaagtggcttctctcctagaaacttgtcctgcagggcaccccccatgggaccacacacccggccccaggggctgtgctcttgcagacttggctctggccacacctgctggttcactggccccaccttgactgcacaggtgtggctgggtcctctccccgtggcctattgcccgctgggctggctggacagtgtctggggatttggtgtgatggggacgacttggatgcctcttttacccctgggaacgattaaccctgtcttgtgatttgcccctgatgaaccatttggtgggttgggccctcgtgggtgagacgctgtggattagaggctgtcccttccaacttaactgtggaagagagaagctggttccaggaaagatgaccaaattcttctccccgagtcttaaaaagtgacacaagctagcactcaatttcctcaaatctaaaatgccgttgattttaaactgtctgttttaggtaccactgggaaggaaaagcccagaatgagggctgtgctaggagacaccctcaacaggtgggccactcacggctgaacgctcagcgtccacgagaactaagcctgccacagcaggggacaacaaggaggcacggtgtccccaccccagctctcagggaggaggaggaaaaccctccctgggactgtgcactgccagctggggctcgggaaagcatggagtctgaattcgccctcagacctgggctggaaagctcagacagggaagtcaaagactgtggccccggaggctggccggggcagtcagagttgcttctggaaggacccagctgagtccaggcagagagagggcaaggttgagcaccaggcgccccagatcccggggggtattgaaatgggcatctttgagcagatgacctgcaggaagcagcacctgctgggtgccagcaatgagttggggccacagtgagtactgtctccattaccccagcctctgggcgaaggggcttgtcctaagtctcagggctggctgagtggcagctggctctggggactgctactggtgcactggtatagctggcaaaggaacccatgaggcacatggctcctaaaggtccagccacccagcaaagccccctccccgcatccacacaggggacaagggtcaaaaggtggggacatgccttcactttcctcacctgacaggccctggtctgctgggatcagcgctgcagccagaacccgcattcacccgcgacgcagcctgtgcaggggaccaggggttttaggcaggatcagcagggaatctgcataccagctccacagtgcactcaggtggcagatggggaaactgaggcccaaggaggggcggggagccccttggacggggcggggcactccgcccggggcaggcaggggcctttatctgctgtcctgcccctcctcctcccccagcggcatcctctctctagcttctggcgctgcccactgtaacccgactccggcatttgcgtttggggcgccctccctgcgccgggggcgggagcccagcgagcgcagagccccggccccgcgcggcccgagtgccacatcactgcgctggccgtccaaggtccgccgccccaccatgccgcccccgctgccgctgctgct

SEQ ID NO: 31624 - DNA, 2300 bp, Homo sapien
gccccgatttcctccttgtgacaggaggagtgctgaacgaatcttgtgagatggtttcaaaagtgacgtgggagccaaccaatgtgaagtgctcaggtcagggctgaggacagggctttttccctgaaaggggcaaacatttcattgtcgcctcctgacggatttgggcatctggtgtattctaagtggaggctttcaaaatatcagaaaaaaaattctgggtaccaagtcaatgacatatgtaaaatgtctattttattttattttttatttatttatttttatttttagagatggaggtcttgctgtgttacccaggctggtctcaaactcctggcctcaagtgatcctcgcatctcagcctcccaaaatgctggaattacaggcgttagccaccttgcctggctgtaaaatgtggtgagcagggcaatgtgaggcagaaagaatcctgtcctttctagactttgacatgagacgtggcaaaatgtcatgacttgtcctatgcgatgccacatcgggaaagtccagctgaggaaaagaggagaaggccatctgggggtgcgagtgtggagccagcggctgcggggacacagtcagctcccgacggggctggagggccctgctaggccgatgagggccttaaagatggggcttttggagctaaacaaacagctgtgatgaggaagcaggaaggtgcccagcaacaatgaggaccctaccctctgcctgggcttacggcatccctgcgagctgcagagcagagatgagccggctgagccgcatctgtcattatccacttctcatccaagtcctgagccccaactgacccattagggtccccaaagacactagacgcccaaagcaggatgtgtcttttgggacgtctttgtgctgcggctgtggctcctgggtggtctgtgcctgtccctgcctaatgcagcatcagctggctgccttcacgggcccttgtgtggcacagctgctttgcagatggagacgccgaggctcagggcagcctgctgcggctggcttgctggtgggtagttgaatctggttggtcttaggctcctcctctggtctctcacaggctctgattcctgcacagtagctgttgtcctggtcctcccctgccagaccgtgggtgcccctccctgcaggccctggccctgcgtggggtcccctacgtaaatgtctgatgcgtgacggtcagggccactgcaggagggactgacctgccgaccctgcctccccagccacctgcgtggacctgcagctcaggacctgcagtgatgccgcctacaaccacaccaccttccccaacctgcttcagcaccggtcatgggaggtggtggaggccagctccgagtacatcctgctgagcgttctacaccagctcctggaaggccagtgcaacccggacctgcggctgctgggctgtgctgtgctggccccccggtgtgagggcggctgggtgcgcagaccctgccggcacatctgcgagggcctgcgggaggtctgccagcccgccttcgacgccattgacatggcctggccctacttccttgactgccaccgctacttcacgagagaggacgagggctgctatgacccgctggagaagcttcggggtaagggaaagtggcgggggcctgtgtggtcatggggtccaggtggtcaaggaggaccaagagccacactggaaggaacttgagggcttttccatcgacagtgacggtgcaggcattggtagagggcggggctgctccccgaggcagcatgttccccacaaaagggtgccaggcagggtcgggggctcagtgcagatggaggatcctctcgctgcccagggccccctagcagaagtctccagccccttagaggcaggctggggtggaagggtgctgagtccaagtgggggcagtgcccccgcccagggtgcagtgagcaggcctcgtgtgggggagcctgggctcagagtgcagggctggccctgggggtccagtcctcagccacagaccctccagaaccatagtgcttacccctggtcaagggggggcggggcatttacatcccccgggaggtctggcgggcaaagcttcacgattgctcatcgctgggcctggaagatcacacagagggtttggcttggagtgactcctccaagcagggtctgcaccgccctgtgggctcaaggagggagaggagctgtggagaaatgctttgatgtctcttgcagatgaaacagtggagggggagtgggcaagactgggccaccatgggccacttgtctctgaggtgtg

SEQ ID NO: 31625 - DNA, 2300 bp, Homo sapien
cagggctccgtagaaccacagaatcttgggcgcaaccctgctcaagcacccaaatgtgcatacgaacagggtctccgtgtgacgtgtgtgaaaactacagtgtgatgagcatgactggcagacagcttatcgattgggctcccctcaaaatcggttatgagcattcaagcacaccgatgcccaggtcccggctgcaggaataagaccctccagggtcttgtgtgaagcctcggcatctgcattgctcatgcttctggggatcattctcctgaaaatggtggctcctttctccctgtggagcatctttctaagcagtgctcttttcttcccccaggacactttacatccggcacaggaagccttctgatggagcacacctggcccatgaaaagacaagggaaagaaacggggccaaaggtcacagtcctctcatcccatcatcctccttaaaatcatcctaatttcatgggccctgaagccagggctgtttctttacacctagaggccttggcgccgggcctcaattccgccctgttccttaccgtctaagacatgttgggaaaatccctagagccaggatcttcattcctgctaagccagacagccggaagacacacccaaattctgtccctcttacttcagggaacatgtccactttcggcagcattacaattttggcaccaaatgtgctaactgcaattccaccatacaatgcgtaactggaaatggaggcaacatctccgatcctgaacgatcgatgcgagaatccaggatatgcacggcttattttggccttttcccactgaaacaagggccagtattaaaaatggcacgctatcctctgtttcactccctgcttttaaacgtctccgatgtttctccctgagacagggcctcacttccgtcagccgggcttttctacggtataattttccttgtttgcttttgtccaaattagaactttttatttcatctctaggaaacgttgatccattatcacatacgtatggaaatattatcacacatgctgtgagatacgttgtttttattttcatcaattccttaataaacaaaaggttatagctgggataccttctgagttctcaagttttttgtttcgtgttttcttaaactgccgtcgcacgtccgaaaccgctcactatgcggtgtcatgaccgtctctcttttctggcaaacataaatttggggattgtcatcaattagtctctcggggattgcatgatttccccaaaggctttcacagtctactttgtgcactgagtatctcttcaaacttcagtgcatgtttctaccatttgatgctttcttatttggcaatctagcttccacaagagcatttcatgcaaagacttgtcttgttctccactggcaggtaatttcactcggacagagaatcaataggctcaacgtggaaaggttatcgctggaaggtctgtttgattccacggatctctcctttctcactagggaagaaaatacgctgtgctaaatactatacttcattgactattctcaggtcagaaagcgcactttcgacttcttgtccttccttcgctgagaggatgatggcagctgccaaaagtacctacttggaggttcatcccagcacaaacacacacacacacacgccccccccacacacacacaaacacactcacacacacacacgcacacggtttcctaggtaaagatttcttccctgccattgctttacctaaaataaggcaactgtgaggccactgtcccaacccggttacactcctattatatgtgcctatcatcctgaggagtaatttgattcaggtgttctggaagtcatgctgtgggctgtgtctgttgaattcccagcgatgccaggggacacaccctgtgactccttcctgaattgagtgctgatatttgattggcttatcgcgcacctgatgagtgggtggggtgttcgcggttggtgggggtgacttacagaagggctgatgcggccagagagctcgtcatttgaagactctctcggaagggatagcgtctttctgcaacctgcggtcccagcagacaaaccttgtgatcctcgttccagtcgacatggaggacgactcactctacttgagaggtgagtggcagttcaaccacttttcaaaactcacatcttctcggcccgatgcagcttttgctgaaatccagcggacttctctccctgagaagtcaccactctcatgtgagacccgtgtcgacctctgtgatgatttggctcctgtggcaagacagcttgctcccagggagaa

SEQ ID NO: 31626 - DNA, 2300 bp, Homo sapien
agggctccgtagaaccacagaatcttgggcgcaaccctgctcaagcacccaaatgtgcatacgaacagggtctccgtgtgacgtgtgtgaaaactacagtgtgatgagcatgactggcagacagcttatcgattgggctcccctcaaaatcggttatgagcattcaagcacaccgatgcccaggtcccggctgcaggaataagaccctccagggtcttgtgtgaagcctcggcatctgcattgctcatgcttctggggatcattctcctgaaaatggtggctcctttctccctgtggagcatctttctaagcagcgctcttttcttcccccaggacactttacatccggcacaggaagccttctgatggagcacacctggcccatgaaaagacaagggaaagaaacggggccaaaggtcacagtcctctcatcccatcatcctccttaaaatcatcctaatttcatgggccctgaagccagggctgtttctttacacctagaggccttggcgccgggcctcaattccgccctgttccttaccgtctaagacatgttgggaaaatccctagagccaggatcttcattcctgctaagccagacagccggaagacacacccaaattctgtccctcttacttcagggaacatgtccactttcggcagcattacaattttggcaccaaatgtgctaactgcaattccaccatacaatgcgtaactggaaatggaggcaacatctccgatcctgaacgatcgatgcgagaatccaggatatgcacggcttattttggccttttcccactgaaacaagggccagtattaaaaatggcacgctatcctctgtttcactccctgcttttaaacgtctccgatgtttctccctgagacagggcctcacttccgtcagccgggcttttctacggtataattttccttgtttgcttttgtccaaattagaactttttatttcatctctaggaaacgttgatccattatcacatacgtatggaaatattatcacacatgctgtgagatacgttgtttttattttcatcaattccttaataaacaaaaggttatagctgggataccttctgagttctcaagttttttgtttcgtgttttcttaaactgccgtcgcacgtccgaaaccgctcactatgcggtgtcatgaccgtctctcttttctggcaaacataaatttggggattgtcatcaattagtctctcggggattgcatgatttccccaaaggctttcacagtctactttgtgcactgagtatctcttcaaacttcagtgcatgtttctaccatttgatgctttattatttggcaatctagcttccacaagagcatttcatgcaaagacttgtcttgttctccactggcaggtaatttcactcggacagagaatcaataggctcaacgtggaaaggttatcgctggaaggtctgtttgattccacggatctctcctttctcactagggaagaaaatacgctgtgctaaatactatacttcattgactattctcaggtcagaaagcgcactttcgacttcttgtccttccttcgctgagaggatgatggcagctgccaaaagtacctacttggaggttcatcccagcacaaacacacacacacacacgcccccccccccacacacacaaacacactcacacacacacacgcacacggtttcctaggtaaagatttcttccctgccattgctttacctaaaataaggcaactgtgaggccactgtcccaacccggatacactcctattatatgtgcctatcatcctgaggagtaatttgattcaggtgttctggaagtcatgctgtgggctgtgtctgttgaattcccagcgatgccaggggacacaccctgtgactccttcctgaattgagtgctgatatttgattggcttatcgcgcacctgatgagtgggtggggtgttcgcggttggtgggggtgacttacagaagggctgatgcggccagagagctcgtcatttgaagactctctcggaagggatagcgtctttctgcaacctgcggtcccagcagacaaaccttgtgatcctcgttccagtcgacatggaggacgactcactctacttgagaggtgagtggcagttcaaccacttttcaaaactcacatcttctcggcccgatgcagcttttgctgaaatccagcggacttctctccctgagaagtcaccactctcatgtgagacccgtgtcgacctctgtgatgatttggctcctgtggcaagacagcttgctcccagggagaa

SEQ ID NO: 31627 - DNA, 2300 bp, Homo sapien
gggctccgtagaaccacagaatcttgggcgcaaccctgctcaagcacccaaatgtgcatacgaacagggtctccgtgtgacgtgtgtgaaaactacagtgtgatgagcatgactggcagacagcttatcgattgggctcccctcaaaatcggttatgagcattcaagcacaccgatgcccaggtcccggctgcaggaataagaccctccagggtcttgtgtgaagcctcggcatctgcattgctcatgcttctggggatcattctcctgaaaatggtggctcctttctccctgtggagcatctttctaagcagcgctcttttcttcccccaggacactttacatccggcacaggaagccttctgatggagcacacctggcccatgaaaagacaagggaaagaaacggggccaaaggtcacagtcctctcatcccatcatcctccttaaaatcatcctaatttcatgggccctgaagccagggctgtttctttacacctagaggccttggcgccgggcctcaattccgccctgttccttaccgtctaagacatgttgggaaaatccctagagccaggatcttcattcctgctaagccagacagccggaagacacacccaaattctgtccctcttacttcagggaacatgtccactttcggcagcattacaattttggcaccaaatgtgctaactgcaattccaccatacaatgcgtaactggaaatggaggcaacatctccgatcctgaacgatcgatgcgagaatccaggatatgcacggcttattttggccttttcccactgaaacaagggccagtattaaaaatggcacgctatcctctgtttcactccctgcttttaaacgtctccgatgtttctccctgagacagggcctcacttccgtcagccgggcttttctacggtataattttccttgtttgcttttgtccaaattagaactttttatttcatctctaggaaacgttgatccattatcacatacgtatggaaatattatcacacatgctgtgagatacgttgtttttattttcatcaattccttaataaacaaaaggttatagctgggataccttctgagttctcaagttttttgtttcgtgttttcttaaactgccgtcgcacgtccgaaaccgctcactatgcggtgtcatgaccgtctctcttttctggcaaacataaatttggggattgtcatcaattagtctctcggggattgcatgatttccccaaaggctttcacagtctactttgtgcactgagtatctcttcaaacttcagtgcatgtttctaccatttgatgctttattatttggcaatctagcttccacaagagcatttcatgcaaagacttgtcttgttctccactggcaggtaatttcactcggacagagaatcaataggctcaacgtggaaaggttatcgctggaaggtctgtttgattccacggatctctcctttctcactagggaagaaaatacgctgtgctaaatactatacttcattgactattctcaggtcagaaagcgcactttcgacttcttgtccttccttcgctgagaggatgatggcagctgccaaaagtacctacttggaggttcatcccagcacaaacacacacacacacacgccccccccccccacacacacaaacacactcacacacacacacgcacacggtttcctaggtaaagatttcttccctgccattgctttacctaaaataaggcaactgtgaggccactgtcccaacccggatacactcctattatatgtgcctatcatcctgaggagtaatttgattcaggtgttctggaagtcatgctgtgggctgtgtctgttgaattcccagcgatgccaggggacacaccctgtgactccttcctgaattgagtgctgatatttgattggcttatcgcgcacctgatgagtgggtggggtgttcgcggttggtgggggtgacttacagaagggctgatgcggccagagagctcgtcatttgaagactctctcggaagggatatcgtctttctgcaacctgcggtcccagcagacaaaccttgtgatcctcgttccagtcgacatggaggacgactcactctacttgagaggtgagtggcagttcaaccacttttcaaaactcacatcttctcggcccgatgcagcttttgctgaaatccagcggacttctctccctgagaagtcaccactctcatgtgagacccgtgtcgacctctgtgatgatttggctcctgtggcaagacagcttgctcccagggagaa

SEQ ID NO: 31628 - DNA, 2300 bp, Homo sapien
cagggctccgtagaaccacagaatcttgggcgcaaccctgctcaagcacccaaatgtgcatacgaacagggtctccgtgtgacgtgtgtgaaaactacagtgtgatgagcatgactggcagacagcttatcgattgggctcccctcaaaatcggttatgagcattcaagcacaccgatgcccaggtcccggctgcaggaataagaccctccagggtcttgtgtgaagcctcggcatctgcattgctcatgcttctggggatcattctcctgaaaatggtggctcctttctccctgtggagcatctttctaagcagcgctcttttcttcccccaggacactttacatccggcacaggaagccttctgatggagcacacctggcccatgaaaagacaagggaaagaaacggggccaaaggtcacagtcctctcatcccatcatcctccttaaaatcatcctaatttcatgggccctgaagccagggctgtttctttacacctagaggccttggcgccgggcctcaattccgccctgttccttaccgtctaagacatgttgggaaaatccctagagccaggatcttcattcctgctaagccagacagccggaagacacacccaaattctgtccctcttacttcagggaacatgtccactttcggcagcattacaattttggcaccaaatgtgctaactgcaattccaccatacaatgcgtaactggaaatggaggcaacatctccgatcctgaacgatcgatgcgagaatccaggatatgcacggcttattttggccttttcccactgaaacaagggccagtattaaaaatggcacgctatcctctgtttcactccctgcttttaaacgtctccgatgtttctccctgagacagggcctcacttccgtcagccgggcttttctacggtataattttccttgtttgcttttgtccaaattagaactttttatttcatctctaggaaacgttgatccattatcacatacgtatggaaatattatcacacatgctgtgagatacgttgtttttattttcatcaattccttaataaacaaaaggttatagctgggataccttctgagttctcaagttttttgtttcgtgttttcttaaactgccgtcgcacgtccgaaaccgctcactatgcggtgtcatgaccgtctctcttttctggcaaacataaatttggggattgtcatcaattagtctctcggggattgcatgatttccccaaaggctttcacagtctactttgtgcactgagtatctcttcaaacttcagtgcatgtttctaccatttgatgctttattatttggcaatctagcttccacaagagcatttcatgcaaagacttgtcttgttctccactggcaggtaatttcactcggacagagaatcaataggctcaacgtggaaaggttatcgctggaaggtctgtttgattccacggatctctcctttctcactagggaagaaaatacgctgtgctaaatactatacttcattgactattctcaggtcagaaagcgcactttcgacttcttgtccttccttcgctgagaggatgatggcagctgccaaaagtacctacttggaggttcatcccagcacaaacacacacacacacacgccccccccccacacacacaaacacactcacacacacacacgcacacggtttcctaggtaaagatttcttccctgccattgctttacctaaaataaggcaactgtgaggccactgtcccaacccggatacactcctattatatgtgcctatcatcctgaggagtaatttgattcaggtgttctggaagtcatgctgtgggctgtgtctgttgaattcccagcgatgccaggggacacaccctgtgactccttcctgaattgagtgctgatatttgattggcttatcgcgcacctgatgagtgggtggggtgttcgcggttggtgggggtgacttacagaagggctgatgcggccagagagctcgtcatttgaagactctctcggaagggatagcgtctttctgcaacctgcggtcccagcagacaaaccttgtgatcctcgttccagtcgacatggaggacgactcactctacttgagaggtgagtggcagttcaaccacttttcaaaactcacatcttctcggcccgatgcagcttttgctgaaatccagcggacttctctccctgagaagtcaccactctcatgtgagacccgtgtcgacctctgtgatgatttggctcctgtggcaagacagcttgctcccagggagaa

SEQ ID NO: 31629 - DNA, 2300 bp, Homo sapien
cagggctccgtagaaccacagaatcttgggcgcaaccctgctcaagcacccaaatgtgcatacgaacagggtctccgtgtgacgtgtgtgaaaactacagtgtgatgagcatgactggcagacagcttatcgattgggctcccctcaaaatcggttatgagcattcaagcacaccgatgcccaggtcccggctgcaggaataagaccctccagggtcttgtgtgaagcctcggcatctgcattgctcatgcttctggggatcattctcctgaaaatggtggctcctttctccctgtggagcatctttctaagcagcgctcttttcttcccccaggacactttacatccggcacaggaagccttctgatggagcacacctggcccatgaaaagacaagggaaagaaacggggccaaaggtcacagtcctctcatcccatcatcctccttaaaatcatcctaatttcatgggccctgaagccagggctgtttctttacacctagaggccttggcgccgggcctcaattccgccctgttccttaccgtctaagacatgttgggaaaatccctagagccaggatcttcattcctgctaagccagacagccggaagacacacccaaattctgtccctcttacttcagggaacatgtccactttcggcagcgttacaattttggcaccaaatgtgctaactgcaattccaccatacaatgcgtaactggaaatggaggcaacatctccgatcctgaacgatcgatgcgagaatccaggatatgcacggcttattttggccttttcccactgaaacaagggccagtattaaaaatggcacgctatcctctgtttcactccctgcttttaaacgtctccgatgtttctccctgagacagggcctcacttccgtcagccgggcttttctacggtataattttccttgtttgcttttgtccaaattagaactttttatttcatctctaggaaacgttgatccattatcacatacgtatggaaatattatcacacatgctgtgagatacgttgtttttattttcatcaattccttaataaacaaaaggttatagctgggataccttctgagttctcaagttttttgtttcgtgttttcttaaactgccgtcgcacgtccgaaaccgctcactatgcggtgtcatgaccgtctctcttttctggcaaacataaatttggggattgtcatcaattagtctctcggggattgcatgatttccccaaaggctttcacagtctactttgtgcactgagtatctcttcaaacttcagtgcatgtttctaccatttgatgctttattatttggcaatctagcttccacaagagcatttcatgcaaagacttgtcttgttctccactggcaggtaatttcactcggacagagaatcaataggctcaacgtggaaaggttatcgctggaaggtctgtttgattccacggatctctcctttctcactagggaagaaaatacgctgtgctaaatactatacttcattgactattctcaggtcagaaagcgcactttcgacttcttgtccttccttcgctgagaggatgatggcagctgccaaaagtacctacttggaggttcatcccagcacaaacacacacacacacacgccccccccccacacacacaaacacactcacacacacacacgcacacggtttcctaggtaaagatttcttccctgccattgctttacctaaaataaggcaactgtgaggccactgtcccaacccggatacactcctattatatgtgcctatcatcctgaggagtaatttgattcaggtgttctggaagtcatgctgtgggctgtgtctgttgaattcccagcgatgccaggggacacaccctgtgactccttcctgaattgagtgctgatatttgattggcttatcgcgcacctgatgagtgggtggggtgttcgcggttggtgggggtgacttacagaagggctgatgcggccagagagctcgtcatttgaagactctctcggaagggatagcgtctttctgcaacctgcggtcccagcagacaaaccttgtgatcctcgttccagtcgacatggaggacgactcactctacttgagaggtgagtggcagttcaaccacttttcaaaactcacatcttctcggcccgatgcagcttttgctgaaatccagcggacttctctccctgagaagtcaccactctcatgtgagacccgtgtcgacctctgtgatgatttggctcctgtggcaagacagcttgctcccagggagaa

SEQ ID NO: 31630 - DNA, 2300 bp, Homo sapien
cagggctccgtagaaccacagaatcttgggcgcaaccctgctcaagcacccaaatgtgcatacgaacagggtctccgtgtgacgtgtgtgaaaactacagtgtgatgagcatgactggcagacagcttatcgattgggctcccctcaaaatcggttatgagcattcaagcacaccgatgcccaggtcccggctgcaggaataagaccctccagggtcttgtgtgaagcctcggcatctgcattgctcatgcttctggggatcattctcctgaaaatggtggctcctttctccctgtggagcatctttctaagcagcgctcttttcttcccccaggacactttacatccggcacaggaagccttctgatggagcacacctggcccatgaaaagacaagggaaagaaacggggccaaaggtcacagtcctctcatcccatcatcctccttaaaatcatcctaatttcatgggccctgaagccagggctgtttctttacacctagaggccttggcgccgggcctcaattccgccctgttccttaccgtctaagacatgttgggaaaatccctagagccaggatcttcattcctgctaagccagacagccggaagacacacccaaattctgtccctcttacttcagggaacatgtccactttcggcagcattacaattttggcaccaaatgtgctaactgcaattccaccatacaatgcgtaactggaaatggaggcaacatctccgatcctgaacgatcgatgcgagaatccaggatatgcacggcttattttggccttttcccactgaaacaagggccagtattaaaaatggcacgctatcctctgtttcactccctgcttttaaacgtctccgatgtttctccctgagacagggcctcacttccgtcagccgggcttttctacggtataattttccttgtttgcttttgtccaaattagaactttttatttcatctctaggaaacgttgatccattatcacatacgtatggaaatattatcacacatgctgtgagatacgttgtttttattttcatcaattccttaataaacaaaaggttatagctgggataccttctgagttctcaagttttttgtttcgtgttttcttaaactgccgtcgcacgtccgaaaccgctcactatgcggtgtcatgaccgtctctcttttctggcaaacataaatttggggattgtcatcaattagtctctcggggattgcatgatttccccaaaggctttcacagtctactttgtgcactgagtatctcttcaaacttcagtgcatgtttctaccatttgatgctttattatttggcaatctagcttccacaagagcatttcatgcaaagacttgtcttgttctccactggcaggtaatttcactcggacagagaatcaataggctcaacgtggaaaggttatcgctggaaggtctgtttgattccacggatctctcctttctcactagggaagaaaatacgctgtgctaaatactatacttcattgactattctcaggtcagaaagcgcactttcgacttcttgtccttccttcgctgagaggatgatggcagctgccaaaagtacctacttggaggttcatcccagcacaaacacacacacacacacgccccccccccacacacacaaacacactcacacacacacacgcacacggtttcctaggtaaagatttcttccctgccattgctttacctaaaataaggcaactgtgaggccactgtcccaacccggatacactcctattatatgtgcctatcatcctgaggagtaatttgattcaggtgttctggaagtcatgctgtgggctgtgtctgttgaattcccagcgatgccaggggacacaccctgtgactccttcctgaattgagtgctgatatttgattggcttatcgcgcacctgatgagtgggtggggtgttcgcggttggtgggggtgacttacagaagggctgatgcggccagagagctcgtcatttgaagactctctcggaagggatagcgtctttctgcaacctgcggttccagcagacaaaccttgtgatcctcgttccagtcgacatggaggacgactcactctacttgagaggtgagtggcagttcaaccacttttcaaaactcacatcttctcggcccgatgcagcttttgctgaaatccagcggacttctctccctgagaagtcaccactctcatgtgagacccgtgtcgacctctgtgatgatttggctcctgtggcaagacagcttgctcccagggagaa

SEQ ID NO: 31631 - DNA, 2300 bp, Homo sapien; identical to SEQ ID NO: 31629

SEQ ID NO: 31632 - DNA, 2300 bp, Homo sapien
agggctccgtagaaccacagaatcttgggcgcaaccctgctcaagcacccaaatgtgcatacgaacagggtctccgtgtgacgtgtgtgaaaactacagtgtgatgagcatgactggcagacagcttatcgattgggctcccctcaaaatcggttatgagcattcaagcacaccgatgcccaggtcccggctgcaggaataagaccctccagggtcttgtgtgaagcctcggcatctgcattgctcatgcttctggggatcattctcctgaaaatggtggctcctttctccctgtggagcatctttctaagcagcgctcttttcttcccccaggacactttacatccggcacaggaagccttctgatggagcacacctggcccatgaaaagacaagggaaagaaacggggccaaaggtcacagtcctctcatcccatcatcctccttaaaatcatcctaatttcatgggccctgaagccagggctgtttctttacacctagaggccttggcgccgggcctcaattccgccctgttccttaccgtctaagacatgttgggaaaatccctagagccaggatcttcattcctgctaagccagacagccggaagacacacccaaattctgtccctcttacttcagggaacatgtccactttcggcagcgttacaattttggcaccaaatgtgctaactgcaattccaccatacaatgcgtaactggaaatggaggcaacatctccgatcctgaacgatcgatgcgagaatccaggatatgcacggcttattttggccttttcccactgaaacaagggccagtattaaaaatggcacgctatcctctgtttcactccctgcttttaaacgtctccgatgtttctccctgagacagggcctcacttccgtcagccgggcttttctacggtataattttccttgtttgcttttgtccaaattagaactttttatttcatctctaggaaacgttgatccattatcacatacgtatggaaatattatcacacatgctgtgagatacgttgtttttattttcatcaattccttaataaacaaaaggttatagctgggataccttctgagttctcaagttttttgtttcgtgttttcttaaactgccgtcgcacgtccgaaaccgctcactatgcggtgtcatgaccgtctctcttttctggcaaacataaatttggggattgtcatcaattagtctctcggggattgcatgatttccccaaaggctttcacagtctactttgtgcactgagtatctcttcaaacttcagtgcatgtttctaccatttgatgctttattatttggcaatctagcttccacaagagcatttcatgcaaagacttgtcttgttctccactggcaggtaatttcactcggacagagaatcaataggctcaacgtggaaaggttatcgctggaaggtctgtttgattccacggatctctcctttctcactagggaagaaaatacgctgtgctaaatactatacttcattgactattctcaggtcagaaagcgcactttcgacttcttgtccttccttcgctgagaggatgatggcagctgccaaaagtacctacttggaggttcatcccagcacaaacacacacacacacacgcccccccccccccacacacaaacacactcacacacacacacgcacacggtttcctaggtaaagatttcttccctgccattgctttacctaaaataaggcaactgtgaggccactgtcccaacccggatacactcctattatatgtgcctatcatcctgaggagtaatttgattcaggtgttctggaagtcatgctgtgggctgtgtctgttgaattcccagcgatgccaggggacacaccctgtgactccttcctgaattgagtgctgatatttgattggcttatcgcgcacctgatgagtgggtggggtgttcgcggttggtgggggtgacttacagaagggctgatgcggccagagagctcgtcatttgaagactctctcggaagggatagcgtctttctgcaacctgcggtcccagcagacaaaccttgtgatcctcgttccagtcgacatggaggacgactcactctacttgagaggtgagtggcagttcaaccacttttcaaaactcacatcttctcggcccgatgcagcttttgctgaaatccagcggacttctctccctgagaagtcaccactctcatgtgagacccgtgtcgacctctgtgatgatttggctcctgtggcaagacagcttgctcccagggagaa

SEQ ID NO: 31633 - DNA, 2300 bp, Homo sapien
tctttgctgaagccctctgcaatctaagccatctttcaatgctcatctggtacctactggtccacccccagaatgcagtgaacctttctctgacccttctttgatatccgtgattggtagcccatggattacacaatgttcttgggcttcctgggcagaattccaagcctgcctcctggctccaaatctcttaggttggtgcaaacgtaattgcgatttttgccattgaaagtaatggcaaaaaccacaaatacgtttgcaccaacctacaagaggctggcaaacaaatgttcatagaaaatatcaagcagtgaaaattatgcccttagtgttccataaaggatttcaattatttgttctcataaattgtattgctttgcagtgtaaactgtacttccaaagcttttcctcgtgatcaagaaagaaataattcccagagaggtgagaaaaatcagtaaattctggattctggatcagagatgctaatgatcctaggccattctggcttcagtaaatggagcagtcagcaataaccagcacaatgacactaagatccccctttgagtttctagggtgctggcagaggcttgtgcccaggcaccgctgccccagcaactcaggaggaaggacctgaatggaggtttaggaaaaaacatccccagagctttcatgcccctcactggccctccttaggctaagacttgggaagtttgcctcttccaagacctccccatccctgactcaagatttcattttcaaagtctctaaaggcagggaagaccttctgaaataatgtaaccaagtgttccattcactaacactctgaagtattatagaagtagcaccaagaagaagccatggaagaaagagaacttccttcttggtactgagaaaagttacttcacctgtagtgacaccatctagaaaggaatgaaggtcaagtaagaccacgaatgtgcatgtactttgcagtttctgaagttgatattctggccagacgtggtggctcacccctgtaatcccagcacttcgggaggccgaggcgggtggatcacttgaggccaggagttcgagaccagcctgaccaacatggcaagaccctattgctactaaaggtacaaaacttagcgaggcatggagacgtgtgcctgtaatcccagctactcaggatgctgaggcaggagaatcacgtgaacccgggaggcagaggttgcagtgagccaagatcgcaccactgcgctccagcctgggcaacagtgtgagaccctgtctctaaataaaaaataaataaataaataaagtttactcataccctctttaagcattccctacggcacccaaagtattctggtgtttatgttcatttccttagtgtctaagaagtaatttgtgcctctttgccagaaatatgctcgtgttgcattgccgtttctttgtatatattacttgctttccgaagtgtattatgggttccctaaggcccacttttctttctttaattcctctcatattacacataactgatgtgcaaacaatttgtgtgaacttagatttcaatagaaaaattagtttatctcatttgatcgattggacagaaagataatcaaataaaagttgttctgtatctcactaatctgtttataatttcatatttaattccattgcttaagcatgctaacacacggtgccaaaatattaataaataggcatgctcttgtattacgtgcttcttcctattatcagaaaaataaaatgaatgcttttcctctataactgcttccttaacttttacagttcctccagaatgcataagacaatgctgatatttcaagtctctctcctgcctttgccatggctgtgctttctactacctttgcacacaccctcttgacctttgataaatgtactttaaatgactgatagtcgtgatgattgcatgctttctcctgatataaaatctccttgaaacacagaaatgttcttgctcctgaaaggttcaataatcactcaacaactcacctcttcagagaactgaatgtacacagaagtcctcttcatctcagctactgattctctctaacctgctttacctattcaaccatgagggtcttgttttttgtctttggagtcctttccttgatgttcacagttcctccaggtaagacagaaacttttttattccaaagttctaaaaatataagtaaaagaaaatgcaaggtctttcaagagtctgaaaataaaataggcatgggcagattttactgtaccatgaaggctgctcagaggattgaagagttgat

SEQ ID NO: 31634 - DNA, 2300 bp, Homo sapien
aatccaagctcttgtctgacatcatgacttggtgttctccaggagaagaagataggggaaggtcattccaggttgaggaaataccacatgaccgtttacaatgggtgttcttttttggtggcggtggtggtggcggcagcttgaatccaggctgtattcggagtagtgaaaggagaagaagcaggagctgtggacaaagacaagggcaatatgaggaaaagaccttgcatgcctggccaggaacaggggccacagggagctgatcatgaaacacactgacggtgtttcatcaggggagtgacatgaacatagtcacattcaggaaagatcactgcctgctgggaagacagagggtcagggcagagactggaggccaggaaagtgccaccatcaaacaggatggaggaggcacaattctggacagggatgtccatggccagaggagtggtccagctcccagaagatgaggagagaccagaggtgaggatggcccttcagtttcaggtttaggcacctggacagatggtcttgccctctccagcggcaaaaagcactgagggggaaggaggttgggggaagggactgtgtaggctgagcagcttaagtctgagaaggtgggccacttgcagatgttggtccagggtacaggtgcgtttggtggagggggagactaggaagggaggagaaagtccagtctgtttctagacctcaccatgctgcaggtgtctgggccagcaggtcgcagccggagctatgcagctggctgctgtcacatccctttctctcccagctgccttcagctgagcttaacgccagtagaggccgaaacacttcacaaatgcaacttgtcagctgggaggtgcactcagagctcaggaacactgttttccctctttattgttttccatcattcttttttttcagtttgggttttgggccccgtcagttccttttctgttaaacactgagctatttatccatccctctcaaggttgaaaaagagaaaggctgtaaaagtgccctgcaaagaagaggcctccaactctatgggggtggggggctctcttcctcctcttgtcttctgagttcattccgaattattccccaaaggaaaaatcgttcaaggactgggggcggtggtggggaaaaggacaatctcccaagaggtcagctgaagccccagcctcagggtgttgagagaggggctgggggaagcgggagcctgttcctaggagacactgtctactggacacctcatcctagacggcttccatgagttctgacactgtcccaggagtaggaatcattatcccacgctgtggagaaggaaaccaaggccgggtaaagttatgtagggcccttaaagtcgcagagccaggaataaagtccggattgggactcgggtctgtgggtaatccaaggctgccccgcttacccttcaaatgctctttccccctccggaagccctcgcgtcctcatccttaccccacctcttgttccccaagcgtggccagggctaaggctccagggatgcgccaagcacccttcggttttcccggggagaattttccccggcccggggactagggtctggcgctggggcgcccctcggacctgcgggatcgcccctacactctggcgcgctgagggcggtgagcgagggcgccaaggcacaggtggggcgggagtcgagcgcggaggctcggggggcgggacgcggggcctgggagcggccagggaccgcggcagcgcctcagtgccagcctggcgcccgcgactgcctgccccagcccctcagtggcggcttgctctcttctctcgctccgaaccagacacagccgctgccgctgccgtccggcgcgctacagactcccgagaacagccctggctgtcagcgagcaccagccgcttcctgtccccatcgcggagactggaggggcgcaccacggccatggagccagaggcgcttcaggaggcaagagaagtccccgcgcgctccgcagcccggcgcagctcatggtgagcgccctctggggctcgagggtcccttggctgagggggcgcatcctcggggtgcccgatggggctgcctgggggtcgcagggctgaagttgggaccgcgcacagaccgcccctgcagtccagcccgaaatgctgccgccaggcagcaacggcaccgcgtacccggggcagttcgctctataccagcagctggcgcaggggaacgccgtggggggctcggcgggggcaccgccactggggccctcacaggtggtcaccgcctgcctgctgaccctact

SEQ ID NO: 31635 - DNA, 2300 bp, Homo sapien
catcccatcttagacagacgctaacctatggccatttctaaagacacagcatcccatcttagacagacgctaacctatggccatttctaaagacacagcgtcccacattagacagacactaacttatggccatttctaaagacacagcgtcccacattagacagacactaacttatggccatttctaaagacacagcatcccaccttagacactaacctgtgagaacatgggtgccgatgtggggatgtgaggtctcccagccaggttctgacacaacaggactgcaccatctcctacatcaactcacaagcaaaacagtcatgcacacagctgggattacacaacatccacatatactgattcacacacatgcacatacacacatgtgcactccgttctccagatggcctctgagcttcctttctagcccactctcagaggcctgattctcatcctctgcgcggttccaaaactggcatggtgctccactttgtgggaagggcacagagcttaggtgtacactggctcacgggtggggtaagcagacagctgtgggggtacacatgtgcatctgcagggctgctgccatcagagagggcatctggagaactcccctggcaaggctgggcctggccacagggtgtgatcattctgtttattcaataatgtactaacttgtaaaatattttatttgagaaaggggcatttttttttaatagcaaaagtgccatttgagctagaagtggacctggaggtagccagctaaagggaaaaggaggaatgtctgagtagaggacagacatcagagaggatgctaatggaagcctaggacacatgtaaaactggagagacgctctggagtaaaagggcctcaggggacatcagggtgcagggaaagtggtggccagatcatcgtgggcctcacaggctgaaataattaaactttgtccttgtggaagtgggcagccaccaaagaattttgagctgggacatagcattatcacactggtgtttaaaaagtctgcagaggagggaataaaccagaggtaaaatgtggaatatgggagaggcttgggaagagtgaattcagaaagatcactaaggaatttgtatcggttagctatgactgtgtaacaaataaccgccaagcctcatggattaaacaacaaccagttattattgctcgcaagagttagtcagtgtggcagttttgctcttctggcccaggcttctttgatctcagctagatgatttcctcctatctacatccagctggcaggtcatctgggcaccagctagtccaaagtagcctcactcattggtctggcactgagaagggtaacttgaccacatgtccatcactgtcccacagactagaccaggtttgtttatatgatggtggcaaagttgcaagaaaagaaggggaagtgtgcaaaactgcctgaggcctgggcttggaactccacactatttctgctgcattctatcagccaaagcaagtcacaaagcccgcccagattcaagggatggggaaagactttccctcccattggaggggctgcaaagaactgtggctattctacaattgcctggaggcagtaactgtagaataggcaagagatgagaattatgggctttccttcacttacccccattccacaaataatcactgagagcctactagaaagtgggcctccttctaggcctggagatgcagtggaggagcaaacacacaaacacacacactcacatgcatgtgcacacacatagagtctctgcccttagggatcttaccttcaataacagtcatgggtcagggtccccactgggaacatatggtacactcaaactggagtattctgaggaatgttcaataaggacacaaattgctatggtgcaaaaaggctataggggaatgttgaagaccttgaccattccagcagtctcaacatattatggtcatttccaagggtccacccctctagctgttagctgtgaagaaaacaaagcaacttaatgaaagttaattcatcaaaagtcaatgcactgagaggtcacattgctgaaagtcaaatcatagagaaacacaatttgctggatttaccttatctcttttaactatttatgaacaatgtacatttttgtgcatagaatggaatggttctaacagctttgatcagtttctaagttcttcatcatgtctgcgtagtgaattctgtagaatgttttttttgttgttgttccttctgcttcagttccctgttgttatagctggaggttagtaaacagagagaagcct

SEQ ID NO: 31636 - DNA, 2300 bp, Homo sapien
gctgcacattcatgtccactgcctaatttctggttccttttgagttttcaaacccaacagaggactacgaagcaatttttaacgggatgaggggacacctgatccaatttgagctttagcaaaatctggtgaggtccccactgttacagatgaggaaacagggagggtatagagaggggagtcacagcaatgggatgaggaggggtaaatgagatgatgaaaatgcagtccctatcaggacagcataggggcagaggggccctccatgcacagggatgcagctgtccctgcccctcctctgcccatctcctgtacttcaggccccaaccatgcttcactgacaatttcacttcctcccacacactgcaggcatctgtgcctgcaggccttggctccttgtcctctcaccccgtatccttctctgtccgctcagaagccgcctcttccagcggggtctccaagatccagctgagattgatgtggtgcctcctccacactgtcctggggaatcctccgcctttttaggtcatgttataattaaggatttgcacatcagaatgctgctctaggcccaccactcaatgaggaaaccaggctgcatagctgaaatccagttcaagaaacagccacttctcccggggcatgcctgactgattaacacacagaaggacgattgcactgaatgactggcgtgctcaatacatccccaacctaactcctgagggtggttttcctctttggaagtcttgattccccacttgctttgagcagccacattcccaccaccgtgcatgtcagggccggacgtttccacgtgcgtttcacattccaggttcctggaatgtctgccgtactccacaccttttattttattgtgtgctttttactaaacgtactttgctaacttttcgatctctcttttgtggactgagccctaccttgcctcctggacgttctgcattcaccaagcctgtccctggctctggcccagactctgcactgctctctgcttctgggagcaaactgttctagccaaaattgaaggtgcttctctggcgtctgaggcaacatggccatgtgatgaactgattcccacaacctcctggtgtgcatgaggcccttgccttctcagtactgtccttgagccagcctggggctggaatacaggacatgtcccctcagccagtgctgaatgagcaggacagagtaacgactaagaggcaaattctttttcttccaaacccacagccctcgcctttgttctaggctacaggagagcccacactcatttacagcacgccacttggggctggctgttttctatttgagcttcagaataagtctgcaggacagtcagagtggggtcaatattccattttgcagtggtagaagttgcagctcagagaataaagtgacttgcctgaggacacacagttaaaaagtggaggagttggccagacatggtggcttacgcctctaattccagcactttgggaggctgaggtgggcagatcacctgaggtaaggaggtcaagaccagcctggccaacatggtgaaacacagtctctactaaaaatacaaaaatcagccaggcgtggtggcacacgcctatagttccagctacttgggaggctgaggcaggagaattgcttgaacccaggtgcggaggttgcagtgagcagagattgcatcagtgcactccagcccgggcaacagagcaagattcggtcaaaaaaaaaaaaaaaaagtggaagagtcaggggcagagctgtatgcaggcttctgagtcaaagtcagccacctctccattctgttccaagcattagggaggtatcctaggttaatggcagtcaccctgctccaggctttgttaccagagaaaaataaaaagatgctaagaaaaaaaaaaaaaattccaccccctgggtggcaatcctggagaggacagatttccctttttggactgtttcattgctgtaataacttaggagcagagaaaaaaatgttgccccgttgcctgttcaggcatgatcaaattgccacacttcctgtcaggaactcccgccctccttccagtggactctgcctcctcactcacggaaatgccttggcagagtctggggtccctggactgagccatcagctgggtcactgagacccatggcaaggaaacaaaataggaattccaaggaactgggcctagttcccctcacagatgacaccagccacgccgggcctccagggccagggagggcactgctggagtgtgaccacctgaggagtggggtgccaggtggaa

SEQ ID NO: 31637 - DNA, 2300 bp, Homo sapien
cttctagtcctgggcttttctttgttgagagctgtttgattacagcttcaatctcctcactagttatagatctgctcagatttcctgtttgattatgacttaatcttagttggctatatgtttctatgaatttattaatttcttctaggttatccaattttttggttttttgctttgttttctttttgtttttgatggagtctcgctctgtcacccaggctggagttcagtggcacgatctcagctcactgcaagctctgcctcccaggttcacgccattctcctgcctcagcctcctgagtagctgggactacaggcacccaccaccacccagctaatttttttgtattttttagtagagacggggtttcaccatattagccaggatggtctcgatctcctgaccttgtgacccacccacctcggcctcccaaagtgctgggattacaggtgtgaggcaccacgcccggccattttttggtatttttaagtctttaaagtcatgtattatcaaggcatatatgaacattttatgccaaatataattatcataatggtttcaaaaggattgttgaaggaaatagagtgtaacctgctttgaatagaattaaaggcaatttgaatgctgcaaatcattgtaagcaccttattttaaaatagtttaattttcacttcaaaataatgtttccatgattagaaaaacaattagaaaaaaaccatgaaaatttatatggaatcaaaaccaaacacattcctagaaaatactgtgaacatttttcttattttctttctaacttcttaagtgtgtggcttataatcactcatttatttatcaagcactttggctgcaccagagagtaaaagggatacaattattacaaaccacctgtttacttcagtcatgaccctgcagatatttatgaagggaagactgttcttggcaagaagaaaatggcatgtcactaatagcttttactcaaattgttcagttgtctgcaaattctatggccttctggcctgccttgccccattcccccttctgcctgaaaaaccaggtctcattgcattttcctttttcaattttggccttcttgggaaccaagtgaaggaaaggtcaattcctgtgtttggaacgatcggtctggtatttggttgtaatgagaagacccagcaggtgtttcaccaaaaaccggggtcagaaacgtggggtttgttgatttttgccttggcataggaaagccaaccaccaatagctatggtaaggagcagcggctccaggggctgacacccccaaagggagaagtgattggcagtacttcattcttcagcacacagagaaaagagcctggcttgaaacctgggtcccagatgccatgaagttaaggtgacactccctgagtgttgtttgcagtaggaacttccgccacctcccactcaaggcacaaaggggtaatgactgaaatctacttcactgtgggatggaagatttttgagctgagatttgtctgtggctaggccagcagtcatcagatactgtatgtcaggcaagatgcctatagcttaaaaaagactctagaaggctgctcaccaacacagtggaactaatctccaggcttctgatactagagattatgttctttttctctggattctttggacattcgaatctttaaatgatcaggaagctgaccctccaatgttccccagagctacttcccagctctcacagataaaatcccctaagcttcagaaaaggagtgtggctctgcggttgctactgggttgatgcagagagcacagagcaactgcacagcagtttctcttgtgtctggtggatagctaagcatggggaaagatcaagggtatgggggctgccgaacttcagttccaggtcctggctgtgtgacctcaggcgagttatttgacctctctgaatgtataaaatgggaatggtagagcttctgtatcacaggagtacacaagacaacacgtagaaagcacttacactaacaggtaatcaaaagtcagttttctccctggggatgtgagcagccacctggaaagagggttacttaatggcatagcgcagtgtgaatctccctttctgtttctttgcttggcattacccgatgattaattttgaaaagttactcaaacaattacaattcaacttggtcaacatcagttctcacaaatagaagctgactgtcatttattcactcagttcctgttggctgagtgttggctctagggctggcaccaggcactggaattaaacattctggactccagaggggcat

SEQ ID NO: 31638 - DNA, 2300 bp, Homo sapien
caaccaaaccttgagaatgcgaaacattccagaggcagtagcctccaaagcacacagagcccctggccccgccgcggctctcactatctgtcaggggaggttgtacaggtgaatgagccggggggctcatgttcctgcctgcagaacatttctgtactagtgagaagagggaatatgcattgcagttcagcaaagccggaattctgtgttgaacagatgtctgtctccctagtgtgtgactcacaccttgtggctgccttcagagcgccacctccagatcagatggggacacacaacccctggatatgtttcattgtcagattttgtgcttgattttaagaatggaattgtgggtatctttcctttttttttaatgtatcttaactgttgcctgtcagtgtttacaaactagtgcgttgacggcaccgtgtccaagtttttagaacccttgttagccagaccgaggtgtcctggtcaccgtttcaccatcatgctttgatgttcccctgtctttccctcttctgctctcaagagcaaaggttaatttaaggacaaagatgaagtcactgtaaactaatctgtcattgtttttaccttccttttctttttcagtgcagaaattaaaagtaagtataaagcaccgtgattgggagtgtttttgcgtgtgtcggaatcactggtaaatgttggctgagaacaatccctccccttgcacttgtgaaaacactttgagcgctttaagagattagcctgagaaataattaaatatcttttctcttcactgtgggtcactgactttgtgtgatgggggtgtgtggggcggctgggtggggaggaacgtttgtgggattttcatggctttagaggtcttaccagtctgcagcctcaggcaggaaatgtttggaacacaggattgtcagatccatcatgtggtggaagggaagccccagagaaggggctggaaccctcggttcctgctcccaaccataccgccagatcaccctctgacctgggtcacatccctgcccttctctgagcctaagtttctttgtcaactgaaaacactggaccagatgatgtctgcatcccatctacttctcaaattcttagcagcctgtatagctttcaggtaaggaatagcatgcatttagatgttaaaaatcaaattcccaaacatccaaattcattgcaaagtgaaaggcactgttctttgaaactgccttttgtacttttgtaacaattgtaaagttgtctaaatgtgcaatcccaattaaaaaaaaagtcttcgaagagtctaaggatactgcttcttagaaaagtcaggggataaaatgttagtctctaacatctgaagctggggctgcctcttaataattaaaagtccacaaatgactttgttcctatgtgtattttgggttaggaagaaggtacttttcacatcaatgggaatggtgaaccattcagtaaatggtgatgataaaactgggtgacaaaaatagtcttgcttaccttgtctttgcagcaaaaaccgtaagagggcaagaaaatactgaatttagccacacaaacgctagtgtttctaagaatgacaaaaatggtagagaatagaagtgatatatttgactatgtatttttaaaatctgttgaagagggaaaaaccaccagtcccaaaatcaaaaaagacaaatggcacaaaaactttcaacatgtactagaccaaagggtgtgtttgtttaacacctgacataatttgtctttaatacaggttaaatttttttatctttagtacaggttaaatttttttcatggatattatgtccatacatgggaaagttttcaaaatatgtgattaaaaactaagttacagaataatgcagatagtgtggctccatttttgaaaaaaagccacagactcaaggtacaaacaaggccctgaggcttagaagatccatggcagaagggaggtacctcttgttccttcatgcaatgaaattaaaggcttaaaaaaatctctacccaggatctgcatcagtttcagggaggaagatctttatattcacaagtacactttaaaggagaaaactcaagccaccttttatccctggagagagaagaatgcaggcagcattttcaagctaatcgtttattggcaatctgtgatcacaaggttgagcaccaaatcggagtcattttgggagaggagagaagctggactccaggcatgacccagacggagctgatcctcacacctccgttgaaggcagaatatctttgtgcacatcagcttcattctgcagacc

SEQ ID NO: 31639 - DNA, 2300 bp, Homo sapien
aactcgggcctgtcttcatctgcgccttctgcacccactccctgcagaggccccctgtggccgggaccaggaagctgccctgagcttgggggtgcagcgctggggtggcaggtgcttccctagttacccaggtgggagagggactggcgtatgactgcggagggaccagctgggtcgtgttggagctgctgccttgaaaaggaacaaggcatgttctgaaggcgtttcagtacaagctgaagcagaactccatgatgctgtgcctgagctgaaatgcaagcagcattccctgtgtgcccctcgtcctgagggaccgtagcccagctttggtcttcatttgcctgaatgaggctccaggaagatgggagtggaggaacatttggcctggaataagcctgggtgccggctcattcctacccagtgacattgaagacgcggtaggtgacctgcggaagtaacttccggggttacaggagaacggttctgaaaggagaccctgggcaccgtggtctcgggtctccagcactggcattttgcgaacccaggggtaggttcccctcagagggtctgaccgtggcctgaaaaagggagggtggcgagaccatctccctgccttcccccatctcacccatggggatgtcttcatgccaggcaggctcctgggataggtactcctggatgggtttaaaggccccactgagtttctctctgttgtctgccttcgccatgcgcattacttgggccaggttctttgcctctctggccatccgcttcctccggtcgggtgagcagttggtttggtggtctaggatgaccacacgccccctctggagtgtggctcacagctgtgtgcatgtcctaggtcccaggagttggtggtgcactggatagtttgtgtctaatgaaatggttacttagagcagcatgtcgtcctgggggctcagccttatgatgcagaactgagaactcactgccagatctaacaagctgtgattgtaggtggaaaaatgttcagcacggaagacttctggcttccctcactggggtgccactgctccctctgttccattgcctctgccctgcggggacctcatacctcacatagttctcccacttgaggctggagccaagcagggctggaaacctcagctgtggctgttaccggaagtgctgccttcctgatagataaggaaaatttgagctcaaaacaggcaaggtttctggtggtttttctttttcatatttcctcactcaagacagggcagagagcagatgtttcagcccttctggcatgtatggtggctgcctgggccatgcccctgtgatgggcatgcaggaccgcctcccttgtcttcagcacgcgccacccctcctgtcgactggccttgctcttcactgggctgatggctgactcctgaaaactgggggctgacagcagggagggtgacctggcccaggtcacatggccagtaggtgccccaaggacggttagttaggatgagcctcttgtcccttcatatggtccttgttctccagggaacatggtgactgagctgacccgtcccgggtgacgggagaggcagttgggtgggtagctccttcgtgcccctcagcccaactaagtggaccgggctgcagggctgccccagggcactttgcagggaagtttgctgcgggggatgggtgggctgaaggatggtccagagccagcctcgcaggtcacggtgtaaaggtgttttgggaacacccattgaccaagggtcgtggaggcccgtgctgggcttgtgtggggtgggactgggcacaggggaccgagagcctgtccccttctaccagctcataggcatgtgaacagcctaagggtgggcttgtggtcctcttgtgtacagggtcagctgaggctggggggaatggggtgggctcccagagggttcctgagctgactaggtaggtagtgagcatgtgtgtgctggagacaggccagctggggcctgcagcgctctgtcgctctgtgatgttgacatgggtgtggtacttaattatgacctcagtgcttcaagcctcggtttcctcggtggtgagagggagcatattggtgggagggagtgaggactgtggggaggggggctcgttgatacaggtcagtcttggctatgtgttggctgcaagggaggacaggcaggagtgtggaccggacaccgtcagttgtccaccagggatgaggctggactgagactgctgcagccccgctggttggctggggtggggcagaggcagggggccggtgagggcagcctcag

SEQ ID NO: 31640 - DNA, 2300 bp, Homo sapien
agaagcagtgtttgcaaggggttgaagttgcaatttaaaatgagaccggtgacactcatcaactaacatttgagcaattaagtacttctgaaggacacaggagtcagccaagtagatctcaggtaagagtttcaggaaaacaccctccgaagccagtacccaaggcaaagatgatacagatgaggggaggcggacaacggagtctaagtgacccggagactgtcatccaggaccctaatgggccgttttcaagactagcttttacttcatgaaacttggagcccctacagacaagctgaggaatattttacttcggatggatcactcagctacctggagaacacacaaggttaggaagaataggagacaggcaacatggccactaacccaggtgagccacgagagactgctctacagaagtaggtagcaagagactaaccttgatacaaccttaagcagaacagacctttcagagaagcaggaaccgctcacagcgtgggtttcagagtttttagctacccgcaagtactttggtttctcccacttttaccaccctcctagcccccagagccccaatggaaaacttgtacccacgctactgaaagacgagactagaagcttggacacttcacattccctgctctcccttccacaattgagccactgccctggttttagaagtggggcttgttttgctctgaagtaacccttaacgtccttagaagtagcagctcccctacccctctccccacgcctttgccttttaaaaaccttaacttttgagagagagaaacagcacaagttcaggcccagcagagtaacccctacgttgttgccagcaactacttcaagggcagttaaccgtgcttaaagacgccaaaagcatccatctcccgcttacaacaacatttagctaccccccacccacgtactttgctttctcccacttttacaaccctcccacccccagagccccgagggaaagcttgtacccattctactgaaagatgagactagaaacttgtacacttcacagcgcctgctctccagctgagccactacccgggttttacaagtggggcttgttttgctttcttaggaaataacctttaacttccttaaaagcagcagcgcccccacccccacttttgcctttcaaaagctaaacttttgagaaaaagcacgagttcaggcctaacaaagagtaacccttacgttcttgttgccagtaactacttcaagaaaaagcacttaaccgtgcttagagaaagacgccaacagcattcctcttccacttacaacaacattcagctacccgcccgcaccccgccaaatactttgctttctcccacttttacaaccctcccagcccccagagccccaaggggaaagcttgtacccatcctactgaaagatgagactagaaacttggacactttacagcccctgctctcccgccacaactgagccactaccctggttttaggagtgagacttgttttgtttaggaaataacctttaacttccttaagaccgacagctcccccatcccccacgccttttttgcctttcaaaagctcaacttttgagagaaaaagcacgagttcaggcccaacaaagagtaacccctacgttcttgttgccagcaactacttcaagcaagggcacttaaccgtactttaagaagacgtaaaaagcatccctctcctgcttacaaaacccgagcaggaggactggcggctgggcaacgcccgggaccggtcaaaaaggagaggccggggagcgcccgccacgcaacgcggtcacaggtacagagaggtttttccagacccccaccaaagcccgccagtactttcagcgtctttaagacccccccgcaaataaacttcctacagcccagcttctcctacaagctagcaacagaaaggcacccaccccccgactcccagaagcattctgacgcggctgcttgtctgcgccgccttttcaagggcccgcggggcgtgctatacgtcacttccggggcggggcgagcaaggcggaggcggggccggggccggcgggggaggggagcgccaggtccgcgcaggctcgccgggaccgcagccgccgagccgagcgcttgactatatatggtcaaagctgggggcgagccgcgcgcgggaccgcgcttccgggttcggggcgtccgcaaccacagcgcgcagggcaggcgcgagctggcctctgagccccggcctcggaccgcccactccactcccggcacgcccggtgccgccttccggctccagtccccgggc

SEQ ID NO: 31641 - DNA, 2300 bp, Homo sapien
cctgtgcagaaattgtggtgaagcagggccctctccatgtccaggcatatctccaggcagttggagcactccttcatctggattagcagcctatgccatcccaccctctctatgtagaggttgtggtttcgtggggccttctatactctatgcccaggcagatctttaggcatccctggggtacccctctcctggatgagcagtttaggcttcccttcctacctgtacaaaaaacttgaggctgagaagtttcccaattccatgcctaggcacacatctgggcacttggtggccacccaatggactctcccttgtgctggccactggaggacctataggtagtccagcctcaccttctttgtctggttccacccatcttgcctccaaccctcccaagtcttatcagaaagctcaggccactgtgtactctacacatcaccccactgtccaaggcaacagagttctcccagcaaaaggggatcaagtatatacccagctatgttagctgcagttggcttttacccataagcatcttctcctggcttgtaggtcaaactgcacagcctaatataaaacctgctgacacaagtgcacaggtctatagaagcaaagccaaaggaccttactcaacattctctacagtcacatcctctaaatgagggtaggaaagagaaaaaggaaaaataatcttataggttaagaaattaaaatttaaaaatcttacctgcatgaaaatagttgcaaaaattacaagtgccagcatctccagatgagatggaaccagcacaagaattcttgcatgatgaaaagtctaaatgtagtgacacaaaaagtctaaatgtactgatcacactagctctctccagcaatggtccctaaccaaaatgcaaactcagaaatgacagattaggaacttaaagtatggactgcaaggcagctcaatgacatccaagacaagattgaaaatcaacacaaagaaacttctaaagcaatccaagaaatgaaggaaaagaaaaatcttaaatcaatcagaacttctggaattgaaaacctcacttgaggtatttcaaaatacaattgaaaggtttaccaatagactggactgagcacaagaaaaaatttaagagctcaaagaccaatcttttgaactaaccttggcagacaaaaatttaaaaaagaatttaaaaaaatgaacaaattctgagaaatatgagattatataaagcaaccaaacctacaaattatggcattcctgagagagaaggagaaaaataatctggaaaacacttaagaaaatttctctaatctgctacagaggtagacatccagacaaaagaaatacagagaacacctgcaaggtaccatacaaaatgaacatcaccaaggcatatagtcaccagactgtttaaggccaatgctaaagaaaaaatcttaaaagcagctagataaaaggtcagatgacgtacaaacggagccccatcatgttaacagtggactcctcagcagaagctttacaagccagtagagactgggggccaattgtagtattcttaaggaaaggaaattttgaccaagaatttcatatcctgccaaagtaaagcttcataagcaaaggagaaataaaattttttccagataagcaagtgctaagggaattcattacagctgaactagccttacaaaagatccttaagagagttctaaacatgaaaaagaatgaatgatacctgctaccattaaaagacacttaagtacataacccacagaccctaaaaaggaaacacacaatataaactacaaagcaaccagctaacaaacttcatgataggatcaaaacttcatgtcaatattaacttttattgtaaacagtctaaataccccatttaaaaaggcacagagttgcaagttggataaaaaaccaagacccatccaacttctgtcttcaagggaactgcctcacacataatgaagcccataggctcaaagtaaaaagttggagaaggaaaacagagcagggatcactattatatcagataaaacagactttaaaccaacaacagtgaaaaaggacaaaggcaggcattacatatcaataaagggttcgattcaacaagaaaaatattccaaatagaactattccaaatacgtatacacccaatgttggagcacccagattaagaaaacaagtacttctagacctatgaaaagacttagacagcaatataacagtgggggactttgacttctcactgacagatcactgaagcagaatactaataaataaattttggacttaaact

SEQ ID NO: 31642 - DNA, 2300 bp, Homo sapien
tattagcgcttcaacgtatttttctgggaaacataattcaactcgtgacagaagtgatccacggaatttaggcaaactaagctggggggtggagaagaagacatgaagggcagacgtgtagggaacgtgtgatgattcacatttgcaagcatcaaaagacttttagggacatcagccttaaaggtttctgctgaagtagtttctatttttccttgaccctttttcaggctgtaaacactccatttccagacactccacaaagcatttcatctccctgaatttgggctactgaagagtaagttaacagtcacttctatctgccagggactgtgataagtcctgacttgctttctcttgtttaatgttgacaacccccttgggaggaaggacctatttttcactgaattttacatgagaaactgaggttcagacaggctcacaacttctatgtggccgaactgggatttataaccagttctcacttcagaaaaactcccaggagacccacaggtaccttacatcaattctgtgtgacttaagagggcagaactgtgatgcatgagtagaagttataaggagagttgcctctccttataaagtttaggacaattttctaatgtctagacctcagattctccaatacttagaattaatagtttttcctgatgtggctctgtttgccactagagattttcaggcagtggctcctagtttggattctcaatgcctttcccaacttgaccctactcttgagggagactttgaactctctggcatattctctctgataggtgctatctgcacataaatgtgtttttctgagaagaggttccttagcttttctgagccctaggagatagaaaaccaggaccctagcagctccctgatcaggaccgaggttaggagcactgcagcctagggcaggaagaaggatttgctctctgggctgctattttctctgcccagctcctgatactttagtggtggaggttttgcccagctgctggacttgtggctgagcctgtcttcttcaactccgcttctccgtgtggcagtactgcccaggcccacatctcctccgtgcagcatactggccgctgtccgtgcacgccgacctttggccgccaacaggaaggtgatggaaaccagccttgccccgcccccgcctccagagctttgaaataaactttagctgttcatcccgaagaaactgtacttcccagtgacgctgctcccatgcctcaacctgcccctgctggagagctgtttcactttgtggggagtcactgattgtgcgggacctggcaatatggtcttcttctttcctcttagaggctctattctaaatatgtcttccttccggaccgtagatgcaggtgtatctagagggcagttggctcgcccaaaatagcaccgaagtccaggaggcaggaaagaaactctggcattaaatgagctcacaccctctccagactcccacagtcattgtcccctctgaccctcgcaacgcccaactgctagaggaggctttgcgcctcacatacgaccttccccgtcttcagaaatgaagacactgagagaggtcaggggactttctcgccaaggtccagcagctaagatgtaaaggagtagggagagtcaggatttgtacccaggacttcaaggccatctccttcactgaagctctccaagaagacgagtttggaggctgaggacctgagctcctcttctctcgctttcactcacccactgcaggactgcaggctccagggaggcaggcgccaaggccgccctccgcgggacccggtacaaggcaggcgccccgggatggcagactgggccaggaccgaagccgaatccttcttttgcctgcggcatggctaaatgtggacctcgctcgctacggtgcgaacgtgttgggtcaagctctaagcccagaagtggggctcggctgggtctgaggctccccgctctggacagcttagaagcccggcgggggcgggcgcagccttagagacctcaggcgccggcctcgctggagccgcgccgccgcttcacattgcgcacgcgcggggctggcgcgggctccgccccccgggtagggacctacagcgggcgcggcgccggcggtctgcggccggcggtgtagacgccccttcgccgggacctggcacccgaatccggcctgccgggtaagtagctgagcgggagggcgagggcccccggatccgcgtgtacgtgaccgaagcgccagctgcggccgggtcgtgggggcgcgcggggcgggggcctgacggggc

SEQ ID NO: 31643 - DNA, 2300 bp, Homo sapien
atggccgctctactgtagacacccaagccttgcggagaagccctggggagacaccctttggggagatagggaggctggggcactaggcacccgccttgagaaccagggatccagtctgggcgttcagctcagttcagccctgaaataaccatctgaatgaaacagcaccagagacccctagaggaaaccccccagctgagaaccaggagagataaaaacaaaccgtcgttttaagctactgttttggagtggtgtgttaggcagcaacagatgactggaacagatactgtcggctggctatatcatcatcacaatcattgcttcatgcaagggcctttgctgttagatattcaggatacaatttaaagattcataggacctgatattccaccatgaagaacattcattgtaagtgagaataataataaatcagcaagtgatagtgggtgagcaggatgctaataagaggtcctctgttctgagtgtgtgcaaagtgctaagaggacacagaggagtgagtggttattctacttggagcaaatcctgggaaggggtgtggtggcattagaggagacatcctcacagaggcagtgacgtgagctgaccttgaggaacaatgggatgttaccaagcagcaaatggaggagacagtggggatagatttcctcaagtaattacagcagctggagaacttctacccagatttaatgtaaagaataacattaagactgataatttgacttctgttgctcaaaagctgattctaagtaattggaaagataatttgactacttaggatagatggtggaatttgatttttcatatctctcgattggcggggagaagaagaagctgcagtgcaaaatcagaaggagaataaaggcctgaatctggctgacaatttttaaaatcctgtgttggccgtctggattctgctgccctgaaatgcctccttttgggtaggctgcaattagaggcatttgtgctgccatttgttcccattgttgtctgtttgaacaaaaattctgtgaataacggaaattatacatccagttcatcttctgtagatttttctaagaactctatctgcaaagattcgaggagttttatgatgaagaaacatgaagtatttctctaccatctttgtcaaggtttcattttctcttttaatgttttcaattgctttaaatgttgattagatacaaaggaatacttataaaatatgcataaggcataaagaacaataaaacatattagatatgtgtatgcattctcagtttttatgaattaccattaattctgatgttttcattcctcctttcatgttcacaactcctcacccctaacaagcaaaaactatcctgaagtgtgggttaatcattcacttgcttttatctttagtttatatcattataaatactttggttttgctgggttttgagattcctgccaaaagaatcatgttacagattttatcttgcacccagactgccgagttttgataactggttctaccagttacgagctatgagttcttgagaaagttaagaagtctcagtacctgttttgtcatctgcaaaattaaaataataatagtgtgtactttgtagtattcttgtgagaattaaatgagctaatttgtataagacatttaaaacagcatctagaacataatgtgagctatgtaaatcttagttctgattgttctatagtctgttttatgactgccccaatgtacattccaaagataatccatgctattgtggatagccatatttatttccattttatggaaatataatatttttatgtgcatataataccatttatttatacactctccagtcaatagacacttgagttgtttcctaaatattgctaatacaagtgctgttaagaacaatccagtttacatgtcctaaagcatagattcaggagtatctgtacagaaggtatattcctaggactgaaatttctgagactcagcgtatgcacacctctgattttactaggcgatgtcacaattaccaaagcagccaggtcattttatgctttctacccacaagtgtgcctatgtgacccagttacttcatgactttggacaaagtcatgccagtccttccatactggcagttttaatttttacgaaaccagtgggtgattttaatctgtattttttgactatagtatagctttaatctgtattttgttgactatggtgtagctaagcatcctttcagatatttattagccattaagcttttctcgtctgcacacaatgcttgtcaaatcttttgcca

SEQ ID NO: 31644 - DNA, 2300 bp, Homo sapien
gctgatgcatggtatatattcaatagataataaattaatgaatgatattccaagaaaaaaagctttaaatatcacctacactattatcagctttctcattaaaccaaattgtcttcaattcttcatgagtaaaaagcagaaatattcatatcattagacttgggttcttattgcagtctagccaccaattggatgtgaacatgcatttttagattatttgccaatgaagaccacaataattcacttttcttcattcaccccttgaatagtcttctcccacatttactctgaacttggccatgtgacttgctttggccaatgggaccatggcatctaggatgcaagcagaggcctggaaaaggctggaggctggagtttcccctctcccactgcccttagtgccccaaacccaccgtgtacatgggcctagctggccactagataacaggaagctatgcagaggagaacagaggcacctggctgacatgattgccaacaaacagattcatgagtgtgataatcttagatcatccaactgcctctcaacccactagcacagaccagatgatcaggtcttgttatgggtcgaatacgtcccagctaaaattcatttgttaaagtcctaaccccccactaccttggaatgccttctgacatggagactgggtctttaaagaggtaatcaagttaaaattgggtaattagggtgagccatcattcactgtgactcctctcctgataagaaggggaaatttggacaaagacacagggagaatgccatgtaaacacaaaaacaaggatacaaagacacccacaagccggggataaaggcctggaacagatcttctcctcatggctctcaggaggatccaaccttgccgactccttgatctcagacttccagaggccagactgtgagacaatacaatttgaccttctgttttgttagccactcagggctcagtcctttgttatgaaaaccccagaaaattaatatgggtccagaccaaaagaagtgagcaagtgacacacacaattatgaactaaataaagtggttactgctttaagcccctaatgcagcaaaagctaattaataaagtggttaaactactcgagtctccctagtcttcagttttcacaattacaaaatgggattttacatatgttccttacatggttattagtaagattaaggaggataatgcttgcaagttgcttagcaatgtaactgactcacaattagcattcaaagagtgcttattttcatgttttccttggggtgtctgttaagtcaaaaccagagttatttacccaagaaaatataaacttctacctttgaatttattgtaaataatgttggagtttgttatggaattcaacatcaatttatataaaactagaatgtcaagtctccagaagaggaaacaggcactcggcaagatcagcttaaatggaccaagattaaggccgaaagaaaatgtattaagcaactgatatgtgcccaaacattactgcatgcctttatttacaatattttgtttatttattgaaatacttctaaaatataaatattatccttccatcacaattgaggaaatatcatttcctcaatgaaggaaatataatcctcaattatccctcattttttaaaaaagtttctaaaatacaaatattattatcactcaaactacttgagaaataaacttcaaagtgcccaagatcctatagctaataattaatacagcaagaataagaggcaggcatttctcctttagttcccaggttctttccttaacacctggtccatgtgtctgggatggtctcaggaagccattgcaaaattaagccaaaagatgatagttaatgtccactattcatataaagtgagactcgcaaaacccaccttccatgcttgagtgttgcccagcagttccttttattgtgttctggtaactatgaagtgccacataaggacaccgtgtgtctttaaaaacaccctttgcattggaagatttcagcctctgaaagcttcacgtattgcactccagcctaagaagaggaagtcctgccagccctcaggtcagacctctcaggtctgtggctgcatttcacaggaaaccaagtctaaaacggacctatcaggaggttttctgctgaagggcactgcttagcatcgagaagaattcaacccaccgccttactaatttccagtgccccaaggtctctgcactgccgcccctcctcacaggagacggacacctcagcctagatcccttggtgctctccacgctgttcaggt

SEQ ID NO: 31645 - DNA, 2300 bp, Homo sapien
atgaccagaagacttcagggagagctatttaggagcagtggcaaatgcctggacatacacataaaactaagtaagaacaaaatagccagttggtgtttttatttatctgaatgtaagaacatagattatcgatcaatgaacaattgctcagatttaaaaagaaatgaggaaaactaaaatgttagtcctcaaattcctgtcacttcccacatgtgccctgcagtcatttcctgcaaatggaaacttccaacaaaatctctgggctggagacctggggttccagtttctttcaaggtcttgtggtagggaactaagtgggtgagtaacctgcctttggcttccagggtgcaaacagaatcattgctaaccccctttgtgtctcacaatgggtaatgaaattcatactatggcaccaaagcactttgagctctttagaaaaagtaatcataccaacttagagcattaaaaccaccccgtattttgaaggactcatgatctgcactgtgcttggctgctggtggaagcttaaagacaccagtaattggcagaactttatcttagacttccatttgaccctcacaacctcacacatgattttacacagcttcctataatgggggagaaaagcccttcttttaaatctaatgttagtttaaatgctaaggctttcaaagtgggcctttaaagtcactttttagaatttgtatttttttttaacctaaaatagacatgccaacattattctgactaaaagaagtagacaaggtcattcaactcctaaaagcttattttccaaaagcacagttaggtctcagctttcagggtgcttctggctgtatcaaaaagacagaatatactggtcactgtgttgttttctgaaagtgccgagggtaatctgtgtatgagttaaagggccaatttcctataggaaccttctcttagatgggatttttttttaattaaacaatgttggtgaaatatatttaaacgtaaatcacaaattcgaagtcttccaaatatttatttactaatgtggaagacatggaaactacagtaatctcatttaaaggaagttactttgatgtgcatttgcttttggcggggtatgattgctgacctgcctttgagggcaacttcctttggctcaggtaagcaggcaaacccgtttctccaaggcgattccaaccccacgcccctcaaaaccttaaatcttaaattgagttattgggtgcaggtcctttctcccacagaacctcccagcttccggaatagaggagcggggcagaaatatcctgctttttatttcagagctgacgtttgcaatcctagtgcactagcggaaaaaaaaaaaaaaaaaaaaaaaaaaaaaagctgaattttccgcgctctcctggcaaattggcgtccgctctccgacgctaaaccaaaggaaaaggagtgttcaatggcgacagggcgctctttgaagccggctcctcacgcggattctggcccaggccgccgctccggtcccagtccggctgcagagcgaattggagaggatggcacctcctgcttcccggggggcggaaggagcgccagcgcctaaggtgggtcacctgccaggaagggaatacgcatggtgcagactcacgtgggaggagcacaggtcccgggtacaagtgccgagctggcgacttagagaagaggtagactcgggctcagaccaagcaggcgtaagggagtagacgggacgtcccgtgtttgcagtgacggcggagtcacccatcccagcagcctcaccttcttggagcgctggtccctccccttggactgaaaccccaggggccaccgcaccgggtgggcgggaccgactactacccgaccagccgctggagctgcgtgccaggcggggctgtgcggagcagctgagcgcagagcggagcaccaggcacctagcgggccggactctgggcggcacccgagcgggccgggcagcagtgggcgctcgcgatcctcctctgcccaacgcgctctccctccgggcccggcctcctccgtcccctccttttgctcccgctcctcctcccgctcctccccctcctcgggattgagcaccaaaacgcccgcctgcaaggtcctctgcgccctggcagccaggagtcgccgccacgacagccgggtctcagtgggtgcctgcgccttctccccgcccgcctgccccgggccatccagaaacttgctctacccgccgcgggtgctcggcagtgctgcccatggcccagcctaggagcctatttagggcgccggacgggctggac

SEQ ID NO: 31646 - DNA, 2300 bp, Homo sapien
tctcctaaacctccgtttccccatttgtaaaatgaacaaaaggtgcagctcctatgattcattttgcatagtacctggcactataagccttagatacactttagctggtattattactgattattgcccaaactcataggtcagttgcttttgtttctatttcatgccttttcactccttgagcctttatcttctttagaacagtttacaactgtgttaactcatgtctgtgcgtgtctgtaaaggtaggctaggagtgtttgccttgtttttccttgagataagattttatgctctcttagggcaatggagatatcttattttttcatctctctcttagtaactggcatagtgttgtacacatactaggtgctcaataaagacttcgagatcttaaaatattagcagtacagagatcttccactaaaaccctctcatttttcagttgttggaactgataaaaagagtcttgggccacacaactgactgacagacacttttgcagtcaactactactgtgtctcctaacagcctctattctcatgcccacggctttgaaagggaaacatgtttgacttaaaccctgactccttgagggaagttccatttacaaagttttttttttttttttttaagagcatagtatgtttcagataccatgcaggattgtaggattctgggattcagataccatggaggattcatcattaaatcacgatacccaagctcaaggcgtttataatctattagagaagacagatccctaaatagatgtttcaataatgtgattgtgttgtcataggagagctaagctctggcactacatgagcttctggataagaaacctaactcatgaccagaagacttcagggagagctatttaggagcagtggcaaatgcctggacatacacataaaactaagtaagaacaaaatagccagttggtgtttttatttatctgaatgtaagaacatagattatcgatcaatgaacaattgctcagatttaaaaagaaatgaggaaaactaaaatgttagtcctcaaattcctgtcacttcccacatgtgccctgcagtcatttcctgcaaatggaaacttccaacaaaatctctgggctggagacctggggttccagtttctttcaaggtcttgtggtagggaactaagtgggtgagtaacctgcctttggcttccagggtgcaaacagaatcattgctaaccccctttgtgtctcacaatgggtaatgaaattcatactatggcaccaaagcactttgagctctttagaaaaagtaatcataccaacttagagcattaaaaccaccccgtattttgaaggactcatgatctgcactgtgcttggctgctggtggaagcttaaagacaccagtaattggcagaactttatcttagacttccatttgaccctcacaacctcacacatgattttacacagcttcctataatgggggagaaaagcccttcttttaaatctaatgttagtttaaatgctaaggctttcaaagtgggcctttaaagtcactttttagaatttgtatttttttttaacctaaaatagacatgccaacattattctgactaaaagaagtagacaaggtcattcaactcctaaaagcttattttccaaaagcacagttaggtctcagctttcagggtgcttctggctgtatcaaaaagacagaatatactggtcactgtgttgttttctgaaagtgccgagggtaatctgtgtatgagttaaagggccaatttcctataggaaccttctcttagatgggatttttttttaattaaacaatgttggtgaaatatatttaaacgtaaatcacaaattcgaagtcttccaaatatttatttactaatgtggaagacatggaaactacagtaatctcatttaaaggaagttactttgatgtgcatttgcttttggcggggtatgattgctgacctgcctttgagggcaacttcctttggctcaggtaagcaggcaaacccgtttctccaaggcgattccaaccccacgcccctcaaaaccttaaatcttaaattgagttattgggtgcaggtcctttctcccacagaacctcccagcttccggaatagaggagcggggcagaaatatcctgctttttatttcagagctgacgtttgcaatcctagtgcactagcggaaaaaaaaaaaaaaaaaaaaaaaaaaaaaagctgaattttccgcgctctcctggcaaattggcgtccgctctccgacgctaaaccaaaggaaaaggagtgttcaatgg

SEQ ID NO: 31647 - DNA, 2300 bp, Homo sapien
tatatgtatacacatatatatgcatatatacacacatatatacacatatatacacatatatacatatatatacacacacacacacatatatatatatatatcctgagtcaaaaaggaagtggaaatgttagtaaatgccttgagtttgtaaacttgtatagacattctttaatttcctttatgactatgaaaataaatattttaccttcacagaaaggaaacgatccatagacatcattaaaaaacactgatgaaccccttatacaatagcattttattctcatgaaagaacaaggttatgtccagcactagagtctatcacattagtgtaatttcatggagcatcgatacttcaaacttttgtttttaactgcttttatggttttcaggaattttactgttgtcattattttttacataaatgtactttgtgttctctgtaaggattaagcaggaaaaaagtattgttttggagagagagagactgaggggtgaaagggaagaaggaaggaagggacagacagtatgaagaccattccagctgggcgcgccggctcacaccattaatcccaacattctgggaggccgaggtgggcagatcacttgaggtcaagagttcgaggccagcctggccaacatggtgaaaccccgtctctactaaaaaaatacaaaaattagctgggtgtggtagtgtatgcctgcaatcccaggtacttgggaggctgaggcaggataattgcttaaacccaggaggcagaggtttcagtgagccgggatccagcctgggcaacagagcaagactccatctccaaaaaaaaaaaaaaaaattccaagaagtcacaggtgaggaagccataagacaacatcctttttctctgtgagagaaaaaaaaaagtgacttttaaagtgcactgagtctgctgagtacttgtgaataatttcagaactgagaccctatagcactcttggagctgctgagccagctgccatccccgcaccccacctcaccaactccctggcttcccccacttgtgccagcactgccaggtggcactcagagagcctccaggggtgtgtctccggacctgccattacctacaggaaggggcttacatagaccagggaaagccaaccctgccttttcaaaggaacttcatgcagcctggggacttttttgacttctgtgaattgtatcatcagctttcctggttctcaggggataactatctatcttctacagaaaaatctttcttttctatagagagaacaatgctttctctctctctctctctctctctctctctctctctctatatatatatatatatatacgtatatatatatatgtatatatatatatacgtatatatatatatatatatatatacgtatatatatatgtatatatatatatatacgtatatatatatatatgtatatatgtatatatatctttatatagagagaggtagatacttattatatatataatccctctttacatgttcctcagttgggccctgagcactacagcttgtctcctttatctggaagctgattgcatgcctcccctctctccctggcacagcagctgggagcaacttgcacatgaccaggctttatcattttacattggaaataatatgtttccatccaggatttcagtgaagcttcatgttcaatcttttgggaagtcaggacagggggaaatgttgttagttttttcttaaccagaagaacatagaagccagaagagacagtactaagctattgtcccctaaaccagtttctggtggagaaaagtgaggctcagggaggtaaaagtgtctgcctcagttggttcatcagcgccagtggcagtgctctaaggagacgccaggcctccggtaaccactcagtgtcagaagttcaggcagcaacaggtgcatgaggaaggagtggggacattccagaaatgcagctgtcaggaattttttaaattgttttcctttcctcttgggccaatcattgggtatttacattcactgtggtcacctgagccaggtaccgcaattgcatgtcctggagtagaaactgatgtgatacccaagactaacacttagttccttctttgcctttaagtactaagtggatctgtgattttaggcaagtgattgtccctttctgggcctgtggtttttttgtttgttttacttttttgttttttaattatcatgaccaaaagtcttttattattaacaacaattgcacactttttgttgggaaaaaaggtatacaaattataaaacagttaacaatgt

SEQ ID NO: 31648 - DNA, 2300 bp, Homo sapien
cctggctggataaagcataatgatattttcaaatttatccatgtcttttggcgtagagtgagcatgcctaatgagtcaccaacttataaaatcgtgacatccttccagtcaatatatagtaattaaccacctactctgtctcaggcactgttctaactaggaaattagcagtgtatacaacagtctctattgccacagagcttccattctggctggggatgagacagacaatagtcatataaaccaacagacttgctagtttataaatactatgaagaaagatcaaacatgaagatcaaagaataattgccccatttactgaatgcttttaatgcgaagtcatttaatatacattttattctaatcccaacaaaaattaatatcatttttcattttacagaaaatgaaactgaaactcctaaattttgttacattatcaacattttacagtagaaaagtagaaacgcagactgggaattcaaattagtattttgaccacagagtcactttctacaacaatacacagtcccattgatctcataagcactgggcatactttcttccttaacagaaaacattttcttaaccttatttcggttataatggaagtaggcataacagtagatacttgttgggaaactataattgcttttgaaaacatattcataaatcagcacttccatacaagaaaagtggcacatgtgcagaatgattaatctgtaatacattttacaaatatttagaaatcctctacttcagtaccaggcactgccccagacaactggtataccaccatgtgcaaacaaactatggtctctgtcttactccacctggcatgaacaagtggaaacactgcaaggtacaggccagaaaaagatggtgtgacaggagtgttaagtaagaatatcggcattgaactcagtctggatctggaggtcagggtcagaaaggttaaagtttgttgaatctatgtgtgtttaaaacttttagacaactttgtactcattgtttaactagtattagataggttcttagacgatttaagtcagttttctaaaaggagtaatataatttaaaaaatgttacatccagttcaaggactcaacattctgactaggcatttgagtaaataatttattttctctaaatcatgggttcttcatctgttttatgagtctactaatacacacctatactgcttcatagcacagttgaaaggctgtaatgggagaatggatgtaaaagaagttagtaaatcataatatttacatatcattgtaattcactataagaattatcaattaccttttgctcgattgaatatagttatgaatgaagaacagtctagtcatgctagtcattacatggtgtataacaaatacatggtgttgtaggagaaaccagtatgagagatgacattccagagcagatattcaatggatgaattagtatttttggcttcaaatgtagaatacacaaatggcaagaagctgggaactactggaaatatttatgagaactaacttgtttggtatgtactatgtaccctgggcctttcttttcttcatgtaacaaaagggacattccattttccctgacagtagttttggcagcttcattgacagcactgtcatcattagataattagaattgtaagcctttacttttctccattttctatacaggatttactatacttccaggctcgtcttctttcgatgtatggaaggtgaatcacgtgaaaagcatactatgaattgttaatgtaaatagtttagaagtagtaatcatagaatagaatgtaacatttgccaaatgcttattctatgccatgcccttgattgtcttatttgggttcccctagaagcaggcgctcaaacaaggatttgagtacaagtcgtttaataaagagatgattccaagaaatgtaagtattggaataggaaaataagacaataggtaaaaaggctacggaaggtagattgtcagacaattactacagtgggcctgctttccctgagggaacctgaaacaaagtataagatatgacccttacaggcatcctgcctaacgaagaggacactggggcatttaactgccagtgcccagcagtcgtagttgagtcctgctgatgaaacagaaaacctgcaacctgccctgtttgcaggcagaacagacagttaaatatatcagccaaggaacagcaggggctggtagctgaagtttggacagtcgagcccgtaaatggtagggaacggatttgtcacaacatcaactttgcacgtattatatgatacttt

SEQ ID NO: 31649 - DNA, 2300 bp, Homo sapien
tgtcctccaataattacatttgcatttaatttttgtgttttcacttagattatagtctttaaaacataaatgtatattctagatttgcactaccacatgtggatactaacattttaaattcatattaattaaaattattaataaagtttaaattctagttctatcccattggccacagtacaagggctcaacagccacatgtggctggtggctgctgcacccctcagtgcagaaagttctatcagacagggctgttctcagtcatctggattgtttggacaacacgtgttgccataagatttcagacctccaattaggatttgtgtttactgacaaattagagctcaataataccactttgacaaagaacttaaagagaaccaagtatctaatcagcataatacattcccttcagcagccatattaaaaggtgccatagtaccatattggtgggagaacaggggtgacaccaggtaggggaagggacatggtaaagtatctgcaaccactgcagtaggagcagcagcaaaggtatcatctgtggcttctcaagccacccgagcctgacagcgaaatagagtccacaataacagtgagaaaacaggactgtcaggctctgcgggagcccctgccttctaaattccttccaactcattcagaaagtcacagagtgtctcctgtgtgcctgaaaacatacaggctgttgtttggaaagcaagtcctcttggctgtgggacagagcctgtcatgctgtcttcccctgctgcacccgctcaggtgacaccctctgccacttcctgctccaggtgatggatcccctggctcacactcaggcccctgtgcctaaccccagcctggagaagccagattgctgcctcctaaggtagaagaaatacctactatctgtatggctttgtctcattaagcaacatctttcaggcatttcagcaacaagtaattttactttatttttaattgttgtatctttctcttttcagacaccatcataagagcccagcaagaaacagggcaagaagactaaccaagtgctaagtaccatgctacactcacccatccactccacacctaaagtccttgaaaattaatgagcatcttcattttcttttccattgaggtacattccttcaggctgagttggggaaaaatataaatagaaacaaactaagaatccaagattccctccatatagaactgttaaatatacatttatacaagaaggaaagaaaacaaattagctgtggttatatcttgggcagtggggttcaattgtttgacaagtatttattgagtgctttctaggtgccaagtacaatttaagttattgaagatatggcagtgaaacacaacagagcaacatgtctaactttatggaattcagcggggagagacaagcagcaaaatacatagttagtgtatcagattgttccatgtaccacggttgaggcagaagaatagggtctggaggcagggaacctaaggctgattcacactgacttcctagaactaaattgaaaggaaaacaccaacttttcacacctaagtaacaaaaggaccagaggctactccctgtgcaactccctccctccccttttactgcatggcagatggaaaattgaaagtccctctgattggttgctttccacaaccagtcagacaaattgtgtgccaagtcttcatttgcataggcgtgtaactttataacttcaatttatcctctaattggcaattagacatttgcatgggtataactttgtaacttcagcctctgattggttgctttccacaatcaatcagactgatctcaggccactacttaatttgcatggggtgtacatcaagtggccaatggaaaacttctagagaatatttggacctcagaagaccctgtaaccagggcccttgagctgttgatcagcccactcctaccctatggagtatactttcattttcagtaaatctctgctttcattgcttcattctctccttgctttcctgtgcattttgtccaattcattgttcaaaacaccaagaacctggacaacttgtagtcaagacactccaccaatatcatggagaaacatgaagctgagatggaagctggggccagatgtgaaggtggaggggaaaggtgagtgctattgcaaacaacattcagcaaggaccccgctgacaagagagcatttgcgcatagggctgaaaaaggtaagggagcatccccagaccagtggagattgtaaaattccttcttggccctctctccttaaaatcctctagaatca

SEQ ID NO: 31650 - DNA, 2300 bp, Homo sapien
gtgggactgagcaggggccagggaagaaaatgacgttggtaggcgttctttggcctgaacatttctaggtatttgttacatggactgttttactttcacacccgtctgtgagaggggaattattgcctcctctcttagaggaaaccgaagctgagactaagtgatgatacgaaaggccttccttcagtaaggggtagagccaggggctacacaaattggttctgtgacagaatggactacgctggtgctggttttaggctgcctttcatttgtgaagatcacataactgacgcccttcctgagagttaaataggtcttagtttaagctgttcttttgagaagtggcgatgggcctgtgtggtccatccgccctcgcacagtgactaccttgaccagtagcatgtgtccacaggggctggtggtgggaagtttgccctctgatcactcagatgaaacaggaattgcccctctgtaccctcctgcctgcctttagtctcgttggcattatgtctctcccagctgagcatgagtggtcgttgagagccttttgcctcaaggaaagcagatgcagtacagcatatggccaaagcggatttctgaattccatattacaattttccccatacctcgggttttatttttgaaacagaaatgtaggattcatgcttattttactttgttacctctcctgtctgtagtttttaatttaaaaaattacaagtctttccatctagttttaggcactttgtctcctgaagacacatgctataaagtttcaaacacattgtggtcacttctgctgcttattgagcttttgaaaaacacagaagtcttcaaccagaactggtcattggatgctgcctttcaagtgcaccctctattatgtgtggccaaccactctggagtggtttttggagtggcccaaagaactcctgtgactgctttattattccaggaggaggtaagccagggccctttaaagttgatcactgaaacaatgtgatggagcagaatagtttgtgtgtcgtctaaaaatagaaaagttttctggccataacctgtgctagtggttgctgtaatctcggatatcctgaacaacagttgcaagatttaaaggaaactgaaatgcagacctgtttaacattacggtagacatccatgggtcacctccccagcacacatgtcgcctctccaaacagtttcctaatttcctgatagaaccctccctcaattttcaactgcttctagctcctcatgagggagtcctcactgaattaaacccatcaggatattaaaccccctcgccccagtaattcgctctgaaatgaactgataactccatcatagctaatgaaattggaggggacatttgctaaggtttctgaaaaaaggaaagaaaaaagaaatgtttgcccccataagttttcagaagactctttgccagctggactggaatgagaaaggctgtggctctgagtgacactggcggccatcttgaggccacaaggggagagctcgaccgaggatggtgctgatgacaagaaagcagaggtggaaagtggcgatgattgaagtccctgtcaccatctttgagccctggatccagccatgccttgaactgttcagcagagaattaatttttatttatttatttatttttatcatttagaccagtgttattttattttttggttacttcttatattggcacctattatgtactagggcctttgcttggtaccagaaacagagatgaatatgatctgtgttttgcccacaaattcatagtctaggactcatcaaaatgtaatcagattgttacatgctgcaatcaaactaatataagaagatgtaacttagcagtgagtgtgggaaaaaaacaggaatttcaaataacaggaaacagggatgacagtgtaacacagttgctctcacaaactagcataatcgtagcctgcattaattaggggtgtgcctatgaatcacctgtggatcttgattcagtaggtgtggggtgggtctgaggttgtgcatttgtaacaggctcccaagtgatgcaaatgctactggcttttggattacactttgaattgcaagggattagaccatgcctgtatggatgcccctctttaaggggataataaatcacattcagattatagtgaggggattcaatgtcataggaaatagtggaaggaagacagtatgtttaatatggaaaagagaaggcctcacacagactctgctgatagtcttcaaataagtaagagagtgcgctttagaaaaacattgtatttgta

SEQ ID NO: 31651 - DNA, 2300 bp, Homo sapien
gtaggtaacacaattcatcgccaaagtaccatattattatttcccataacaagaaaccgagaagatagagtgaacaaagtgtagtagttccaaaaatcctgttcttacctaataatgacagcaaaggaagggaggaggaggactcccctgtaactctccttttttcttttccttttttttaaatggtggggggagggttcttttacaaatgtcttccaaaggacactgtcttctgtctcattagtccggtggatcacatagctatctaaggaagactggaaaagaaattttcttgcattttaactgccctcatggacaagaagtggttaagtctgtcctcactggaagtagattcttctcactaacaagtacatatcctctttcttctaattcttatgaataaatctggtgaatagaaaattggtggtggcaatggtggtgcgggattggggaaagaattgggtactaatacttaactgggtacctataattgtgggccagccctctctgcagatgaagagactgaggctctacataagaaacttgtataaggtaaattggctagaaagtagtgacacttccaacacggaccatcatctaattatgatgatgatgagggtgatagttacactggttaatattgagtgcttactacacaccaggcattgtgctatctactttatgccgattatttcatttaattttcaaacctacacaaaggcagtagtctgttctacaggtgaactaactgaggctcgaggacacatatctagtaaacatgagattaaactccagtgatgcctctaggtctgggcatttctttacactgttctgctttcctgttctaatgcccatatggtctccaagactactgcctctgggctaagcattttgttaacttaagatacttcatctgcaaaatggggataattatacttcataattcctaatagtagtaaaggtaacaataaattttaagtgattaacaatgaaacaaccatagcaggacagcattattatttttgaatttacctcactaaattgtaaatttcatttatgccgtttacctaacgctcctggactgagattatccagggcagcagttcttaaattttttggactcagggcctctctataatgttaaagaattactgtgacctccaaagagcttatgtttatgtgggttacacctatcactactgcattgaaatgaaaactgagaaatgtttaaaaacaacaaacgcaagctcccttagctgccagtgatgacgtcgtacacaaagcgtatcctccaggaaacggtatactagtgagagaaggaacgtgagaaagacagacaaggtgtccgtattattatgaaaattgttctgaggtcatcgggatttccagaggtccctagaccacactttatgagaactgctgccttagggtaaagatggggtgccaggaggttggcgatcagtagcgtctgatgaacgaaccatgggagcctggggttgttcagatgaggaaaccaagagttaggccgaaataagcagcgccggagctccactgtattcacggccgctactgaggcttcccagcagcctcggcccttagcagctgtcccctcatccgccccgaggtaccctcttccctggtccggtttttcaggggccctctctggcgctctccgccaggctacgggcgtcccgggtgcccggagacaggccccgccccgccgccggtcctcgaactcctggctgccaggcaaccctggcgcgtagcccgggcgtcactgctccaccccgtcaggctgaaccattcccttcagagactttctcaagagggaaggagaaaagggaatttgatggaacgcctgaaagctgctctgctcccgttttctctccttaatttgaacgaacacttcttttcttcttctagccaactgtctcctgaagggaaacgcagcgcctcgcctctcccgccggaatgtcccccacaccagtccagggccgcgagtggttcggctcgtcaggcggggccgccggtcggcgcgggttggctctgaggcgggggcgcgcgcccgacgtgcgcgtagggggcggggccgcgcgcagagggcggggaggtgggcaagatggcgcttgccgagtgattctcctcgaatacctcctgccggcgcggagacaccggggcgggggtcctgccgcaactacctcccttcctcctctcccccgcccccggagccttcatccttcccttccccccccacctcgaggggcgggcctggttcccgggacaccatgtcggactctgag

SEQ ID NO: 31652 - DNA, 2300 bp, Homo sapien
gtggggggcgggtggggggcgggggtgcagggagggggaggaaaggaggtaaggtgagggaggggattagacctcttggggtcctggcagagcagcttctcccagatgccttgttgaggctagagggatttagacccccgtacccattgggatcatgagcttaagccagtgctgcatgttggaatagttgttttccagcaattgctcttgctctctggatttccagcgcagggtttgacacataataagccctgaaatgttttcagatgaaatattcctacgtgaagcattttatgtttcaagaatggattctccacgcgggcgcggtggctcacgcctgtaatcccagcactccaggaagcctaggacggaggatcaccaggtcaagaaatcgagaccaccctggccatcatggtgaaaccccgtctctactaaaaatacaaaaattagctgggtgtggaggtgtgtgcccatagtcccagctactcgagaggctgaggcaggagaatctcttgaacccgggaggcagtgaggttgcagtgagccgagatcgtgccactgtactctagcctggcaacagagcaagactctggacggactccacctcaaaaaaaaaaaaaaaaaccaaacaaacacaaaacagattctccgccgccagttctcttgaatctgaaggcaggtagtattgattccctgagagtcagagaggcaaaagaagctgatgactcgtccaggagcaatcatttggaaaagctgaacccagtgactcaggcctgacatctttttgatactctcaagagggaaggcaatgaaagcttcctcctgaaaaatccccattgaaacagaggtggatttggagccaggctttcctgaagacctagttcacagttctttgctgaaaaaatgaatacctccgtttccaaatacaaagatggggtagtgaaagaattacatgcttcttgagtatttggcaccactaaatacttgtagcctagctgataataagttttgcaaagttaaacaaggacatgtaccatttaaaaaatatatttacgaagatggtaagaggtggacagaaagtgtggagagactgtaacaacagcccaaacagtgagaagtcagcccccactggaaaccttctttgaagtaataggttatgtgtatcccatctgcaactgcaattgtggtttaaaaataaattcaatatataggcttttaaggtttagaaaagaaatacattgagggggagcttcattttccagggcattccctctgtccaaaagaatctgcagaagaatttttaaaaacaattctttcctaagatgtctaatattttatttatattattaattgttttccatgaaatactgcctgcagtgaggcacttcctaaatacacttgtctcatttataagaggcttgagccctgctgtcagggctcaggcctgaggagaattcaagccaagcacacattgggaaggtggccacaggatgcaggaaggagaattggagtcctatccttcaaaaggtggccagccaggggaaaatctcaacaatgagctccgaggaaatgcgtaaacagagatttctttaaagagaaaaatctttgttgtgaaatccttgtctgttctctctttccttctttctttgctcgttcatttatttagtgctcagatattcagcaaaagtagctgaaagcctactctgtgccagggatgcagagaagaaagattgcccgcttggtggagtttacagtctagtgggagacaagaaatggcagtgccaaaagaaaaataaaatatgctgcggattagcgcctgtgaggcgcagtattatttagggagttagtgaaggaaggtcactggaatatcagatgtttgtaagagcgcttttcgtggctgccgatcctaaggccatgtcactatctctctgtctccatgtctgcctgactgatcgtcgctatcctggacttagtctctgtccctctgtgtccctacgtttcagtcctgattcgctggttgccaaaggcagggcggtgggggcagaggccaggccccagctctaggtgctagccgttcctccttaccccgccccctttcttaacgaccgggcctcttccggaggcctgcggcagagtcgcctaagcatttgaatggacctcagccctaggaccctggcgccctcggaaaccggatctgaggtccggatcactaacgttcagagatgcaagggaagccgagaagttgccgaaagggcctgagagctgcttctccttctccctgggcagcaaacctccaagcc

SEQ ID NO: 31653 - DNA, 2300 bp, Homo sapien
aattctggaatgtaagaactgggcaaatggtcctgcagccccgcactccaccttgagtcctgccgtttctgctttttgcttggaggcggtcggggaaaggtaggagcgtggcttctggccacccagagccgacccggaatctgcggccactgcgaaacgcaccactctgttcgtgttggaatttaacggtttaaagggaacgcacggtagctgcgggagtgagggtgtcaccttcccttgagcctcccgcgaggtaagctcgctcctgagctcaaatgtttcctccaagcttgcgtgaacgtgcgtgacgagttctccaggctcaaagcccgctctcctcagctttccctcccactccatgcccctgctcgcagtccctggtgccgccagcagttgcggtttgtgcgcccgcggagccaagagcacctagtctctgcagccctcctggtcccctgtgagcgcctgcattaatccgcactgcttctgcaatctcgactttaaactctcggcatgaggatccggcgctgggttctgtgctgcggacctggggggctttttggtgagttctttccgtctctgtcccggcccccttctgtggctacactcagcctctctccttaggaccttggtgtgtgcccttgcgcctagggggaggatgcacgatgtggaaacttctctgctgcctgagtgggaggtggtcgaatggggctcaaagaccccataggtacatagagtaaggccgcctgaggacctgagcgggctcctcaggtctgaggcagctctaccactgacttggtgaattttaggcaattaacttctgttctctgggcccccattaaaaaaaaagttgtaagactcctgagtaacggttagagttcagactcacctctggcttgtagtggagtaaaggacaaaggctttttactttaaatattgagtcgtgcctttcctgagcacaatttttgtttgcgcgcgggggtcggggggttgttattttaaagatttgggtcgccccaagttgctgccccgcagatctccccaggaaggtcactgtatctttgggcctccgccatcagccttcctgggcctgagcggtcagctgtttcggaaagtccaggttttcctcggggaggacttcaaactcactgcgctcggtagggagaaggcctgaggctaatcctcctctgtggccgcaccagtctctggagaaccggagagtcccctgtccttagatgaaaaacgcgctaagacaaaaaaaaaaaaaaaaaaaaaaaatcccaagtgtgttctcgccagtggtccaccagaaagagagggtgggcagcccgctgtaaaacgagagccaataaagccgctcattttaataagctcattaacatttttgagtggctttccttgtgcgcaccaaggcctcccagggaggcgcgggagagctgggcagcggggtgattgcgcaccaacacccacaagcacaagcgcgctggggtgccaccgctttcctcacagaggacctggccgggcaggagtggctgggcaatgcccacaatgccaactcggaacctcagcgtcccccagcggtccaacctcattgtgcgccgcacgctggactgtggccattggagattaccaggctgcgtgggttcagaggtcgctaaggagcttgggtgaccatataaatggccctgaattgtccccgaagcttcgagggatcggcaggcctggggtttgtgccggtctacttccttttggcttgtgtttttgggaagggcgtcaatggatttgatgctcttgagaattcaaaaaccaagtagtaaacctgctcacaaacgggtcgagagtattcctgccaaagtcaggctgcagcaggacgtcctccgtgtgcatcctggatggggtgcagagctgtcaccaaggtgactggcttctaggaatccctgtttgcggaggaggccgggggcactgcccctcctcttttccggagaagttgagcaatgcattcttggaccctaggactgcgagaaaggaagctagagacacacccacacagaggtggtgagaaagaaaaagacgttccggggcagagcagatagagagagcgggctgcagggaggacctcacttggccaagttctccatatgccttcaggtactgatttgcaggtcttaggtcttcactgagtcacccactcccctagtttgaactaacagtccctcctgagcaggtcccagagtcctgacccttatcacctgggctcagtgtcgggctctggtgctgtctggcctagggacctctgagaatac

SEQ ID NO: 31654 - DNA, 2300 bp, Homo sapien
gagaacggtaatttaaataatacagcgggggaggagaggacacactgtttttgaaagactgtaagcattctgctgttccactctgcgtccttacacttgctgagcactgacaccaaatttaaatggcgttccttcaaaactgatgtaattgtaaagagctgtaaagggcaatgacctcaagtggatgttttttcccaggtaccctacaaggtttgcacaaagcaagaaagcatcatgtaaccgaaatgctgaaaagtatagatgctgcaaaacctcattctgagactgagaactatgaatagtcagtgtatttccttctgcggtgcagaaaaagaacaaccaaaaagaaagcaacaaggggagatgttatttattttaatgacaccaaaactaccaatcctagcaatttaataaattaaaatcatagtcctttaaatgtatttaatggttcaagtttgtgtatttggtgttaactctctggtaaagtttatggaaaacagtgaagtacgttaattgagcaaattttatattaaaaaaggaataacacattttaaaatgtttttatatacccacaatatttgtgtttcttagcttggttcctactattacataatacaatgcatttcttattttttaaagagcaaaaagtgttgtcacttctggatcactttatggtaattcctaggtatacttctaagcaaacaaacatatctatttataattttattcaactcacaagtaagagatatttaaaaaaaacaaattgaaagttttttttttcttcctgatgcaaaacttaacaaactccaattaaattcaatattggtctgccagggaaacgaccataaaatttacagaaattctcccaaagatgcctttcaattcttctcctgactttagttctaactataccatttttttataattcctctataaaaatcgaatcaaatcaaagacgacgaggaaagaaaaatatttctagagtgatcttaattaactgatcatttcagcaaagagcattagcaatgaagaagcggcgaaactgtagggagaaaaaaaaggatgcattttgttcttcgtgtttataatccttcctagagaacagaaactacgagcatgatttatggaactgcattatcttggattttctccgcagatttgactcaacttagtatcagtgttctgttaaagcgctggaataagtggatacatctgcagaggtaagaaacgtggtttgggtcggatgagcctccttgttgctggagggtgcttcgaggaccaggcttaggagagaaggggttaagtcagaccctgtctttagcggcgcaacgtgcccagttttgtctgttaaagtcaacgtcgcccaactggagccagccaatggacggccgggagcgcccgggacagcccagtggaggggtgtggcctcaggctgtcactcagcagtgaggaatgacacccgggcgggaggggggtggtacagtggaacgcaagggaaggaaagagaaaagaaacagataaaaccagggcagggggtaaaaaagttccccgcgcctctcggaatccagcggccgcggccgcggctaccgccgccgccgccgggggtgggctccggaagagcctgcccagcagggaaggggaggacgggccaggagcgaaatcctgcaggcgaggaagggacagacgcgcaaagaaaaagtgactcgggctgtgcgccccggcggcgctcgggaggggactgctgccacggaggggcccccgccaatcctccttcacgtcccccgagggggcagaccccagcccgcccctaagggcgagaagcgatgagataatccagctgagctgcgaaaggagagcgtctggctctggattcggggggagggggtctccgggcggggtgggcctctaaggtgggggcgagggtcggcgctgatcctgggacggagtggggcgggagctgctgggccgcgcagcagtgggcggcggcggcctcgcacacccagctcactcgcgctgcggccgccggcgctctctgtcccgctcggagctgctcggcgccccagctgcccgccccgccggccgctcctgcccgcggcgcagatggctgtgcgcggcgccaacaccttgacgtccttctccatccaggcgatcctcaacaagaaagaggagcgcggcgggctggccgcgccagaggggcgcccggcgcccgggggcacagcggcatcggtggccgcggctcccgctgtctgctgttggcggctctttggggagagggacgcgggcgcgttggggggcgccga

SEQ ID NO: 31655 - DNA, 2300 bp, Homo sapien
gaaatttctgatctttagggtgaaatacctcagtttctatcatgaataaattagtttctaaaaaaccattcctagccgggtgcggtgggtcacggctgtaatctcagcactttggaaggctgaggtgggcggatcacctgaggtcaggagttggaaactagactggccaacacggtggaactccatctctactaaaaatacaaaaattagccaagcgttgtggcgggcacctgtaatcctggttactcgggaggctgaggcaggagaatcacttgaacccgggagacggaggatgcagtgagccgagattgcgccattgcactccagcctgggtgacaagagtgagactccatctcaaaaacaaaaacaaaaacaaacaaaacaaaacaaaacaaaacattcctttggcgccaataaaacacacagggatgcctgtgccctaaatgatcatccagcgagagctctggttatatactcacagcaagcagctgtggaatgcaggatagggtaggaggtgggccaggggcttgctgtggcctccgttctgaaaccgatcccaacacgcccgcgtcctgctccagtcccttccccttggccctggagcgaggtgagtcttcaatggaggtgttgatcgtgcctgggtgagtttttaaaatgaaacatctccgctgttagatctctggcagcgcgaggctgtgtacacgaaactagaagcaaaacagtccgtttcgtgtactacttattccagtacctccccataaaagtacgcacaaccctagagggatgcccgctaggtggcgctcgtcctccaccatacccaggagggttcgaggctggcacgtctttttaacaccctgaggggtgatctccaaccctggctttttaggtaagaaaactaagccccaaagagggtcttgcgtgaggtcgcttggctacgtctcagaaccgcgcgcacaatctggtttctgaacctaatgagtttccatcacctggctgtctccctctacacacggtttagtttgttgattataataaaatggtgtgtttccttctttctacacaacgaggtttacgttcagatccgcaggccttggtgtgatttgttttcaaatgcgtggaacagaaaaaaagtcattagatttgtctgactaaattttttctttgattaccttaaatccgaacgaagctccttttccaatgaataagcaattaaaaatgggtaaggtctatgatgggaaacaattaataaggttaatgagaaaagccgattagagtagaaaatccaactggatttgacatcagacaaagcctgatttaaatcctgacagccacttactgatagtcaggagtctcagtttcttcatctgtaaaacgggcataacaatgttttctactcattccaatcccaggggtgtgtacattcaatgaaacaataggctttggttcctggcacactgtcagtgagcaatatttgttaaaatataaaactaccttttatattattatttatagtattataagctggccagttacaatacagcctctctctgcagtctgatatattttgatcgtgtgcatgaaaaacgctgcagggcgctggattactcaggaacgcaggcgcgggtgctggacgcttgggatgcttaggcggtttggatcgccctcgggagtctgcggattgggaccgacggtcagtgctgggcgcgacctctgcctggacctggctctggggagccggcaacgctgcccctccctcccctcgcccccgcccccaccccaaacacacacacacacccttcacttgctcactcagtgaagcaccgggttcagaaggcaccgggtccaaaccctcgttttaaaggactggaagctagagaaggcaggtgacttcaatcaaggtcaccggcatctgagggacgaaccccgcatggcctttcgttgctgggcagcacccggcgcgcgcgacctccggccgctggcgtcagggaaggcggcccagggcacaggtggcgggcgtcgggggcgaggcgcgcggtggcgcagccaggaaatcccgagcccactgggcgcccccctcgggagcgcgggcacgtgtgcagcagtttactgcgcgcccccgagggccggggcttccccttccccgcccccttggctttcgcagtcaaatcccgctctccgcccgccgcccgcggaagtctcaccgcgcagcagcacccccagcccgggcggttccggggaccgaagggcgcggcacgtagggggcccgtaggatccaaactgcggaggagaagcaggaggag

SEQ ID NO: 31656 - DNA, 2300 bp, Homo sapien
attctgagcctttcccctcagtttaaaaaaagaaaaacagtagaattgataagatttgccaaataggaaatcttattacagaatcctatagagtttttaaataaagaaaaaagaaaatcatgcaggatttggatgggaagggaaatttatggaattcagaaaatttttctcttatttattcttactcttttgccattggctgctttaaggacaggcagaataagcacaataatttgttaaactgaaattttttcaaaaagaagatgctgcatgcttttgagcttctgggtgaaattaaaaagaatatgtaccccaattccttttggcatttgtacaaatagccaggttatgtaaattaccttctctcttctttctttttgcctttaaatttttgtgagactatccataaatatcttttatattgtatatttaggttgaaaattcaggcttcagaacaaatgaagaaattcatagcgaatcttataacaaaggaggtaagttaatgaatttcatagttatagttttaatattatagttaacatttattgagtgtggtctgtataccaggccttgtgttaattattttacatactttctctcatttaattcataaaaattcagtaaagtgatagttaacagcatcaggagtatagttgaggagaacgagtcttaggccaggtgacttattccaagccatacagcttaaaagtgatgtcttgctttaaatagctactagaactttgccattaatctcccagttgactcaatccaacataaatacaaaacgaatagccccctgtggattgcaagtacccaactgtgaaatgtgttaacttctgacaggcagtttaggatggtagcatatcaaggatgtcacatttatgtgggtcttctcccaggggtgaggtctggtggccacacaacccgtgcaggctgccaactctgaacagaaaattcccttctcaaacagaacatagaattttcttgatgcctactaattttgttaatttcctattataggagtggggagagaggcttatttacttagacagttatttttataatgtataccatatttcaaacaaaagtaaagcagtaataaacacctatgtgcccccaacctagttttgccctatcttacaatttagtatatttgcttcacataccttttaaaaaatgttaacagttatggtggaatccccatttaccccttcccaatcccaatctctttccttttaatcccactccaaaaggaaccactattctgcattaattatatataggtccataaacaatatgtaacctatgttgcctgctttaggtaaatatgtggtctcacgttacataaaccctccccaccttatttgctcattcagcagcgttctaagattttgttctgttgatttatattaactctaattattttaattgcttttgaatataccacagttagtattttttgcttcatttgtacattattttgcacatgtaggtattttgaaacttttcccaattacaaagaatgctactgtgtatgttctcatacctttcccagtgcttatgtagtgtacttgtaattctgggtatggaattgctcagttataggcacctcttcaactttactgcatgtgctaaattgaccccaagtggtgtaccagttgtcactccacaccatctgccatatttggtattgtttggtgactgtttgttagcctgatgattatgatgcaatgattcattattttcagtgatgcttcttaatactgtgttgctacacaaactggggggaagggccttgaagtcttctgtgtaaagtccagtgttgttaccccagacatgttactgaccttcttgaaccccattccctcacatctacaagtggaaaaaagagaatttaactgacagagttgtgtggaggatcccatcaaaaatcatttgtgactatctaccacaatgccctgtatataactggtactcaataaagttactaactcagttttctcccagccccctaacacatacctaagtaagtattggaatataaaaatatttaagatttttttttcttttttgtatttattactcagagatatccagtggtagaaaagacaacgcagaagccataagcggtcacagtgttgaagcagatcctaaagaggtgcattttaataaactcaagtgtttgatattttatacataatattttcactgtacacaaagaagggctttagaaaggctttatttctttgtataaattaaatattaaatgggtatactgagagttccacatgtcactttta

SEQ ID NO: 31657 - DNA, 2300 bp, Homo sapien
ataatgcaaaacgaaagttgttttggagcaaactcttgctctatcccagaaatgtttctccatacccctgcctgtccccagatgctattgcagcttacttccaaaaggctagtctgaggataagggcccactttacaccatttgctcttgtctcttgctcaggcttttccccagtggctgcacagatactgctctcagcttgtataacctcatctcagtctctctgtgcaacattcttcactgtggactacagattttaagggagatcctcaatatcagaaaggataaaggcaggagctcttaaacgttttggtctcaaggaccaaaaattactgaaaaattaccgaagaccccaaagagattttgttatatggcttatacctgttgacatttgccaaataagaaattaaaattgagaaaagtaaatattaagtcactattaattcaatataattaactcactataagttaacaactcttttttcatgaaaaatggctagattttccaaaaaacccaattaagtgataaaagtgacattgttttgcatttttgcaaatccctttaagtctggcttaataaaaaacagctatttctcgtatctgttttcacattcagtcctgttgctgtttattgttttgattaaagtaaatgaagaaaatccaacattacagatagacggttgggtttttgttttttgttttgttttattttgttttgttttgtttgagatggagtctcactctgtttgccaggttggagtacagtggcgtgatctcggctcactgcaacctctgactccctggttcaagctatcctcctgcctcagcttcctgagtagctgggattacaggcacacaccaccatgcccagctaatttttgtatttttagtagagatggggtttcaccatattggccaggatggtctcgatctcctgacctcgtgatccgcccgccttggcctcccaaagtgctgaggttacatgcatgagccactgaaagccactgcgctcggccaatggttgggttttagtagccttttcagataattatgggtacatcttagcctctggaaaattccattgagcactcatgagtctgtaagacaaataatgttagtttggcccttgtggattccttgatggaaagcctcaggaattccccagagaggctggaccatactggcttaaggaaatggaaatgagaagaactgtgacagtgaggaattatttctaatttgtattacaaacatgattgtgtattttcttctgtttcccacaatatttttttctaagtactaggaactatagagtatgtgaccaaatttaagccagtcctcaatttttttccacaatgttaaaatgtccatgcaagtcaggtggagtaaacagtcagggtgatttttgttgtaaatacttataacaaaaaactctataggcatttgcttaaagggactttattagctcacaaaactgaaaaattcaggtaaagcataatccaagaggatgcagatagctccaaagacacatctagtagaaactccattttatgtcttcttcctcatcccctgaataagggtcattgctttctcattcatagcctctacttttagctttggcttaccattcctggccaaaaacctgagacttattctgatttagcataagtacatgtgtccaccctaaacgaattactgtgaccagaggaatgtagcttactagttgacttaagtcaggtgctgtgttcctggatccacatggtattccagaccacagtctgggctcttgggaaaggtgccaggagggcaactgtaatgtctactgtagttggattggctctttaaattatttccctgacaaacatcaagtctgctacctgtgagtactagggaaatcaacatggaaatgactgatggaagtaagtcattcactgaaatcaacgtgcaaataagtaaggtactataataaagatacgtacttgactgtgggagtcagcttccctgaggtagggcctcagggaagacttgtgttggctcaatcaatctcttcccccaccccatcttctttaattatagaaagtaaaatatacagaaatgcataaaaagtttcccactccctatgagtaaccaccttcagtacaataaaattatatttatattgttatagaattttttttcactcgatcatgtattgcaggcacccatcattactttattagcatatacagatccactttctttgttttaatagctaaataatcatccctaataccaattttaggtcttttaatggcctcggggtt

SEQ ID NO: 31658 - DNA, 2300 bp, Homo sapien
cagtgcaaaagggattgtagaaagcagtgtgaccagtgcagtctcaggaaaggatgaagtgacaccagttccaggaggttgtgagggtcctatgactagtgctgcatctgatcaaagtgacagtcagctcgaaaaagttgaagataccactatttccactggcctggtcgggggtagttacgatgttcttgtatctggtgaagtcccagaatgtgaagttgctcacacatcaccaagtgaaaaagaagatgaggacatcatcacctctgtagaaaatgaagagtgtgatggtctcatggcaactacagccagtggtgatattaccaaccagaatagcttagcagggggtaaaaatcaaggcaaagttttgattatttccaccagtaccacaaatgattacacccctcaggtaagcgcaattacagatgtggaaggaggtctctcagatgctctgagaactgaagaaaatatggaaggtaccagagtaaccacagaagaatttgaggcccccatgcccagtgcagtctcaggagatgacagccaactcactgccagcagaagtgaagagaaagatgagtgtgccatgatttccacaagcataggggaagaattcgaattgcctatctccagtgcaacaaccatcaagtgtgctgaaagtcttcagccggttgctgcagcagtggaagaaagggctacaggtccagtcttgataagcaccgccgactttgaggggcctatgcccagtgcgcccccagaagctgaaagtcctcttgcctcaaccagcaaggaggagaaggatgaatgtgctctcatttccactagcatagcagaagaatgtgaggcttctgtttccggtgtagttgttgaaagtgaaaatgagcgagctggcacagtcatggaagaaaaagacgggagtggcatcatctctacgagctcggtggaagactgtgagggcccagtgtccagtgctgtccctcaagaggaaggcgacccctcagtcacaccagcggaagagatgggtgacaccgccatgatttccacaagcacctctgaagggtgtgaagcagtcatgattggtgctgtcctccaggatgaagatcggctcaccatcacaagagtagaagacttgagcgatgctgccatcatctccaccagcacagcagaatgtatgccaatttccgccagcattgacagacatgaagagaatcagctgactgcagacaacccagaagggaacggtgacctgtcagccacagaagtgagcaagcacaaggtccccatgcccagcctaattgctgagaataactgtcggtgtcctgggccagtcaggggaggcaaagaaccgggtcccgtgttggcagtgagcaccgaggaggggcacaacgggccatcagtccacaagccctctgcagggcaaggccatccaagtgctgtttgtgcggaaaaagaagagaagcatggcaaggagtgccccgaaataggaccatttgcaggaagaggacagaaagagagcactttacacctcataaatgcagaagagaagaatgtattgttgaactcccttcagaaagaagataagagcccagagacagggacagcagggggcagtagcacagcaagttattcagcaggaaggggcttagaggggaatgctaactcacctgcccacctgagaggaccagaacagacgtctgggcagacggctaaggatccctctgtcagcattcgctatttggcagcagtaaacaccggtgctataaaagctgatgacatgccacctgttcaagggaccgtggctgagcattcctttcttcctgctgagcagcaggggtctgaagacaacttgaaaaccagtaccaccaaatgtattactggccaagaatcaaaaattgctccttcccacacaatgatccctccagctacttacagtgtagctctgttggctcctaaatgtgagcaggacttgactataaagaatgattatagtggcaaatggactgatcaagcatctgctgagaaaacaggagatgataacagcacaaggaaatcattccctgaggaaggagacataatggttactgtgtcttctgaagaaaatgtgtgtgacataggtgagaatctgtacctaattgcaaattttaatatttacaaggatgattgtacaacagagtgcatttaggacagtcttccaaaagatggttttggttccagaaagataaaatatctataaatttttttctcatatcataatgttgcaaaataactctcatcaaacttgaaggtcaaacttctctaaaagc

SEQ ID NO: 31659 - DNA, 2300 bp, Homo sapien
tgatcttccagcactatcctgactaccttgactcctccacttcttttttaggaagaaacaagatttaagtgtgtttcttaaaataaattcacgttctcttattttactcagatgcctttgtgcagaagcacatttcacagattgttgtcctcatcgctcttttgtctcttgtatatgatatttccttaactccatgtgtctttcttccccttctcttctgtagaaatgaagacttggctcaaatgtcttctcctttatgaagcactcctaaattatcttcgacatatctaataatttcttattcctctaataagcaaataatttcttactcctctcttttcctatagtacatgttgtgtactagtgcctgtcatctcatgtcttgattgtttgtgtctacatccccatccagaacagggaccaggtcaatttgtagctgtcagtggccagcatagtgcctgttatatagaagacacttataacgtaattgttgaatgaataaatcatccagtttttacagcgggaagataatagaaagccagaagtcttgtttctccaaatttttttctctaaagttttccttctttgattttgcaatttgatgaaatcatattttgtatgtgttgttttttttctggggactctaatgcttataaaaagcttacattttttctgttaaaaaaagttgtagagaccataggtttattttatacccagaactcagctttttaatgagcatattcctatatgccatgagcagagtaggggtgagataagcatcacctctatactggaccctaggcagtgtactgtgtctagttctaagggtgttttgttttgtctgtttcagtatttccactagtgacacagtggtagaaaagtttacagacttgtatagtatggtatatctaaatgctactgtagcatgaaacttagtttccattgtctatatccaagtaaatggattgggacaatttaaggttggatggatggatagatagatgacagattgtagagtgttattttaaagtaattaatgcaaataatatattattttttcacctttccataaattatcttgtgtttcagatcaggaatgttggagtctggtattgaccgaattatttctcaggttgtggacccaaagatcaaccacacattcagacctcaggtagagaaagctgtgcatgagtttttggccacgctaaatcacaaagaggaaggaagtggcaacacagctcccgatgatgagaaaccagacacttcccttattacacaaggtgctttgcttttactcttggtcagttccattgtttttcttcttgaactgaatatcaagttagggatacttggctctttaacacattttttaatttggctattccaatgaaattgtactttaaatatcacctaaattcctcaattgccataacatttcgttttctagattaataaaaataataagcattgtagtaatgtgatgtgagtgtgagtatgataatagaaggaataactaaaataattagagaatatagtctttttctaggaagtagacaactcctcagatttgcatggtgccctcgctaagataatatattagagaggtagataattcagaatatggtatatactagtactggtacctgaaagtctaaaagaatatacagatggtctgcacagcatatgcatcatataaagatgacaatggcatgtggtattgatttagcagaggtattttccttctgattaaatgtattctaaaacttctgtttttctttaaggtgttcctactcctgggcccagtgctaatgtagccaatgatgccatgtcgatattggaaaccataacttctcttaaccaagaagccagtgctgctagggcttcaacagaaacatcaaatgccaagaccagtgagagagcgtcaaaaaaacttccatctcagccaaccactgatactagtactgacaaagaaagaacttcagaggacatggctgataaagaaaaatctacagctgactctggaggtgaaggactggaaacagccccaaagtctgaagagttcagcgacctcccctgtccagtcgaagaaattaaaaattacacaaaagagcataataatttaattctgctaaataaggatgttcaacaggaaagcagtgagcaaaaaaataaatcaacagacaaaggtgaaaagaagccagacagcaatgagaaaggagaaagaaagaaagaaaagaaggaaaagactgaaaagaaatttgatcactcaaaaaagagtgaagatacacagaaagttaaag

SEQ ID NO: 31660 - DNA, 2300 bp, Homo sapien
tgccccagcctcacaaagctctaggattacaggggtttgctgccacgcccagccttgactgcatatagtaattaatcttttaagattcatatccatgactttctcctctctgctatcttcatcaaactcctcaaaacacacaggatactctgaattgaaacaatgaagtcaaattgtttctgatttaaagtaaatctgatttgtctagtttgacaatgaaaatgggctctgttaattaggttataaggtaaacatttaacattcttaacaaacctttttttttcttgtttttgagaagggtctcactctgttgctcaacctggagtgtactggccccatcatggctcactgcagacttgacttcttgggctcgggtgatcctcccacctaatcctcccaagtaggtaggactacaggtgcacgccactacaccgcctaatttcttttatttttttgtagaggtggggtcttgccatgttgcccaggctggtcttgaactctggactcaaccgatcctcccgcctcagcctcccaaagtgctaggattacaggcgtgagacactgtgcccagtgacaaagattttgaacttgaatgagctaaatctgcagttgcaaattttgacaaaaacataatttaaccacctgataacaaaaataaatcttatccaaaactatttatgaaaatgaaaaatgtttagatattctccaaactttcagtatatcaggtgaaaggtacacctcattgaaaaaatcaggtctaattcatagtcatttggtatcttggtaaaacctatctggtatatttcccagaatctgaaagagtgaaaaaataaggattaagtaaacaaatcctttggcaagccaggtggttttcagctctttgctttccataaaatagaaggagggcctaattgaagtcagctcatagataatcaaatctaattttttgaggtcaagaattgaatgatattgctacaacaaaactcttccattcctaggcacagtacttgtttatatgaacaaggtttctcagggcacacagctataaaaattacaaataggaatagaattgatgctcaacccttcttttcctactaataagatatattcagccacagatgtaggaactttaaaaagcaacaatatgcatttttcaataaagttacacacactatttagtaattatgaaattttctaatatttatgttgctttgaccacgtactaataataatttcaaagatgatgcagtccaaaagcaggtgatttgctagctgtgtaatcttactcaacatacttaatttatctgagccttggttccctgatttgcaaactggggacagtaatcagacctagctcttagtgtttgtccaaagattaaatgcgttaatacatgtaaaagcacttaacgccacgcttggtacataatatgtgctatagatgttttacctgctataatcatagtaatcaatagcaaatctcctaaaaataaaagcctgtcgatttgtcttcacagataggaagaacgggctggagggatcggatctaatccacaggcacactgccagaaacaagggacccccacggggaaatggtatgtgcaggcagaagagagacagaaggaacttggagctacctgctgggacaagaatagtgcaggatcacaggctaagaacgaagagggttgggcgaagttagaatgagcagatccacgtagggttcgcattacaaatgtctatggatctctatgcactgctccgggaaactggagcaagagaggcaggcctaaaatgccgtcgcggatgaagcggggccagaaacgcactgcccccgctcagacctagggccccaggtgtcgcgcgggtcgaagccctaacctccagggactccagacccctgccggtgacctaaaccccacaacccgcgaccagcacagtcttgtcgtctccgtcgccacagtcgccgccacttccggcgcagctcggcctcgcgagggcgcttgcgcccggcgacggtcgaaactggctcttcgcggcctccgtcgccggactttcgtcaatgttgtcaccgtcttttcctcctttcccccagttccctttcacttccggggttgctctggatccgctggttccgtaacaacatcccgttggcttccctcaggcggcgggaccagtgcagccgccgcctcccaggatcgtccgccggtcagggcccttgccctccccggcacaggccaccatggccaccaacccacagccgcagccgcctcctccggcgccgccgcctcccccgccgcagccgc

SEQ ID NO: 31661 - DNA, 2300 bp, Homo sapien
taatctctccattttcctccaagatggcctgggccaaatttaagggaaaaatgtcttgagcagagtagcttggagcattctcataccttgactcttacttaaagaaaggaagaagaaactttggggctttgatttggtttgaaaaggaggaagggaggtgatattgagcacttattttgagcacttattttgtaccaagtgcatagcaggtggtctattttgtttcattctctcaagaatagtccctgtgaggtggactgtttattatcacctccatcttgcagatgagaaagtggagactctaagctgataaaaccctttcttgaggtcatacagagccaagattaaaatattaacaaaaaataaaattctagagcccctccaagcatctgaatggaccccttcttggccagggcactccaaagttaacctgaaaaactggttcaggccatgacgggaaggggtgtcagacatgtctcgttataccctactctctttaggaattcaggaaacgtggccagcatttaacatcaacacagaccttaagtctgataagaaacatttacattctattctctctgaagcctgctacctggaggcttcatctgcgtgataaaaccttggtttccacaacttcttattgtaaccgagacatttctttctagagatagtaactctttcaaccaattgacaaatcagacaaattttaaatctacctacaactggaagcagacctccccactttcccttttctggactgaaacaatgtatgtcttaaatgtatttaattgaagtctcacgtctccctaaaatgtatacatctaggtgacgccccaatcaccttggggtcatgttctcaggatctcctgaaggttatgtcatgggccattagtgactcatatttggctcagaataaatctctttaaatattttagagtctgactctttttgtcaacaaaaatcacatctctgtctgacattgtcgtgatttgggttctttcaaaagcagatcctgagacaagggtttgagtgcaagtgggactttggaggtgtatttatctttttaaaaaatttttttttgtgcctctcagctctgaatggaccctttattaatttatgctctgggactaacgaaggcgtgcctttgagcccgtctcctttaagtgcgcgcgatgctaggcttcctcagtagagggcgccggaggacaccgcagctggaggagggtttccgccggttgtgcggggaccgcggctcagtagtgtgggtggacgaggacagcgggtggaactggtccttctgtgactttgcagccccggcttggtgataatttttgtgcaggcttcttgacatggaaagcagagctccccagcacagagtgagcctccgaagggctcctgcccttaccggtgccctaccctccctttccctgcttgctacacttgggtccgggactcagcctccctttgcaagcttctgctcggcctgtgtgcagctgcacttagctggcagggtcaggcgttgagtagccgctccgctccttctgcagcctcctgcagcccccgccagctcccgggctccatccctcaccatcagttgctgattggcgccccctgcgtgcacaacggaggctggctgcacctggaggttcccagcaattccaggccggctccagcctagccaaagcagctaacttctctgctgtctcgtgggctgaacctcaccgtttcccaagaggtctgaatccttctcaagttcgtcttttcctaagttctccctcgtagctctaggttgctttgtagagtttccttatatctatactcttcattgtagttaatgactctgtgttacacttgtcctgttgaacttactgtgtagtttctgtctcttgactggatcaaggctctcacaggagtcaatcccagaaaaatgatgagacagtagggaagagagaaaagccaataaacagcatgttaatgagtaggtcccacctggggctcagtcgcactggtgtccctctgagagtatgggcaccacacactttggcattgccccagcaaggcaaggggcaagcaagggagctgggtgtttatctcccaggcattgcttgaggcttgctcttgggaatggtagctccctggaacttctgtccagcctgcatatctggactgtgcaggggatacttctatggccagaaaaagcccttgggcagagagaagcaggttcttgatgctgagatgtctgcgtgcttgggagttgaccactgcagctgcaggtgacctctggggtgggccaaggggat

SEQ ID NO: 31662 - DNA, 2300 bp, Homo sapien
caaccactctaggacttttccagattatctcatttcctctctcttttcttttattcaatcaatcaaacaagcgagcaaccacctgtgtctgaagcttctccactgtactaagcactacaaagtaatatggacaaatgaggcagagaaataaaatactgtcctttccacggaagaacttaacaatcttaggagacaagatatcttagggaacaacacaagaagaaactgagagatgataacatcctatgttcttgtgtccctccatgccccatttagacacctgcctctgtgccctcaaaagtctctgttctcatctcagctttagcctttttctcacagaattgcagttgttcacttaacttttctggtttttatctttgtttttatttctttgccacttggcaagtcagtgcctcacaattttctactcacaaacttcaggatttgaagctactaaaaatatcaaaatgtcagaaattcagaacactttagcgtaaagaaataaagaaacagcttacacaactcaatacattctaacacgcttctcccatcctggcctctctcctaccctttccttctgtcttaaatttgtaatgacattttaattaaaaagttgataaaaattaaacatagaaaataaacccaggaacatttaacatttgtacatggaggctgcatttttactcagatggaacctcccagcttgaatgattcatttgtgggagtcatacacaagagttgcttgcaagaggatcttatgagtaaatgataagtgaagtcatccttttcagagaataagaagagttataactggggtggagaagcacttgccctcatctcaagaagggccctatgcatggccacagaagtctgaggccatagcccgtgattttggcactgatcatgccctccctgggggtagcaggagccattagttcaatcctagcattaacttgaccatatttggataaaacatcagtattgatcttaagtactattagcgagacctgcctatattaccagtagccaaggcagcagaagcagaaacagctggaaaaactacaaattggggccatcaggggcagatgtatcttggcactcagggctacagaacatgtggaaagaggcagcaacagcacctcctgtgatttttatgcaaagattgaggagggactcagagctagcatgtcagtttgttacccttgtgattttcgtccatgctcttgattattttttttttttgaggttatatgtccaggagactcaagagttatggaagaaaataatggagcaagaaaagatggagcagaagaaagggagaatggcccattattgggaaaattctgtctatagaaagaacactgtgattggttaaaacaaaagcagcaacaataaaattaccaaacgcctctgtgttctggacagtgtgctggacagaagggacatagagacagtgggacaaagtcatataactctattcatatctttatcttagctcttatattataatcatctacttacctgtctttctaaaaagactgagctcttctaaggcaaggatactgtcttttgtatctttgtgtctccaatgtatactgtatccttgctgactatggaacttgctgtgcaaactgagacacttgtgagaatgaaatgggtgctataaatgattactcctgggtgataggcacaaaccaggactttcccaggcaaaaggaagaagcgctgtacagaatatgtattttcaaagataaatgcacctcgggtcaattctttgaactcaaggcaaatcttggaacagcctctgagctaagcagcaattgacaacggagagcattttgactctttagttttgtgtcagttggggcatcttaccattgtgcattattgggttgtgactgtgcagaaacccaataaaaaaacaggcatgtatgagactagatgttctacagtcatccaaagaatgacaaaaccgtttcaagaggaacatgataagatctgctggcaaggatctttattggcatcctgggaacttctggggtgaatgtgtgtgctgagctcaaatcagaatatctgcaggaaaaaaaaaaaaaaaaaagaagaagaaaaagaagaagaagccagaccaggaaagtgaaaggaaatggatatcgctgctggaggcaacgactaatttaagcagagtaggagaaaaactctttttttttttcctttgtgccagttccttttacacgacttcagaacattctatgacaacccagcgtgcaacttggcactgtcagaagagtcctgggaaagaa

SEQ ID NO: 31663 - DNA, 2300 bp, Homo sapien
tagcttaccaatgaaaaaaagtccaggaccagatggattcacagccaaattctaccagaggtacatggaggagctggtaccattccttctgaaactattccaatcaatagaaaaagagggaatcctccctaattcattttatgaggccagcatcatcctgataccaaagcctggcagagacacaaccaaaaagaattttagaccaatatccttgatgaacactgatgcaaaaatcctcaataaaatactggcaaaccgaatccagcaacacatcaaaaagcttatccaccatgattaagtgggcttcatccctgggatgcaaggctggttcaacatacgaaaatcaataaacgtaatccagcatataaacagaaccaaagacaaaaaccacatgattatctcaatagacacagaaaaggcctttgaaaaattcaacaaccattcatgctaaaaactctcaataaattaggtattgatgggacctatttcaaaataataagagctgtctatgacaaacccacagccaatatcacactgaatggacaaaaactgaaagcattccctttgaaaactggcacaacacatggatgccctgtctcaccactcctattcaacatagtgttggaagttctggccacagcaatcaggcaggagaaggaaataaagggtattcaattaggaaaagaggaagtcaaattgtccctgtttgcagatgacatgattgtatatctagaaaaccccattgcctcagcccaaaatctccttaagctgataagcaacttcagcaaagtctcaggatacaaaatcaatgtgcaaaaatcacaagcattcttatacaccaataacagacaaacagaaagccaaatcatgagtgaactctcattcacaattgcttcaaagagaataaaatacctaggaatccaacttacaagggatgtgaaggacctcttcaaggagaactacaaaccactgctcaaggaaataaaagaggatacaaacaaatggaagaaaagtccatgctcatggacaggaagaatcaatatcgtgaaaatggccatactgcccaaggtaatttataaattcaatgccatccccatcaagctatcaatgactttcttcacagaattggaaaaaagtactttaaagttcatatggaaccaaaaaagagcccacattgccaagtcaatcctaagccaaaagaacaaagctggaggcatcatgctacctgacttcaaactataccacaaggctacagtaataaaaacagcatggtactggtaccaaaacagagatatagatcaaaggaacagaacagagccctcagaaataatgccacatatctacaactatctgatctttgacaaaactgacaaaaacaagcaatggggaaaggattccctatttaataaatggtgctgggaaaatggctagccatatgtagaaagctgaaactggatcccttccttacaccttatacaaaaattaattcaagatggattaaagacttaaatgttagacctaaaaccgtaaataccctagaagaaaacctaggcaatactattcaggacataggcatgggcaagcacttcatgtctaaaacaccaaaagcaatggcaacaaaagccaaaattgacaaatgggatctaattaaagagcttctgcacagcaaaagaaactaccatcagagtgaacaggcaacctacagaatgggagaaaatttttgcaacctactcatctgacaaagggctaatatccagaatctacaatgaactcaaacaaatttacaagaaaaaaacaaacaaccccatcaaaaagtgggtgaaggatatgaacagacacttctcaaaagaagacatttatgcaggcaaaaaacacatgaaaaaatgctcatcatcactggccatcagagaaatgcaaatcaaaaccacaatgagataccatctcacaccagttagaatggcaatcaatcattaaaaagtcaggaaacaacaggtgctggagaggatgtggagaaataggaacacttttacactgttggtgggactgtaaactagttcaaccattgtggaagttggtgtggtgattcctcagggatctagaactagaaataccatttgacccagccatcccattactgggtatatacccaaaggattataaatcatgctgctataaagacacatgcacacgtatgtttattgcggcactattcacaatagcaaagacttggaaccaacccaaatgtccaacaatgatagactggattaagaaaatgtggcacacacacaccatggaatact

SEQ ID NO: 31664 - DNA, 2300 bp, Homo sapien
ttcttcatagggctgttggaaggatttaatgtgataatattctaaagggctcagcaaacacttggcacatggcaagtcactacaagaaggtagctattaatttcctatggccaagactaatggctctacttcattagtggaccagataattctttttcaacaggaaacagaccattgtgttgtcctttctaatttgatgttctatcatttatacatcgcacgcaatttttaattattaattcagcagcatctgtgtcagtccagaacatattttccctcacacccctcctgcagtctggtaagatctttgtgttatcaaataatcagactgcctctgtttacaagaggcaccaaaagccagatctgtaatcattaaaagcaatcctgatggatgtaaatacatctagttaatatttattgagcacatattttgttcaaaatattatgccaagcacagagggagctgcaacgatgagcaatataaagatgttactctcacaaatcccatggtttaatggggaagacacccccatgtattaattcagtgatacatcagatattattaggggaatggaaagatatgtcgtacagtgcatcttgttgagctcaataatagatgtatgaagtaagtgctgaggacacctggagaaagaggtgattgagtcaatatggagaggagatgcctgccaggtggagaggtgaatgaggccattcccagttaaaatcagggaataaactgaatttctcatcattcaacaaacagctcatgcccattcatggcctgcatttctgatttggagaccagggaaggcttcatgtctaggtagagctgcttctggaatgacgaagtaatatttggatatttagagaagagactagggaggacgatcatagaaagggaagatacgatcagattatgaaaggccttcatgctaaaacactgagatcacaaaaactcataaaggggaatgacaaacccaaaattatgcataaatgtggctgtgcacatgctggaaataaaacacacaagtggcttttttcccacttttcacttagtgttctcaacccagaattttgtgtgcattgatcaggaaattgctcttttttcctaataggtaagtatttgagcaacaaggcagcatgtagtttcaacatcaagctcactgctgactcatttttctctcagcacctaagcttttcattgtcagtaacattaattatacctatcattcactctaacatgacctttatttttttcctctttataacattctctccacatgggctcatgtttgggaggctggagactggtgatgtcagccctgagttttcatcatgtggcaatcagagctctagaagcacaggtcagactttcaggctcttctgttgctctgcctccagcattacgtgcctgaactgaattggcaagccattctctgctaccaggatgcagaaaatcaggttcctaatttgccaaacaattcttcatttcaaaaggttagggcaagatttgcagaagagagttggaaggaacaaccatttattaagatatcagtgaatgaatgtggacagtgtgctccaaagacccgtatttgaatcccaaatctgccacttattttctgggtaactttaagcaaattgcttccctgctctgaggctctgtttctccctcctctagagaatgaggatggtattatttatcctgcaggcttgctgtgtggcttgaatgaagttctcactgcaaagcatgtgatccagacttgggcacaaggttgactcctactgtcaaaggctcagcagaaatgacagctatggtgagctttcacctcctgcaggctttaggaaaccagtgtgtaatgggaaaatagagtaaaaacgactgatatggtttggctgtgtctcatccaaatctcaacttgaattgtatctctcagaattcccacatattgtgggaggaacccatggggaggtaattgaatcatgggggccggtctttcctgtgctggtctttcctgtgctgttctcgtgatagtgagtaagtctcacaaggtctgatgggtttatcaagggtttctgcttttgcttcttcctcatttgtctcttgcctctgccatgttagaagtgcctttcgcctcccaccatgactctgaggcctacacagccacgtcgaactgcaagtccacttaaacctcttttcgttcccagtttcaggtatgtgtttatcagcagcatgaaaatggactaatacaactacccttgaaaatcccttaagccaaatgattgcatatatggttttatgc

SEQ ID NO: 31665 - DNA, 2300 bp, Homo sapien
tagcttttcatttaaagtgagagacatgtacctcttcctttcacttgaatacttagaggtcgttagagtgttattaattggcctaatttcaatattgttttgtctcagggaatagggaagcccaaagcctttattgattaaattattgtcttatatggttgtggtttgtgatgtcccaaaacagttacactagtaacattaaatattatgatcacagatccccaaaatagatataataataatgacaaagctttaagtaacgcaagaattaccaaaatgtaacacagagatacaaattgagccatgctgttgggaaaattgtgctgatagacttgcttgatgcagggttgccaccaaccttcaatttgtgaaaaacccattatctgagaagcacaatatagcagagcacaataaagcgaggagtgcctatatatccagaatccaagcacttcaccccattctcaccacaagcagcctggaccaggctacatcgttgctctcacctactaactcgtattccagcttctgatcttgcccctctccagtctgttcccaacatagcagccaggatgatacttctgaagtggaagacaggtcatgtcaactcctctgactaaatacttacattttctcagaatagaagtcaaaacattttaataaccaaaaggttcttcagaatcgctcctgccaccactaacccctctgaaagcttccctacagtggaatgcttatttctgtaacagcccaggccaattcagccttagggcctttgccctcgcaattcccacacctggaatacttgtctcctaagtagcaacagggctcacttaatcatgtttttatcattttttttcatgtctctctcacgtctctgctaaaagtcatttttcagtgatgtcttccctgaccaccattgtaataaaatgacaaccccccgccgccactctttcccagccttcttattcctcataaggtgtttgtgtttccatctgacccactatgtacttgaactgtttatctgtcctctctctgagatcacaagcccatgaggaaaggtccatgcctgttttgctcactgttgtatcctcagcacttacaacgatgccttgcacatagtaggctttcaagagttgggaattgcatgcacttattaaaggggttgttgaattaataaatagcaattttaggaaatgatagctaaaagaatacaatagtaatacaagggtctgtttataaatggttaatttgttttcaggagctgtccaaacaccatgcagatgctcctaggattcttaaactagccaaaaataattccaggcattgtcagatataggataagtacatgaagacaggtaagtcatcccaagactataacgctggggaatagataaccctggagtacaagggggaaaacttctgtctcaggagactagagttgggactccaggaacacaggggttcattacaggagcttgaacaaagagaggagtcaagaccccatctcatagaaatggaaccagttcaggaggcactgcagttaaggtcaactggatgccttacttccatgctgctggtttctttctgtggcagagcccatgcccataaatgtaattaaccccacagaatgggaaagctttgagtctttagatgggagctaattagctctggtttggagttggaaaaggagaaagtagaaattaagattcattctgaccttgaccaacttcaaggtgctttattgatgtggcactcaagagtagtaccatcctcaattacttctagttctcctacttttctaaaccttccttcataatttcctccttcactttctccttacatattctttacgtgtgagagttccttaggcttatgtttctggtccttttctatatttctacctactttttctagatgaatttattatcatgttttcaaacatcatctaaatgctaatgtcttccaaatccatctctttagcctcatggtcaaaatcatatttccaactgcctgtttaacagtttgacctgggtgtccttcagccacatcaattcaatgtgtctatacctgcattcaacatcttccccaaaatctgcttctcctattttgcttcttgtcttggctgacgtcatcatcacacaaccagtttctcaagctgaaacatgagtcatcctcttccttcatctctctcaccctccaaaaacaattgtcaaccatgctctgtcaattatactgcagaaacgttactcaaatgtaattccttcatgtatctccgcattcccttgcctttcacattcctggaa

SEQ ID NO: 31666 - DNA, 2300 bp, Homo sapien
tagaggtgcgcggcgaggcgctcagcggacttcaagccggcagagcccagacgctagttcaccacaggacccccgggctgggccgggctcccgcgttgcgctgggggcccctcgggcgcctatttctacgcgggtcgcacagtgcaggcgccggtcggggtcccgggcctcagtttcccccgcgggccagccccgctctgggaagcccgagtggtgcagcagggcttctccccacccagggcggaaccgaggtgacaggaaggaggaggcaccgcgaggggcggagacgcgtgcgacccaggcagactctgcgcggatcccgcgccaaggaggggccgttgcccaggaaccgtccctccctcccgcgcgtgcttgccctcgtgcgcgcgcccgcccaatgctcccgaccactgtttgccagccgacccccaccccaaccggcctgtccatttccccgggagcggagagacccaacgggacacgccgctcgctcccgccctcccgggagcgcgagcgcgccctcggctgcgtctgcatagtaatgaggggcggggaggggcgacggggacgcggtggcctcgcgcccgcgcgtgccgggacgcaccgcggggggcggcgcgattgtgaggtggcgctgacgcacgttccggggttcttaagcggccagggcggctacggcgactgcgacggcggcggcggcggcgatcgccgcgaggggtggtggggccgaagtcggtgccccctggctcagtcacggtgtccctctctcactgactccccctccttccaccacggccgcgcaaccccagcgccggcggcttcctaggtggggcaggggacgaggagcgtctcctcccgctgccggcggcctgataaatgagggatttcgggtttggggtgctgcagaccgccccgctccgaagtagcagtcctgggcccctgttctgcggcgaggcgtatggtccttacgccgtggggtccgtcaacccgctgccctccgccacgcccttcggcccactgtcgccaccaccgttgcctgtcaccggcttcttagaggccgcctcccccttctccgtccccctcggcggcggcgcgggcagcccggccgccgccgcttcctcttcctccccgttcctggcgcatcagcagaccatgcaggatgagctgcttctggggctgacacagcagccggcgcggccgctttcgggggcggcggccacggagaaactccccgaccaccaccccggcggcggcacgatcgcgggtgtgacccacctcctcccctcccaggacttcaaaccgagtctgcaccacccctcctcctcctccgcctcctcctgctgctgctgccgcacctcctccccgcaggacttcagtaagcggcagcagcagcagctgagcagccagaagaggaaagagttcagccctccccaccttccccaccctccggactcgaagccgccgccgccgcctccgccgctccactgccccggtcggttcagcccgccgccgccgccagccggcccgctcctccagccggcgcagctcgctcagcgccagcagcaacagccgccgcagcagttcagcctcctgcatcagcagcacctctcgccgcaggacttcgccccgcggcagcgtccggcagacctgcccccgctcccgcagctccctccctcgccgcctgcagccccgcggcgccgccacggaggcgcgggcagccctcgcaagaccccagccgcgggcgagggcagcgccgccgagtcccccaatgcgggcttggcctcctcgacgccggtgaaccccgcgccgggctccatggagtcccccaaccaccctctgctcaacagtcccagtaacctcctgcccggaggtgcgcttggcgcgggcgccttcagcagcctgcagagcccggaccttccacacccgggcggcggcggcggcggcgggggcggggggcccccaggaggcggagggggaggcggctccgcgtcgccgccgccgctgcccggcttcggcaccccctggtcggtgcagaccgcgtcgccgccaccccagccccagcagccgccgccgacccagccgcagcagcagccgccgccaccccagcagccgccccagccgcagccgcagccgcccggctcgtctgccaccaccccgggcggcggcagcggcggctcgctcagcgccatgccgccgcccagccccgactcagagaacggcttctaccccgggctgccgtcgtccatgaacccggccttcttccctagcttctcgcccgtgtcgccgcacggctgcactgg

SEQ ID NO: 31667 - DNA, 2300 bp, Homo sapien
gggccgccgaagccgccgccgccgccgccgctcgtcggaacgctgagcccagtgcagccgtgcggcgacacgggcgagaagctagggaagaaggccgggttcatggacgacggcagcccggggtagaagccgttctctgagtcggggctgggcggcggcatggcgctgagcgagccgccgctgccgccgcccggggtggtggcagacgagccgggcggctgcggctgcggctggggcggctgctggggtggcggcggctgctgctgcggctgggtcggcggcggctgctggggctggggtggcggcgacgcggtctgcaccgaccagggggtgccgaagccgggcagcggcggcggcgacgcggagccgcctccccctccgcctcctgggggccccccgcccccgccgccgccgccgccgcccgggtgtggaaggtccgggctctgcaggctgctgaaggcgcccgcgccaagcgcacctccgggcaggaggttactgggactgttgagcagagggtggttgggggactccatggagcccggcgcggggttcaccggcgtcgaggaggccaagcccgcattgggggactcggcggcgctgccctcgcccgcggctggggtcttgcgagggctgcccgcgcctccgtggcggcgccgcggggctgcaggcggcgagggagggagctgcgggagcgggggcaggtctgccggacgctgccgcggggcgaagtcctgcggcgagaggtgctgctgatgcaggaggctgaactgctgcggcggctgttgctgctggcgctgagcgagctgcgccggctggaggagcgggccggctggcggcggcggcgggctgaaccgaccggggcagtggagcggcggaggcggcggcggcggcttcgagtccggagggtggggaaggtggggagggctgaactctttcctcttctggctgctcagctgctgctgctgccgcttactgaagtcctgcggggaggaggtgcggcagcagcagcaggaggaggcggaggaggaggaggggtggtgcagactcggtttgaagtcctgggaggggaggaggtgggtcacacccgcgatcgtgccgccgccggggtggtggtcggggagtttctccgtggccgccgcccccgaaagcggccgcgccggctgctgtgtcagccccagaagcagctcatcctgcatggtctgctgatgcgccaggaacggggaggaagaggaagcggcggcggccgggctgcccgcgccgccgccgagggggacggagaagggggaggcggcctctaagaagccggtgacaggcaacggtggtggcgacagtgggccgaagggcgtggcggagggcagcgggttgacggaccccacggcgtaaggaccatacgcctcgccgcagaacaggggcccaggactgctacttcggagcggggcggtctgcagcaccccaaacccgaaatccctcatttatcaggccgccggcagcgggaggagacgctcctcgtcccctgccccacctaggaagccgccggcgctggggttgcgcggccgtggtggaaggagggggagtcagtgagagagggacaccgtgactgagccagggggcaccgacttcggccccaccacccctcgcggcgatcgccgccgccgccgccgtcgcagtcgccgtagccgccctggccgcttaagaaccccggaacgtgcgtcagcgccacctcacaatcgcgccgccccccgcggtgcgtcccggcacgcgcgggcgcgaggccaccgcgtccccgtcgcccctccccgcccctcattactatgcagacgcagccgagggcgcgctcgcgctcccgggagggcgggagcgagcggcgtgtcccgttgggtctctccgctcccggggaaatggacaggccggttggggtgggggtcggctggcaaacagtggtcgggagcattgggcgggcgcgcgcacgagggcaagcacgcgcgggagggagggacggttcctgggcaacggcccctccttggcgcgggatccgcgcagagtctgcctgggtcgcacgcgtctccgcccctcgcggtgcctcctccttcctgtcacctcggttccgccctgggtggggagaagccctgctgcaccactcgggcttcccagagcggggctggcccgcgggggaaactgaggcccgggaccccgaccggcgcctgcactgtgcgacccgcgtagaaataggcgcccgaggggcccccagcgcaacgcgggagcccggcccagcccgggggtcctgtggtgaactagcgtct

SEQ ID NO: 31668 - DNA, 2300 bp, Homo sapien
cagccagcctcctgccagtgggagaagttgttcccagccttgagagatatttgtagtacaggattacaggttttttgtttttagcaatatacatccctcaaaaaattggaggctactacaagccatcaaatgtaggtactctttcccaactccctcttatttctgtttataaattagctatttctttcctgagctcatctcattcttgaaacactttgccaaatgcactcaaaagtacccaacacacataactaacattctctccccatccttttcccttagagctacagagttacttagcacatattgccttacaaactgtcataggtgtcagtttcaccaaatgtttagctactgcgaaacatggaacttcatctttccagcctttgatatcagttcccttgacactcacaatgaggccaatgccactatgtttaggtttgtgtcagagcagcatcccatgcccattatcagttttgaaacgggtcaggaaaagctaagctagctgctatcatgaacatccctaaatctcagtgactcctcagtaggtcttgttaactacctgatgggcagcaaagtgcttaattcatatttgttgtatacaattatgtgaatagattgcttttacttattggcatttaatatttctcaactgaggaaaccaaagctcaaagaaagtaatacatccaaggtcacataactggaatgtggtaaatccaggatctgagttcaggtctatgacactacatgtgctggtgcctgcaaatctctcctcagtggaaattagagtgaaaatagactccatcttttctctgcattcacagcaattaaaacctaaaacttgaacatttccttgtagttttaaatcctttctttctttgcataattaaaatcagaggtattatcctctgcccattgcataatagttatttcaggtgactcagaaaacatagcagaaaggaagctatagtttttgaaataatgaatgaggtttgtttcctgaaacttgtttgcataactttgcacagtgaacatacttaatagattatgcccatgtcaatatttctattatctaccaattggtctgtttatttaactgatgttttctattcatttaggaaactttaatacatcataactattcattaatgtatgcctggcaaaggtatgtattgtcctatgtttacttctatacaagctttgacatattaaccatctctaatgggaacatatacgcaaaccaaaattgtcaaatctgttggttggtgtgaacatatgcaatactttatttattcagtattttttgagcacctattatctatcaggtactaagcaagatctgttttgagatataccatcaaatatttttcaaatcatcattttcagttgatcacactgtaagttggctataatttgaattcacaaatgctcctctgtgtgtgtgtgtgtgtgtgtgtgtgtgtgtgtgtgtgtggtttagtggcagttgatggaaagtagtaaaaataataacatttgtaacattggttacagatcaaatgtcagaagatttattcagccacagacactgcaaagtaagcatcttctctagtttatgattcgtatgtaagataaagtttaaaataagaccaatgcaaacatcattttaggtagttccccttttgtgaaaaaaattgcatataataattccgatttttcattcagataaattaggcacaaattgcatggaaataattctgttagcaaaagtgacgtttaaacataatttcactagcatcacttttccataagttggggcataaactttcctatgtactctttttgcttccagtgaaatgatatcatttggtctttaggcatcactttaaaaggcaaagcaactagaagtaacatggtaagaagagcaatggataaaagagagaaagagaactgtttagatacctgagactcctgcttttcatttgcctcagtctggggtttgcagaagaacactacccactcctacttgttcttaactagtgtatatattaagctctttgaaatgtgagtattatgggaaggatcgcagttgctttaaattatagaagttggcaagtccctgggagaaggagtgggaggttgtttaaactgagaaagacagttgcaaaacttcgtacaacagcatgagctccaagcttcaaacgcattctcatgctcagacgagcactttatttttcatcaagttattttttgcattgttttggagtagcttcgaataataaacacatatttctgctttaaatttttaatagttaactaca

SEQ ID NO: 31669 - DNA, 2300 bp, Homo sapien
tctgcattcagtgaaggtcagattgttagcttgaaattgaccatggcgggggtattcactccaagaaaactaacaaaagctacaaatctgaaccttctttttgagagctaggttagcggcaaactgttaggtgctctgggaacactgatgggattggaatggaatggaatgaattcagttgaaaagtaaataaaggatatggggtaaaaaagagcacaagttgagaaaggaagattatctgcctaggaaagacaaaataagaccccgtccttggggtgagtggcaggtaaaaatggaatctgacttttactctgagccaatacttccttaagcatatttttctacccatcacttcaccactgcttctaagtgtgaaaataactgagtgaaatagacactgacaagctttatcaacatctgaggttctgaacactctcagagacattttcaaaggttcattctctctgggaaaaagaatgagttcagaaagacacagattacaataaattatctgggatgaaaataataaagaagaaaaagaagaaattcaatttttattgaagaacagaaaaaatactgtaatactttaatgatacaaaaaaccttattttatgtggtaagtaacattaaagagaaattagagaagttgtgaatgacacagaaaagaaaatatgaatatccacaaattgtatcaacactttaaggcagaaaaataagaatgcatctattcttttattggtctacaaattcatccacttctgagctccctggcagagactgggctactccaaagcagacataatggaaaaagcccacttaagaagttatcacttataaacaaataaatgaacatattaaaaggctgtatcacctgaaattaagcttgtaaatgggtgacatcagacaccatcatttggttcgagaatattaagaactatgagaaaccctggaaataatcaaggacaaccatcttattttgaaagtgagaaaacagacacagagactttatctgattaaaatctgactctaatttagcaataagttatgactagcttctatgctcaagacattgttttgaccatcctatgatggcattaagattttggaaagccaacaaattcaaaggaccatttcctccagtgtggagagtggatcccaaaggcaaaattaagctggtcagaacggggagcccagcaatctcgttggtcaagtgtgtggtcaacatccacttcactaactctggaaacattcctttcaattagagttctcattgcttgagaagaatgagaggaaaagaaagataaaaacaagatttttttcagtcgtctaatttccataaatgacatcataaattatatattgctgttgccaaggaaatataagaaatacatagcagaaggaaacaaagaaattgattgcaccatagacgactagtcatatgctttggagaatcattctgccttttgagatgttatgatcagttctttacaggcacaaagacatattagttttctaaaaatacccaatcatttatccattcagcaaagaacaaagaaaacaaaatcagtgcaattctcataaccctctttctttgcacagcacatagaatgaggggctattttcctgccatatttaccaagaatagggacagtgttcattattccacaagacaccatcctaggtccagaatctaaaggctctacctccaaaactctcaaatataaaatggcttttttctctaagttaacaactaatttccagtcagtgagtaatttttttcctgaaacattcactcagtggaaaacaaatgaagagggaaaaaattaagtaaacaaatctgaaaaagaggccacaacacacagagatggagaagctctaaacttaccactgaaggaaagcaggcacttaaagtttatcccaaacaaaactgtaattttaactggtccccgagttgagcctcactcgatgaatgacttccagggcctttggctctttgggactaaacgagaaaattatttttagcacaactatttggaaatctttgagaatttggatctgttattctgtctggtaccaaagcaagtttttcactgagctctcatgaaagatcctcagtctcttgtggatttagaatcctgcagcagcccaccatctaagagcaaggtatggtgtttactcttttttttagaattttggcaaatgtagatgcaatggcctgttctcgtgacgggagctttttagcttattaaacagatggctctgtaggaagaatccataaaactgaagacctagcttcaagt

SEQ ID NO: 31670 - DNA, 2300 bp, Homo sapien
aaattttctaacaattcaggagactagaaatttgaaatcaaggtgtggcagggttgattctttgtgaagcttcaagagacagtctgttccaggcctctctcctggctgctgatagccttgagtgttccctggcttggagatggtgctctccccatgtcttcacgttgcctttcttctattttgtctgtctctgaatccaaatttccccttttgtaaggacgcaatcatcttggattagatctcactctaatgacttcattttaatgtgattacctctgtaaataccctatctccaaataaggtcccattctgagatactgaggttaggacttcagcatctttggggatgagagagaacacaattcagctataacactgctgccccaaatcctggcacagtaaatcagctcatttcctcatattcatgcctacgtgcacaccccatcatacacagacacacacacacatacatacacgtacagagacacaaacacaaatacattgacacatacacatgcatgcaggctgtgtcaaaaaatgtactctggatttgttttaattaggtatggtaagacacacagacacaaacatgattggcacaaaagaagaagtttatacttaacagatccctagaaacaagaagcatggtgtcttggttcgttttctgttgttgtaacagaatacacagactgggcaatttataatgaacagaaatttatttttcacagttctggtggctgggaagtccaagatcaaggggctggcatcctgcaagggtcttcttgctgcaccatcctatggtgcaaggcaagaaaacatgagagcaagaaagagaaagagagaaaacgaggccaaattcattcttttataaggaatccactcctgcaataatggcattaatgcatttatgagggcagagccctacagcctaattgcctctcattaggtgccacctcccgacaccattgtgttagggattaagtttccaatacatgcttttgggaagacacattcaaatcatagaacatggcatgccacacaggaccacatagggaagaaccaatgttggtcagaaggcagaacggagacagcagagtacagcacagagcctttactagggttttcccaggaaggaataggtgaagcagggtagggtgctgcataaatttaggagtggatagcttgaataatcgtggtgttctctgggctatagtggtctggtatctggacctggggtgacttaggacaggaggaatattggcttagtgtgtgagagtttgataatggagatggttgtgtgggctctggattggttggcttgtatatcaaaggagactttgcatatttcaggggaatcatttgctatctctagaaattagctaacataggagaatcagtttctccaggatcaaggctccaaatgccagagcatcaagaatacagaaaataagaagatacagtcaatacacatacacacaaacatacacacaccatacacacagacacaaatacacacaaacacatgtgcacatacacactagtctattggagtgtgtttccttggctccattcattctattactcttccagctactttgcctcctacctctccctctttttttttttccaacttttttgagccataacatttatatccgttttcaggaattgcagtgggattcagagaataggcaaagattaaacttgtgcgttcaaccttccacttttaactggaaaacactcaagtgcaacatttgttggtactctgcagcacctccacagagcttttgctgctgccacgttagacagcttcaccatgtaatgacgaccttttaagattctaaatccccccacctctgagcctgttcttcattggaaatgcaagacgaccggatgacatgagggaggggcagctcttaaggcttgacctaatttccagtgctgctcatgttgatttctctccgtccttctactgcaggctgtgcgtctctgcttacccagcatgcttgtactccactactggaagtagcctgtcactttaaaggaaaaaaaaaaaagctaccgagtgaccttccttaggaacgggttgctaagctggtgtttttgctccaagacatggctgcagcttcccagggaggagcccaggggcatctccaacactcagcctttccctccggacccttttaaaagattcaacagcaccgtctctctccacttccatcctagaatgcagaatctgcaaagtgccttttgtaaagtttcttaaggtaaatcagtccctaaccggactttaggctgca

SEQ ID NO: 31671 - DNA, 2300 bp, Homo sapien
aacatggagaaaccccatctctactaaaaatacaaaattagtcaggcgtggtgaggcatgcctgtaatcccagctacttgggaggctgaggcaggagaatcactttgacctgggtggcggaggttgcggtgagccgagatcatgccactgcactccagcctgggcgacagaataagactccatctcaaaaaaaaaaaaaaaaactttaagcaagatcaagtaccaacaaacccacataaatttatatttgcttattcattcatataaccaaatatattttgtgcctgtagtccctgggaatacagcagtaaacaaaccttgttccctcatggaacttacgttctatcttatttgaagtcctactggatagttagaatagaggatgaaaacatcacggaaaagcaaaacattacgtaggtttctcacaagtccattctaagtcagtaaaaacttagaattgaattaaaagccatgcttgcacacctcaatataattatcttcttgtaatctaagttggcgaatcccctgaactaagaacactccctattagtcaggcccaaagaaggagtccagagtgaggatgcagctcagaggacaagtcagagatcaggtcacatacacaaaggaaaggcccaaaccaaggctattctctcgttcgacctcacttccgtcctctgttattgcggttcatgtcttccctaaccccagtggccaagggcagtcaggagtaattgaggtctggcccagaaacctgcatgatatttctttgaaattatatatccttaaaattcatactttgtgttccgaatttgtttcagtataaaaacaaaaaaatcctaattttaggaaaaaaaaatctagtaagttttgtgtaccccagagaggttctgtttatcttgcaactttttgttcacccaggggcacttgtgccccagtctataaaactctaggactaaaacattttagagctcgtagactttagagctttcagctctaacattttatgactaaaatattagaaagcgtaaggtggaaagaggaaacgaagtttgcgctgttaaaggattgttttccttttcaaaaaaaaatctgccaaaatttcctttaacttgaagcatttgtgatgatgtaacatgtatcattattatccttttcctgctggtaaggctggaaagcagaaaaacttaaccggtgaaatccctaatatgattgtgatgtctgtcctagcagattcacttgttagtcgcctttcttagattgtaacttttaagagcagacagcatgtggctttcaattctgtgtcccaagagcatggaacatagtaaatgctcaataaatgctgtatgcatgaatgaggacctggaacaatggaagatccaacatcatctcgtgtatgatggtccaatatggatacgacttttcgaaaacatgtctatgttgagaagagtggatgatgagagccgcacagattgttaactgtcccccaactcacactcagcattactggatagaagcccagggtcaagatgggagttttaattttaatacctaaaagtcatacctctcttcctgtcttaagattctctcccttttgcattttcacaaaggagttcattgaaaatgatgaggatgcagacatgggaagacagaataagaactcaaaggttcgaagacagccaagaaagaaacaggtaagaagtgacaagaaactgtgtctgcgtattgtcattgatcaacaacccgcctgcatccccagggccatacagaatccacaagggcagccttccttcttttggtaccaacttttggcctgctctggggggctgtgaggcggggatgcagatgggtggtccagggtgcaggagcctgattcagagacttatagatgagcctcacaataaggcgggggtccatacttagagcatttttactctaagttttctcccatctcctgagagaggactctagaaaagatggaaggagcctgttttagtgcttcattgaaggccatggactatgatgggcagtagatggcagtacacgattacaaatcttgggaaactccctctttttccaactccaagcccaaattctgtctttgaggcagaagccaactcctttctcccgagcctgctggcagatcctcccccacctctccgcaggagttcccctcctaggctgggagcatcccgtgcagggtaaatcttttcaaggtaagtccttggtaagaagttgtcctctgagaagggaggcagggaagcagctattgtggatgggagctctgcttggaacaatcaaga

SEQ ID NO: 31672 - DNA, 2300 bp, Homo sapien
taaggtcaggagttcacgaccaggcttggccaacgtggtgaaaccctgtctctactaaaattacaaaaattagctgggtgtggtggcaggcacctgtaatccagctactcaggaggctgaggcaggagtattacttgaacacgagaggcagacgttgcagtgagccgagattgcgctattgcactccagcctagatgacaaagcaagactctgtctcaaaaaaaaaaaaaaggttaaaatggtggacttcatgttatatatattttaccacattaaaaataaggaaaacacactaggatattctagtattcacataattggcatacttctgtgcttcacttacaatctcctcccttgaaaaatgcctcccggaaatgtactttttttacctagatctacagaagcttgggaatattttagcttattctataacaatcattctacaaatcagcattcaggccattcaacattgcttgagtgtcctcctgacatgacagctaacttcccaaaagcaagtgatctaggggagaacccaaaaaagaagccacagttccttttatgacctagtctcaggagccacatactgtcacttctgccatattctactcaggagaagcaagtcacgagacgtagtgcactctcaaatggaggagaattgggcttcacctgttgaagatagaagtctccaattgcgaatatcttctgaaattatggcactttcctccaaaggccacttctcccttccttttgcctattcactgccccagaagctctgttcctaaaactgctcttttaaatcacacacatttggaagcccttccctatagtccatgctctgctctgcccagacacttttaaagtattttcgtcttcaaggttcatttagcctttttgaacaaagttttagatcctctgtagcccctttcgctagctccccttttctgtcttctctgcagtttttctctgggtgattttgctcaccacgaagcagaggtggggcaggagaaggaagattacacactgccatctggtgatctttctcttttcacttgtttgatgttttggcattctctgtcttcaagttaagttaaaagcatggtttctacatagattccctttttccttcttattcttttgtgtacttggggaggaaatcttaagaggcaggtagctagactgccatcattgtctttagctacctgaaagtctccacaggattttaaaagatgttgctcataaatggacaccaggtttaaatttttaaaagaaggagaaggagaaagaaaaagaagaggaaggaagagaagacgtttagaaaatatccaaacaaaatcaatatatgtcagctaacatttgtgattatagcctctttgctttgaatttttaagtgtatcatttaattttatccccacaaagtgcttagaggtaaactccattactataactatcttataagtgaggaaactgaggatcagaaggttaaataagctgtttcaagttcctcaggcagtatatggtgaagctgggatttaaacccaggcagtctgaacagggtgtgtggactgtgcacctatacacttggtgccttttcccttggtttagtgccaggtggaaggttaaactgctacataaattatgagcccaattctttacataaatggcaagaagcaagcagtctcataggaggccagatttgttgggattttgattgttttgcttaccacttctcttctgaaacagccatctctgattttgacatcttccaggtgtgcagaatactgcaaaacaatttttttaaaaacccacttgttaaatatgaaaggttatatagttctatgctttcacttttttaaaaaaaggaaaagataaagttgtaggaaatgttaagtttcatgagtttggtattgtgaattatttttctaactaagaatcttagcatgattttttcttgttactttttaacattatgcaggatgaggaagaactgcttaatggtgatgatgccgaggacttcctattgggcttagatcacgtggctgacgattttgtagcagtcagacctgcagattatgaaagcatccatgatcggctgcagatggaaagagaaatgctcttcatacccagtaggcagacaggtacttgctctttttattttcttgttcagcttagacatcgtcacttaccttgtcatgaaatatggctagtgtataaggatgcctcatctccagaactgattccagtttctaatctaacaatcaagaaatatcttcaaacaaacaaaaaaaacacaacatggaaaa

SEQ ID NO: 31673 - DNA, 2300 bp, Homo sapien
catattatgtaagagtaagtctaattatactcaatgcatcccttctttttttttttttttttttttttgagacggagtctcgctgtcgcccaggttggagtgcagtggcgcgatctcggctcactgcaggctccgcctcccgggttcacgccattctcctgcctcagccttttgagtagctgggactacaggtgcccgccacctcgcccggctaattttttgtatttttagtagagatggggtttcaccgtgttagccaggatggtctcgatctcctgacctcgtgatccgcccacctcagcctcccaaagtgctgggattacaggtgtgagccaccgcgcccagcccaatgcatcccttcttaaacaaggagtgagtttcctagctaggaatgactgagtctgcatctttttttacacatccaggttagctacacttatttttcttcttttgccctctcttttctcttgttatctcacatttgctgcaggaccacttcccatttgttgtctctttattatataaccggagagtttctatccttgcaaatcctttatattgtattttcctaagtctggtaacaagctgcctaattccagcccttgctctaccattcactgggtgaacttggccattagtctctcatgcctcaatgtcttcatctgtaaggcaggcacgatagcagtgtctgcctcccaggcttgctgtgtaaattgaatgaggtaatccacataagtgtctaaaacagacctagtaactgctggctatcattacagttccctgccctcatatttaattgcattgctcttgctttcctgggtgtattaatctgttatcacgctgctgataaaggcatacccaagactgggcaatttacaaaaaaaagaggtttaatggacttacagttctacatggctgggaagacctcacaatcatggcaaaaggcaaggaggagcaagtcacgtcttacatggatggcagcaggcaaaaagagagcttgtgcagggaaactcccgtttataaaaccatcagatcttgtgaaactcattcactatcatgagaacagtgcaggaaagacccacccccataattcaatcacctcccacccggttcctcccatgaaacctgggaattgtgggagttacaattcaagatgagatttgggtaggaacacagccaaaccatatcatttcacccctggcccctcccaaatctgtcctcacatttcaaaaccaatcattgccttcccaacaactcccccaaagttttaactcatttcagcatcaactcaaaagtccatagtctaacatcccatctgagacaaagcaagtcccttctgcctatgagtctgtaaaatcaaaagcaagttagttacttcctagatacaatggaggtataggtattgggtaaacatgtctcgcattccggtcatgctgatgcaagagttaggttcccatggtcttgggcagcttcgcctctgtggctttgcagggtacagcctccctcctggctgctttcatgagctggtgttgagtgtctgcagcttttccaggtacacagtgcaagctgtcagtggatctactattctggggtctggaggacagtggccctcttcttatagctccactaggcagtgccccagtaggaactcagtgtgggagctccaaccgcacatttcccttctgcactgccctagcagaggttctccatgagagccctccccctgcagcaaacttctgcctgggcatccagacatttccatacatctaggcagaggttctcaaacctcagttcttgacttctgtgtactctcaggctcaacaccatgtggaagctgccaggacttgggcttgcaccctctaaagccatggcccgagttgtaccttggcttcttttagtcatggctggagtagctgggacacagggcatcaagtccctagactgcacacagcatggggaccctaggcctggcctaagaaaacatttttttcctcctaggccttcaggcctgtgatgggaggggatgctttgaagacctctgacatgccctggagacattttccccattgtcttggtgataaacattcggctccatgttacttatgcaaatttctacagccggtttgaatttctcctcagaaaatgggattttcttttctattacattgtaaggctgcaaatcttccaaacttttatactccccttataaaactgaatgcctttaacagcacccaagtcacctcttgaatgctttgctgcttagaaatttcttctgccagataccctaaatcatctctctc

SEQ ID NO: 31674 - DNA, 2300 bp, Homo sapien
tgttggttaacaatagtaacaaatttaggcagttatctgacacattgctttgaaaacagccatatttcagccaaagatagctgcaaattgtaatttttctttagctgtaattataaaattgaaaaaaaaaaggttagttttcaggacaagtgtaagactgtgtgatctttgagagcagggaccctattgccattgtatatttggtccctacaagagcacctgccacttagtatctgctcagttaatattggttaacaaattcaaatatgctaccccacaaaaataatggctgtctcccagaaattccagtgtttgtgctttcgaattccatctcctaggctgagcctcccacagaagcagtacagaaatccttgccagattattttctctctccctccctcccatcatccctgctgctaactctccctccatcccgcccatcatccctgctgctaactctccctccatccctcccctccttctttttgagtttatagggtaaactaaatttataggcattttacccataaggtcataacactccttcccctgataagtggctatcttccaaattcttttggagtacccttttttcacattcttgattcatctagccaccttataataaagcatagtttttcccacaaaaaaaaaactattcaagtttattcatgcttttgaataacaatgagaaaagtgaatggttttctgtatatcagagatggaacataattttgaagccgaattccccctggtgtttataaatttcgggtaccactgtgcatccaaagtgacttatttggtagtcatcctagagagctgcaagagcttgtgccttgggggactgtaaactgcttaaactccaggcgatatgtgtccataagcaaatatttgtcagctttatgcacttgtctaagtttatgtaaaatggattacgaagcttaactgccttgggggaaatagtgcagtcagtattcggcaccatctccaaagtgctgggtgggatggatgaagtcaccacacatttgccgccatctaccaggagagccatgctgttcatcaacatgttaagggctctgaaaagatgaccagcaaggaacctttcacacttatttaatccagtgttaatatggccacaatatcttttcctggtggtacatctcacagaactaatgtcctacagaacacactgtgggaaacggtggtttgaactgggctgatctcctggtggagtataagcaaaatcatcaaagaaaaacccaaatcctccatccaaagtcaaaaaagtggtttcaccatcattctcagcaaactatcacaaggacagaaaaccaaacaccgcatgttctcactcacaggtgggaattgaacaatgagaacacgtggacacagggcggggaacatcacacaccagggcctgtcgggggtgggagggttgggggagggatagcattaggagaaatacctaatgtagatgatgggttgatgcatgcagtaaaccaacatggcacatgtatacctatgtatcaaacctgcatgttgtgcacatgtaccctagaacttaaagtataattttaaaaaattaaaattaaaattttttaaaaagtggtttcagggactcagtagcaacaaaatgaagcagttcctcagagacttgaagaagtcataaaataactaatgaaatttccaccactatcagctgagaacttacaggccccatgtcagcacaccacacagatcatttaacacagagaggcatggctgctcagtgttcagtgggttgggctcatattcagcccttccactcaccagctgtgtgttcttgggaacttacttaacttctatgtgcctctgtcatctcatgtatacgatgtggataataatagcatctgcctcacaggattgtgagtttacatgtgcgacatttttagaagaggaactggcacatagcaagtccaatataagtatttgctgttattattgctctcttacttaatttccagaaataaccaagggactacaaattattttaaagggaaaaagctgaccagaaagcagatgaagaagcatatgaagcagaaattcaagctgaaataagtgaactgttagaagagcacacggaggagtacgcacagaagatggaagaatacagaacgtcgttacaacagtggaaggcctggaggaaagtgcaagtgtgtaaacaaacactcagcctggaatagggctggccaggaagtgtctgggagggcagcctccagtacaggagtggggaaaccagactggcagactagggtatcctg

SEQ ID NO: 31675 - DNA, 2300 bp, Homo sapien
cacacaccggggcctgttgtggggtggggggagggggagggatagcattgggagatatacctaatgttagatgacgggttaatgggtgcagcacaccaacatggcacatgtatacatatgtaacaaacctgcacgttgtgcacatgtacctaaaacttaaagtataataataataataataaaaaatatttagcattaatggtttcttttgattttgtaccctgcttctactaaggctatttttaagtttgcctttttttttttttccaaaaaatgatacatgatagtgtttgcagagattagccaccaatagattttattgtaatcttgtggggcatttcttatgatttaaaaaaaaatctataatatgtatttaaccaagtatgtcctgcctgtgttttttgtgtggcttaagagccaagcatcacttttacatttttaaatagttggaaaaaatcaaaagaagaatagtattttgtgacatgtgaaaaattatatgaaatttgaatttcagtgtttataaagttttatggaaatacagctacagtcattcatttacatgttgtctatgactacttttgtgctacaactgctgaggtaaataattgctacagaccacatggcctgcaaaagttaaaatatttattacctgtccttttatagaaaagttgccaattcttgctctagattatttacttatgtattgcagttaactgttcattgtcttatttaccttcactgaaatggaaactccataaaggcaagaaatctttgttttgttcattgatatatcccaggtaccaaagaacagtgcctgcctcatcatagctactcagtaaatatttgtatagagtaaaaaatgtatgaatttataaaaaatgaatatttaattttcaaaatgataatagctaatgtttattgagtactaacaaccatgtgaaatacagatgttttattatatccatttaacatcaagattaacacattaagaaagaaaagtaggccgggcgtggtagcttatacctgtaatcccagcactttgggaggccgaggcgggtggatcatgtggtcaggagttcaagaccagcctggccaagatggtgaaaccccatctctgctaaaaaatacaaaaattagccgggcgtggtggcgagcacctgtaatcccagctactcaggaggctgaggcaggataatcgcttgaacccaggaggcagagtctgcagtgagctgagatcatgcccctgcactctagcctgggcgacaaagcaagactctgtctcaaaaaaaaagaaagaaagaaaagtaacttacccagggttacacagttaagtaatggtagaactggtatcccatcctagagaatgtgactttaaaactggttcactatgactcttaaaatgcataatccgcactactttttatagaagatagttaattctgttatgtatagtaggaataattttgttttaggagcttctatgtcatctgttttgatgctctgtcatcagaccgtcattcctgctgataataggcaataagacagcttagattatgttccattttaggaatactagatactttagaaagcaagtctaggaggtatggtgttagtagcttttcccctttcatctacccgtctgttgtatttaacctaatcaagtttccctctttaaaatttctgcctgcctgtatttagcatacatatagagtaatgaaattttaggtttagaaggggcctggtttaatctcttctctttaaagaaaccgtgatttgtgcacatatcatttttctgtgtcaccaggccctccagaatgcaaaccaacatcttcctggcctagtgcactttttattataccattataacttgttaatttatgaatttcttttatttgtactttaaccaagtgtaagggaagtatgctgtgtgcaaaagtgaatagggatgtatttgaatattttttatttgtgcatatttgcacgtatttattacacttttctttttaaatttttattcagctttctaaaaccaatttttccaacaacaacgatttccgtgctcttctgcagtctttgtatgctactttcaaggagttcaaaatgcatgagcagattgaaaatgaatacattattggtttgcttcaacaacgcagccagaccatttataatgtacattctgacaataaactctccgagatgcttagcctctttgaaaagggactgaagaatgttaaggtaagttgcaaaaatggatattcaactgtcaaaacttgtgccatcttctggtatatcattggcaa

SEQ ID NO: 31676 - DNA, 2300 bp, Homo sapien
cctttttaatgtgtctggttctacagatggatacactagtgaacagcacagacacaaacagttgattggacaagacaacatagcatattaaacattagtaaaaatgaggaaattacacagtgctatgaactaccctcattcttttttccaacatatttactgaatactcactttatgacagacatcattctaagtgctgaggataaaacaaagtgcatgttctcatggagctcatttctctatataactggttcacctgaggtctgattctgcattccaagatagctggagtgaaagattagtatgaggtaaagaaatagagggtaaataagaaaatgctctctggaggttattaaaaaatatagaggcaaagtcctggcaaaagaacgagaaacggggtgaaagggagaaggaggaagagagaaattaatctttatcaaatattttattattattctatttcttaagccttattcctgcttcttaagacagactgtgaataagccatctctgtatcccaactaatgcaatgactctgggggtactgtcagatccagatttatatgacagatttttgacttactaatttgtgggaccctaggcaactactagaatgtcttgaagacttaatttcctgcagcactacctcatagagttgctttaaaaaagtattactagcttacagacggtactgttataagtgcttcaaatatataaatcctcataaagattctgaggtaggtattattagcttcatttcatgtcagagcaaactgaggcataaagaagtcatatagcttgttaacggttgtatagctagtgtctggcaaaaccaggaatcttaacttccagagtctgtggtttaaccactgttcacactgtctataatagcatatagtaatataagattagaactaaatagggtgcattccactgcaaagttctttctcaccttcttctactccattatttgttgactatttactgatccccatgttgtcttgcaactgtgatagataatagagaacaagggtgaacacagcatatctggttcttgccctcctggaggttctggccattaagcaaataacaattcctcccaaggttctcaggcttccctgttttctcctatttctctatctgtccagcagtactccagccaaccaatctaagactgaccggcgtgagcagagaacagagtctccaggaggtctgtggccagggccaggcgatttatgggaaagaggcagacattttcctgggttagtgaccttgttttctctccgaacctccgcttaaaatggcgggatttgtaccaaggttctttcccgcaccaaccttccattattcacccttctccccacccccaaggcccgtcgggcctatccctgacccgcgttcctgcacttgaggtgcatttccgcacctggatccccagatactgtttttcccccacgttgagtctcccgaatttcacgagaactctctctcgcggtctctgccccgcccctcgcacccaggccccgcgcccgctgtgggctgccgcccgggaccgaagctctcagagcccgcagctctggttcaccaaccgctgggtgggagccaggcccggcctttgagtggcggccggggtggtctgcgctcggccccaggaaaaatctggcacgggccaatcgcagggaggcgaagggcagctccggaggtcctggccagaagcattggtcacccaggccaagcaggcgtcggggcgtgggcacaagcagagctcgcggccctgaccgcggccattgtgcttggctgcctctcctcaaggccgtggtgggcagggcagcaacgggagaagcgccgagagcgccactgcaacgactttcccctaccctcagctactgtgctttcatgtagtgaaagaaacagggaaaaggtttgggttccttctgcggcttatgaagacgacaaaaaacgaaaagagtgggggcgggaggcagaagccgcgagcctctgcgcgcgcccggtcacgtgggccgcagggatcgcatggcggcggcctgcgcgcccccgcgtccccgccggccaagccgaccgggcgcgcgcgccgacggggcgggcgcatgcgcaagggggcgcgccgcctctgccccgcggcgagggtgtctatggagaggcggcggccgcggctgctgaggcggaggctgaggcagtggcgatggcgccctttcctgaagaagtggacgtcttcaccgccccacactggcggatgaagcagctggtggggctctactgcgacaaggtaacggagcgct

SEQ ID NO: 31677 - DNA, 2300 bp, Homo sapien
aacaagttatttttgttatatgttttatcattctaactcatattcccaaacttttcaggattttacttatctatcaaaaaatcccaattatattcctgttctttccaatccccctaaaaaaaaaaaagcagtatgtctcattctcttctctgctgataggagtgtaaaatggatcactctatgaagggcaactgtaaatatctatcatatttgcaaacacatttcctcttggatccagcaattcttttcagaatctgacagttacccctgcaaatgtagaaatgacatgtattcactgaagagttgtttctaatatctgaagactggaaacaacgccaagtgtccacctacgcgtgatttactgtataaactggagtatatctacaaaatggagtatgtgacaggaaaaaataagtttaattgaatactgataaggaggaatatccagaatatacagtaaaacaggaaaaaaaaaaacatgaacaatgcagaaaatattgaaggagagaccgagtgaaataagactgtatattctcatctgcttgtatctctgcatgaagaccggaaggataaacaagaaactaatttaaaatgattacccgtgaagactattaggaatggtactggatagggactagggaggaagtgtttcttgctgcatttcttttcatgtagtttgagccatgtaaaagaaatatttgctaatcaaaaaacagctttaaaaatccagtgggagaggctgggtgcagtggctcacccctgtaatcccagcactttgggaggcccaagtgggtggatcacctgaggtcaggagttcgagaccagcctggccaaaatggtgaaaccccgtctttgtatttttgaaaaatacaaaaattagcctggcatggtggcggtcgcctgtaatcccagctactcgggaggttgtggcaggggaatcgcttgaaccaggaggctgaggttgcagtgagccgaggctgcgccactgcactccagcctgggcgagagagtgagactccgtctcaaaaattaaaaaaaaaaatccagttggagaatcaaaaatttttaaaaatttgactgtgtaatcctacaagaagtaagtagcttgagaaagagaaatgctgataaagtcgcattaagtttcagagttgaaattcaagctcctgtatctaacatgtttccctgtttaaggtagaatttaaaaaaaaactatatatgacatatatatgtcaacccaaaaaaataaagcagtatatattatatatataagaatatatatatattctcctttatatgttttttgtttcacatatatatataaatatatatctcaaccacaaaaaaatttggtttgtgacaaagatgcacttatttgcacgaacctatcttgttaatgatcaagaaatctgctttgttacaatcattagaggacagaaatatacatacatatttaaatctatttaatgaaatgcagttttatgttaaaaatcaatgatctgctaacctaaagagtcgcacaggaatactatgattattaaacacaatgcgattctctaaataagtaaacacgtgcaatgatatcaaagttcaaaattctctaattcttccacaaagactatgaaaatcaccttggagtgtatgaaccagcgtcctggccccgccaggtcggggctggggcgggcgcgggccgggagcgcttaccccgcggcaggagcgattcagcgccactacctgcttcgcctggttgtggtgtggctgctgcgccaaccgaaaggcctccttaatccgcagcagtctcttttcgctcccatggctctgggactctgtccggactagccctgtccgcgctcggctacatccggcccgcccaccagctcagaggcagagttctccgcggtgtctcctagggtttcttgtcagagggccccaggcgcctagggagtcgttaccgccctggcattcaaataactcccgcgagaggcggaaatcccgcgagactgccgacagagcgtagggaagtggaaaagtggagcctgcaccgcccgctcccggcacccccggacaccgccccggtctcacgcatgcgcagagggccgatccagttcttttcggctggaatggggaatttgtgaggtaggccggaagtggtgttgcggagggaagtgtggggagagcagaggcgcagctctgctggagagacctgaggcttgcagcgctgggcccggccgggtcgctgcggctgggctggaggtgaggcgaaagaagggcatcctctgatgggagtggaccggagtccgcta

SEQ ID NO: 31678 - DNA, 2300 bp, Homo sapien
cacacatcttaagcatcagtgtacacatttataggtctttggtgtttgggccagcagaacccacctgggttatggaatcacactggtgtacttgatcgtgttcgggtatgaacatgctctgatttacattgagtactaattgagcatgtctatttaaattaaagttccagaatttatgtttaggccagaacctcaggtttgaacttctcccctaaaattcctctggcttctcattaaagccgctttcggagatataagtaaagaaagtcaaacaaaagactttgtagcatgttttgtttaacatgttttgtttagcactgtttttcttgagctatatatgataaatatctagggagaggtggcagaaggacaaaattgtagtagtttgaggtttcttgggggaaagttgaagcattaaaacatgttagcatccttatatgaacttttaactatggaaggaagagtcagtattccctttcaggcagctgtttatctggcttagactgcctcaaggctgtgtattgcccttcagcttttcttatgcattagaaagagatctagatgcatttgcctttagcagtgtagttctgaatacattgatgaccacccactgtgctgggacatgcaagaggtatgtaccataaactctttagtcctgctaatgtcctcgacagaggacataaaacctcctaagaaaagctttgtctctttccagccaaggttaactatttgtaacatgtcatctttcaaggaagcatctaaccaagattaagtcaaaggcatctaccaggtcctgaattctctcccagatgcacaccttttaaggtacaatcaggtaccatatgtaatctgtagctatttaaccatcgttaaagcatttaggactttgatttcctagaagaagtcatggtctgcaaaataattgtattaaaaggtataaaacctgatcaggaaaaagaggtttagggccaaactatacaactttgtaactagaccaataacacaaaataatagtgttttaaaatgtacccaggatttattttaatcagatatggtaagatatgcagatgtgaaaatgattgtcatgaaagaagaaatttttatactcatggatccctagaaacaggaagcatggcaccttacaccatgcaagggtgccatacctagaagcagcagggtcaatggggagaggaagtacaaggaaactgcaggaaagcctttatttggttttctgaggaaggaatgggcaaaactggataagcaggcttgaacaggtttaaaattggctagttgaaataattttggccgacttcgggcgtaggggatatccctagttgcctggtagctggtctggagtgattaggatagggcaatattggccaggagtataagaacccaagatgtctgtgttgggagttgggggattctggattggttagtttgcataggaattagctaaccctgggagaggtagtacctctccagtcatcaaggacccacctagataccaaatgattaacaatacaaaaataagaaagtacaattaatacaaacagtcataataaagatacagtattaacacagttaagacgtggaaattttaataaataaacactacagtaaatgtaggactgcacccctcccaaaaaatttgagataatttgatggaaaggtgtgtaaggaagggttgaaactactgttatggtcataagactgaaatatactatgatccaagagagcagtgcagcactaccaaggcaggcatgaccaagataggtgcggccaagcaaaaaggaagtatgtatggtgaataagctatactccttcatggcttgctgtattctgttttgttaatatactttccaagtcctgatgccaacttctgggttttactgtcactatttttctatttactaatctcagttgaagtggtttgccttacagaaataggcctaagccaatataagatagtgataaagagagctatagactgtttgcctcaccatctatgatcttggatatcataaaggcccccatagctggcagtaatactactttgtactgtgatgctttaatgtcttatctctggtcttattcccaggtcaaggatgcattccaggaaagttctataaaaatataccatcaactccaacctgatatttgacctagccatggaaaacctcattggctcctcactggatcagaccataaaaatgatccaggaatgaaaatctaagataaattcccaccacttcaagatgttcttatacaagtcaacagtctagcagatcagccagtct

SEQ ID NO: 31679 - DNA, 2300 bp, Homo sapien
cataatcattcttcaatgtatatgaagaactaagctgcaataattcattctcttcttcaggcaccaagtttagctcaattattgattcagggtgtcgaaaagcaaatggatcttttacccaactgttttcccttaatgtttcaaatttttcttctggaaagaaatggttaaaagtttgagacagagaagtgagatgcaacaatatctctaattttatttctttcaaaatgttttcattaataatattctcttcaatatgctgcaaaaatcttggaaacatgtaatagctaggacgattacttttaagtcttacttgccataacaataatgtctttcgaaatccctggatacgttcaacatgttggaatacatcactgtttttcccctgtagttttaaactcagttcattaagaatgctaaaaatatcagttaaatatgccaattttgttacccaagtatcatcttcaaaaatacttgccaaatgagattttttttcaatgagaaaaaagtgaatctcattcctgagctcataaaccctgcttagtattttcccttgagacaaccaacgaattttggtatgatatagtaagtgggtatgattagttccaatctctgaacaaaatgtttcaagaagccggctattcaatgagcttcctttaataaaattaacaactttcactgcatttttcaatacctccatgagattctgtggaatttctctggatgctaaaccttcacgatgtataaaacaatgattccacacagcaccattattagtaacttctagtaattttttaattactctgctatgttttccagtcatggttgctgtgccatcacttgtaattcctttacagtttttccagtttaatttatattggccaactatgcgcctttctaattctgtaaaaatatctaatccacttaggtgtgaggttaaatttaaaaaacacaaaaaatcctccaaaaaatcatcttgccacgcatatctgacataaactaaaagtgttgtgcagcttccaatatcagtgctttcatcaagctggattgcaaaatctataccagactgtaaacgagtaataagcattgtttctaaatgttctgcaatagtacaaattcgaagagatactgtgttatcattaggtatagtttttaatttatcagctgatttatcatcaaatattgtacgcaccatatccaaacatgctggaagaataattttttcagcagctgtgttagctattttctcttttgccacacgatatgcaactaaatatgatgataataaggctttctcactaacagcagtagaacaactaagaaattgtgttgataactttatgtcttttttctttctttgaaaatattcaagaggcttatcaataagttcagcatgctgagtttctaagtgcctttttaatttcgaaggttttaagctttcattcgcaagaatattattacaaataacacactgaggtctgtcattttcaaagggtttttcacatttgataaagccatattttaagtaatcttcattataacgtcttgcacttacttttttctttttgaaatgtggctcaaatgaagttgaagtttgcagattggagtcagtatttttctcaatattgtcactattcacaattccagattcaacagatgaacttgaacatgcttctgtatatttcacttcactattcctctttcttttaataaagaaatgatccattttaatagcaatttgttccagtttgattaaaatgttataattggcactaactcaaaaaagaagaaaaaaatatacagtctaaataacatcttttcaaaaactacactcaaagtttgcaattgaatcgaatatttcagacttcacaactagttgcaagtaattgtaatataaaacttgactatagaacattaaccgtgctattatgaaaatcaagcaagacacccaggaatcaatgactgaaaaccatttcttagccaatatacattctattcatcatatctcctccatcaaatacccctctcgcatattgaaattgacctcagcattccttgcaatgtgcacaattcaggcaaaggattcatgcaaaacactttggtattttacattttattttgttttttagacaaatgttcattgtgactcacagaattgatttcatgcctcactaatgggtctcacatataccatgaaaaatactgatatagagacattttgtgcctttgctgtgttggtaccttgagtatgtctgcttgatgatgaaagagactggctgatctgctagactgttgacttg

SEQ ID NO: 31680 - DNA, 2300 bp, Homo sapien
aaagtcaggctgggaactgctcagggcaaacttgcctcccattctattcaaagtcattcagctgctcactgagatatatgcatattctgatggccttctttggaaaggcttatcagaaactcaaaagaaggcaaccatttgtctctcacctacctgagacctggaagccccctccgtgcttcgagttgtccccgcctctctggacagaaccaatgtacttcttacatatattgattgatatctcatgtctccctaaaatgtataaaaccaagctgtgccctgaccaccttgggtacatgtcgtcaggacttcctgaggttgtgtcatggacacgtgtcctcaaccttgctaaaataaactttctaaattaattgagacctgtctcaaaatttgcgggttcacacatgttatttagaaatatggaagtaaacacaggaacaaaacttgaaagaattaaaaatgctttcctctggaaagtggatttaacttaaggaggaactgaacaggagaatgcgggttttggttacagaaaaaaagagattcaaataaaacagtagagaacacctgttctgtcctcccttgtgtttatcaagtgcttgccaggcactcaaagttcattgctgtcattattgtaagaattgaggacttgggcctccacgtggtattctattaatactggctctttttttttttttttttgagacggagtctcactctgttgcccagactggagtgcagtggcccgatctcggctcactgcgagctctgcctcctgggttcacgccgttttcccgcctcagcctcccgagtagctgggacaacaggcgcccgccaccgcgcctggctaatcttttgtatttttagtagagacggggtttcaccgtgttagcaaggatggtctcgatctcttgacctcgtgatccacccgcctcggcctcccaaagtgctgggattacaggtgtgagccaccgcgcccggccaatcctggctctcttaaactgaacatctccaggattttgcatctatcaggaagggatattgtgacctctgacaagttacagtcggcggtaggtatccatggagaattggttccaggaacctcctggataccaaaatccacagatgctcaaggcccttatattaaatggtgtagtatacagtatttgcacatcctcttctataattcacgtcatctccagattccttgtaatatcaagtactatgtaattgttacataagtagttgttacattggattatttagggaatgatgacaaggaaaaaaaagtccgtacatgttccgtacagatgcaagcattctttttttcctcaaatgtttctcatccgtggttagctgaatttggatgatgaatccgcaaatctggagggccgaacatgcttaacttccctgagtttatccattgctaaagcgagagaaattacaaacttagctaggaagggtgttgcggaaagtaattaatattatacttgcaaagtgcttggcacgttgttgtggttattatttcctgaaaacaaacaaacaccacttattggttggtgtgaaagagggcatctgtcaaagttgtcgtcctttggagccagaaaagtatttcttctgatgatgactgacctctcctcacctctccttcaaccttgcggcttctttggggctccctccccgtggacagcggtcaagattagcctgggccacagtgcactggtcctgtcctgggtgatgttccaagctcactcttttttaattttatttatttattaattttttttttagacagagtctcactctgtcgcccagggctggagtgcagtggtgcaatcactgctcgctgcagcctcgatcccctggggtcaagcctcctcacatctcacctcgcaggtagctgagactacagatgcgcaccaccaggaccagctaagttttgtatttttttgtagagaggaggtttctcacctgtatgttactcaggtttgtctcgaactcctatactcaagcgatccgcccgtctaggcctctcaaagtgctgggattacaggcatgagccgccgcgccccgccccacgctcagtcttgaaattgtctggaacgggaaacggcaaacagcgagatatccgagcgagagtcccgccctgcatcagtttgcggaaccgccttggtagaaggagagaaggggagtggaggaagcacgggactggagggaccaaagttccccgatggcggcccaggggtgcgcggcatcgcggctgctccagctgctgctgcagcttctgcttctactgttgctgc

SEQ ID NO: 31681 - DNA, 2300 bp, Homo sapien
aggacataggcatgggcaaagatttcataatgaaaatgtcaaaagcaattccaacaaaagcgaaaatgacaaatgggatccaattaaactcaggaacttctgcacaccgaaagaaactataatcagggtgaacagacaacctacagcatgggagaacattttcaaaatctatccatctgacaaaggtctaatatccagaatctacaaggaacttaaactaatttataagaaataaacaaccccattaaaaagtgggcaaaggacatgaacagatatttctcaaaagaagacatttatatagccaacaaacatatgaaaaaaagctcaacatcattgatcattagaaaaatgcaaaccaaaaccacaatgaaatatcatctcatgccagtcagaatggtgatcattaaaaagtcaataaacaacagatgctggtgaggttgtggagaaataggaacacttacactgttgatgggagtgtaaattagttcaaccattgtggaagacagtatggggattcctcaaagatctagaaccagaaataccatttgacccagcaatctcattactgggtatatacccaaaggaatataaatcattctgttataaagatacatgcatgcatatgttcattgtagcactattcacaatagcaatgacatggaatcaacccaaatgcccatcaatgacagactggataaagacaatgtggtacatatacaccagggaatactgtgcagccacaaaaaggaacgagatcatgtcctttgcagggacatggatggagctggaagccattatcctcagcaaactaacacaggaacagaaaaccaagcactgcatgttctcacttataagtgggagctgaacaatgaacacagggaggggaacaacacacactggggcctgttggggagagtggagggagggagagcatcagaaagaatagctaaaacatgaggggcttaatacctaagcaatggattgataggtgcagcaaaccaccatggcacacatttacctatgtaacaactctgcacgtcctgtacatgtatcccagaacttaaaacaaaataaaaaagataaaaaataaataaaacacacagtccaaaaagtcatcctgtcttacagagctatgggtgatctggtctcctgctactttccgaacttctgttctgtttccctcaaccctctagcctaactacaattggcctccttgctgctctggaacaggccaagagcttttctgcctcagagtctttgcacctgccatttcctctgcttgggaaatgtttgccccaagggagttgggtgacttgatcgctcacattacttaggtctctgcttgaatgtcacagatgttctcttaataaagaagaggcaagaaaagccactttattatttattaaactcccgcatagagtgcagtattattactgtgtgccagaccctgcttcaaacacattccatggactataaaattgcatctctgagcagctcctagagctggtagtaacaacttacatttactgggtgattaccatgtgccaggtattgtgctaaacacgttgtagatattaactcacttaatcctcgtaacaatcccatgaagtaggtactgctactatcccggctttacatctgaagtacagagaggttaagtaacttgccccatgtcatccagcaagaactaaatttgaacccagagcttagccactgatgcctcttgagagaaggagtcagacttaagttgagtctttaaaggtggttgaccaggcatttgtcagagttaagaaagagaggtaggacatccttttccaggcagagggcattgtgtgcacacacgtatagaagcaggcagcccaccctcatgctttccaggaagcaaatgtggctcaggtgtaaagtgcccggttgatgaagggagttagcggagggagtataaggatgtactgtctgcccccttaggacacctgcagaggattaaggtggctgtttctccctggaggtggagtgggtgggtcactgcacaggagcctatagttgttggtcttttaaactcttattggtgtaaccagccacggaactctgaggcaaggggttgggggtgggaagggaaacagagaaaaggcaagtgaaacagaaggggaggtgcagtttcagaacccagccagcctctctcttgctgcctagcctcctgccggcctcatcttcgcccagccaaccccgcctggagccctatggccaactgcgagttcagcccggtgtccggggacaaaccctgctgccggctctctaggaga

SEQ ID NO: 31682 - DNA, 2300 bp, Homo sapien
gtgtctgcgtgtgagtacctggaaatgaggttggaagggcaggatgagccaaggaggtgactgccccacagcctgctctgatgctgtgctgctgagtctagaagggaaagagcaaagcagacgctgggatgggagtcacaggaaggggaagggccacaaggagccagtggggaatgtgcagtgttacctggcaaagctcagagaagcacttcccagaaagaccccggagtccacatgtttccttgtaaatatgttttgtgttccaactgcaatctgcctccagaaagaatctgcctgcctcccaaggatcaagtagaattttccattttgtaggagactccccttgttgagcaaagcagctttgccttgcctatgtccaaataatcctccaaaataccgcatgagagagcctgttcgtggaggtcagggcctcagcggggtgtttgtgaggatagtgaggacggacccctgggtgaggcaattttaggagagaggcacacagcttcagaaatggcttcttccaacagattcatgcagagactgagcctctgagtaaattggtcaacatctatagctatgaccacggaattctcaaacaggtggatcgttcataaaatccaaacacagttacaagttttggcctgcatagtgttgagctacagctttatttttagaaaattttaattagctgccaaccaatttcatataaacacatctggatttggggatgtcattttaaaaatcagacagtgtgacaatactgagcctaatccctgcattttctcagtcaattggagatgagtgttgacctctatggaggcagagactctctagtttgccacagtccccatcactccctattgccttatctcaaacccaaaagtcagttgccatttaatatcacactaaacaatagttttcttatggctgaattaaggaaaagtgaacaatttcttcttctgaaaatctatgaaaggtgaggtgataatatataatgagggccacatcttccctgtagaagtgagtttctttttaaatgctgcatatgtaaataacaaatgtctgttttcaaagtatacaacttaagaccctgtcatgaggcaaaacgattctgctccactttatgttaacagcttagcccagtaaaaatttagtatgcagctataaaggagacgttgttattgtcagcacactgcaaatggatgatgggagaggctaagtggtttgggcatagcactcagctaaacacatgctgtggccaggattccacctgggtcattctggtgtgggactgtgcctgtagcaggcagggcagcctgagctctctgaatgagacctgaaggtaagtatttacaacagtaatcttatattaaaaattccctctttaccagcctctcagagcctggtagaattccctgataaaaaagagggaatttttaatgtaaatttccctgcctctagaattagggtatcctctgcttatgtagtaacttcagatggaaaaaggaactcagacactacgaaaacttcggcaacttcagtcacccattcaacaaagatttattgagagtggcaggcaggaagagatcagaccatggatgtagagaatctcacttttaattttgagatgttccttttcctgcctctgtgaacttggacaagctcttacatatctccagaaccaattcctgcttttgtaaaaggggaggaatcattgcactccctactagagcggatgtgatgagggaaaaggagaactcaggtaaaatgggctcagtagtttggcagctcggatcatgtcattatagttattttactcctccatagacatcactgctggggtcctctccccatcaaggagggtcactgtgaggctgagttgtcctcctatcctggccacagggtggacagggaagggcctagaggaagcgtttgatggcatgcaggtaaccccccttttcactggattacatccagcactttccctgcaggaaccggctccctcggaggggcgtggctgggaggagctgtgagtaacgtgccacagtgttgtaaaaacccagtgagtgttataaaaacccagtcagcctggctcctgttgaatagtctaccccccttgcactctacctgacacagctgcagcctgcaattcactcgcactgcctgggattgcactggatccgtgtgctcagaacaaggtaagagcctcgctcctttaacagctttattacctgctgccacttctcactccaccaagggcctggagttccttgggcctgcattccatcatgggcaggtgg

SEQ ID NO: 31683 - DNA, 2300 bp, Homo sapien
ggagcctgggttggagtgctgtttactccaggggctcctgagttggaagcacacaaagggcaagcctctgtcttagaactggccctgtggattggtacgggggctgcggaccccaccctaagtcacctctccagcctgattctcaccactgcctccttgcccttgacatttcagcagtccataaacctgcactccaggatcactcctttacaggaagcattatcctgccttaagaatctgcccttggccaggcgcagtggctcgtgcctgtaatctcagcacttagggaggctgaagtgggcggatcacttgttaggagtttgaggccagcctggccaacgtcgtgaaaccccatctctactaaaaacacaaaaattagcctggcatggtggtaggcgcctgtaatcccaactactcaggtggctgaggcaggacaattgcttgaacctgggaggtggaggttgcagtgagccaagattgtgccactgcactccagcctgggtggcaaagtaagactgtgtgaaaaaaaaaaaaaacctacctttagctggttgtggtggttcacatctgtaattccagtgactccagaggacaaggaagcaggaggattgcttgaggcctggagtgtgagatcggcctggacaacagagtgagaccctgtccctaaaaattttaaatttaaaatttagctgggtgtggcagcccatgcctgtagtcccagttacttgagaggctgaggcaggagaagtaattgagcccaggagttggaggctacagtgagctataattacaccagtgcaatccggtctaggtgacagaatgaggccaaaacaaacaaacaaacaaacaaacaaaaaaaacacctgccctttaccctttctcaacctgacaaattgactgacttgtcttgaaggtttggcaccacttcttggaagcttcctctgctccccacctggggtgatgccctcttctggaaggctctcactgctacacacacagtggctgccgaagctcagcctggctttagttccagccctactaggtcttctcaggactcaggatatccaggtggaaggaaggctgtgccaggtaccaactaccctacgtgggatcgccaagataaatccctcacattcaaactagtcccccaacatccgtcaaccctattcctaacagcaaattgccacctttagtccactccacagtgccctctggaagggtcatcaaaagacagttatgaccataccaaactatgattcttgacacagaatcaaaagttattttcaatttattttttttctattgtagaacaataataataatatttaaaatcatattttcctgtgatataattaaaactgtgttatttcaattgaatttgaaatagaattcatggtctaaaatagactgaatcccactgtgaacatatatttgcatgccttcctcgtcatcattcagttggtgcaattgtaaggcatgcaataacaagggaagtgaacattgcagcactgtggcctgtggccacggtgatggcgggacagccccacagaggccacaccaggtgactctcagctcggtgggtgggagggggagtgtctctgtgtccctctggcacacacatcctcacacaacctcacatagtcttttttgcatttgctaggccatctcataacacttaggctcataaaattctggcttcctttggattaactaaacccatggtcccccaagatggggattccagggagcaggagggagcctcgaggcagcccagactcccagctgcaaacctcactttccagaataccactgccacaccttggcatataccaaatgttgacaaagaaggctgttcccgtacaagggccaattttagagcaagcaccctgtggttggaaaactgtaaaaccctcagccccaaagctgtgtgtggcgctttgtgcgtgacagggctggggcagatctctctgaggcactcaggaaaaccattccctttgcttgtggtgggcggcccctggtggctgctctgcccttgccaagtgttacgtgtctaaggtctgtgggcatgtttctcatttgctgcaaaacatcctccccacccttgcagagaaagagtcttttgtgcagcaccctttaaagggtgactcgtcccacttgtgttctctctcctggtgcagagttgcaagcaagtttatcggagtatcgccatgaagttcgtcccctgcctcctgctggtgaccttgtcctgcctggggactttgggtcaggccccgaggcaaaagcaaggaagcactggggag

SEQ ID NO: 31684 - DNA, 2300 bp, Homo sapien
ctattctcccaaaggcaggtgggcaaagaaaagttcccaaaacgggtggaaagaccacagaaaaatttgattatttttcccagtcttcactctgaagactatcaaattggcagaaaggggaacaaataagaggcaagtgttgctagaaactctatctgaaaaggacagaaatctgattttcatatgaaattaccctttttaatgttagcaaacaatgtggagaaaaaaacaccatgggggcccaacaaaatatgtctgtgaaccaccttcttgctagttcggctgtagatggtgttcattgtgcatgctctgtagattctttgctgttgttgttgtttgagacacagattccactctgtcacacaggctggaatgcagtggtgtgatctcagctcactgcaacctccacctcctgggttcaagcgattcttgtgcttcagcctcctgagtagctgggattacaggcacacaccaccgtgctcagctaatttttctgttattagtagagatggagtttcactatattggccaggctggtcttgaactcctgacgtcaagtgatctacccaaattgctagattacaggcatgagccactgcgcttggccagattcttagatagaagtaggaggggtccgcatggctgcacctctgcagcctagaggaggaagcaggtggatcccggggaatgctacataaacagcagctgaccctcacctgtgtaggttctggctgcataggtcttgtagagggtgcttggagccccttcccttgtgtgatgtttcaggttcttcgggggccaggaccttcctttttctgtgaaggggatagtgcatcattgacaaacagattccacctcctgggccaacttctctctgttgtccggctgctcagagccctgttgtgttgtgttgattgaaatctggaggtttaatccagactgactcaaaagtactgtcatcagtgtgtgatgtctactctggagacaggagagtctcagatgtcatgtattggccttctttattttattgctttattgtgttgggcacccaggaagttatcattcagagcccaaatcctaatggcctgaagaaatgtatcctccagttatggtctcacctaaggccctttgtttctcttacatcaggagcttccaggattagttttagttacttgctatagtttcagtgtcccctccaaaactcatgttgagatttaattgccattgtgactatattaacaggcgagaccttggacaggtggttaagtcatgagagttctgccttcataaatggattaatgccattatcatgggagtgggctcctgataaaaggaggaagctcgaccccattccctgtctgtctcttgcactcatttgcccttccattatgggatgatgcgtcatgaaagccctcaccagatgccagcaccaggttcttggacttcgtggccttcagaactgtgaaaaacatatttttttctttgtaagttacccagtctctgatattctgttatagcagcagaaaacatactaagacactgcttaaattggcttgttttgctcatttcctgcttctgaggtctccagagttccctctcttccaggataggatggatatactgtctggaggagaggcaatgctaggcaggaggagaagaaccagtgatcctgttagtgtgcccagcatccctctgctcaataaggcaaatgtagatgttctttggaaatgattgccagagcctacagtccttcataatgttcagctccaggtcctggtgaggtggacagtaacaagagattgagccagcccctgcttgcacccttttccaggggccctttgagccctttcgataaagagtttgtttctttaccgaaagcataaaaggtagtgcaagaagaggcacacagaaccaagcatgtgcactttctaaagtgaaaaactttagaaggaatgtcttgcctggcagatgccctgatgtcctccgtgcatgtcctcccccaacctcatgtgtctgatgcagcactgcagtgaggcacggtggatcctgcaggttcagaggggttgtgatccacctgaagtcacagtcgggcagggtgtgccagagttgaaactgccgaccttccagatggagttcactagtctccccctggcgtatacctttttggttgtcaaggccattatcacagagtcactttagaggacactagggctactgttgatggttcacccagagagccacttagaggccgtgtgcactgcctgatcttacacccaggaatttgtagttgtaacaaggtc

SEQ ID NO: 31685 - DNA, 2300 bp, Homo sapien
gtggtgacttagggtgaagatttccatcaggattacttggtaagcttattagaaagacaggttccagtgttgcacatgtgtccagcctcaaacggtgtggtccctagacttgaggccatgcccttctactttggattcggggtgaggtggagagggggatgtttgaaatgagattagtgagtaaataagtagaatataaggcagagtaagatatatctccagcggcaaagagaacaacacacacttggagaagaaataagcatataagcatgtactggattgctggggccccagtggctcgtactagagcctgagagggagggcactgaagggacagtgtcttgatgtcatagttagatcttggactttgaaggcaaactagtgggtttgactcttggccgcatggttaattgaaggggtgggttgcccctccacacctgtgggtgtttctcgttaggtggaacgagagacttggaaaagaaaaagacacagagacaaagtatagagaaagaaataagggggcccaggggaccagcgttcagcgtacggaggatccatcctggcctctgagttcccttagtatttattgatcattcttgggtgtttctcagagagggggatgtggcagggtcacaggataatagtggagagaaggtcagcagataaacacgtgaacaaaggtttctgcatcatagacaaggtaaagaattaagtgctgtgctttagatatgcatacccataaacatctcaatgccttacagagcagcattgttgcccgcatgtcccacctccagccctaaggcggttttcccctatctcagtagatggaacatacaatcgggttttataccgagacattccattgcccagggacgggcaggagacagatgccttcctcttgtctcaactgcaagaggcatgccttcctcttatactaatgctcctcagcacagaccctttacgggtgtcgggctgggggacagtcaggtctttcccttcccacgaggccatatttcagactatcacatggggagaaaccttggacaatacctggctttcctaggcagaggtccctgcggtcttccggccttccgcaatgtttgtgtccctgggtagttgagattagggagtggtgatgactcttaacgagcatgctgccttcaagcatctgtttaacaaagcacatcttgcacagcccttaatccatttaaccgtgagtggacacagcacatgtttcagagagcacggggttgggggtaaggttatagattaacagcatctcaagctgaagaatttctcttagtacagaacaaaatggagtctcctatgtctacttctttctacacagacacagtaacaatctgatctctctttcttttccccacattagggagggcactgaagggacagtgtcttgatgtcatagttagatcttggactttgaaggcaaactagtgggtttgactcttggccacatggttaatcacctgtgaccttgggcaagtcaccagaatcctctctgtgtcagtttcctcatctgcaaaatggaataatgccttaaacaaggaggaccttgtttctatctatgaagcatggagaacagtgcctggaagatagtaagtgctcaataaatgttagtttccaagatctcaagctttctctacaatatttagtatttcccgaacccataaagggtctgtgttctgagtctggccctcctgagaagggaccttctgtgagtcatggctttgatgccagcacctgccctgtggctctggagcaggttgtgtgcttggtttccacccacccatccggattaggctggaggccttgctctaaagctttgcagcgtcctctccgggcagctccaggtgcaggcagtttacacgcattgatgactctgctgctgtttctctccctgccagggatggtgccttgagtgaatgacccccttggagaacattcttccgcatccctcgcctcaagccagcctcagacagaaaactgaagattcagcagatccagtgcttcctgctcctcttctgcccaggaacacgcttgccttccccaaggcttccagaagctctgaggcaggaggcaccaagttctacctcatgtttggaggatcttgctagctatggccctcgtactcggctccctgttgctgctggggctgtgcgggaactccttttcaggagggcagccttcatccacagatgctcctaaggcttggaattatgaattgcctgcaacaaattatgagacccaagactcccataaagctggacccattggcattc

SEQ ID NO: 31686 - DNA, 2300 bp, Homo sapien
tcctggcttcttcagtgcctctttcagtaatatgaaattaaaaccaggtattgtggttactcacctgatttttggttcttataaaggtgctttttgtgtgtgtagatagcagttaaattgtgttcctagccggggtggggggtgggtggtcaaaccttctatttgaccatcttgcttcacccctttctactgatactattgttgttgatattattaggaatgaaaatgagccctgtgagttataattgtcttcattttgcagaccaggaaactgaggctcagagaaatattaagcagccaaagtcacagcgattaaaagaggcgggaccaaactttgacggagatcaggacccactcctttgagaaatcacctcttttgctagctccagcctaaaagtgctatctaggagaaggtttatgggaccccagcagatgttcaaccagaaacttctgacctgcaggggctgcagaggggaaatctgccctgattagaagagatttgttttccacccatattagtttgatctcacattgctataaagaactacctgagactgggtttcagaggctgtaccgtaggcatggccagagaggcttcaggaaacttacaattatggtggaagaagggaaagcaagcacatcttcacatggcagaaggagagacagagcgagcaaaggggaagtgccacacacttttaaatcatcagatatcctgagaactcactcactatcatgagaacagcaagggagaaatccgccctcataatccaatcacctcccactaggtccctctcccagtgaattataattcaatatgagatttggatggggacacagagccaaaccatctaaccttgccatgtcctactgtactttttggaagttttctgaactaacatttcttgtctagaaatatacacactcaagatcaatctaactattaaaaacaaaaaatgcttattttccagtacctgttttatgttagattctggggtaaaaagaaaaaggtactgacttaatgttcctgtctatcattcatttgtagcttgtgcatccatcctttcatctgtctatccatatcacaaacatgtattaaacacctgctgtatgctagacaccatcctgaaggtgcatttcttccctaagtcttttttttgcctgccggagagtacagtattctcaattcaagataagaagtggtgaataagagtgaagtgcaaattggtgaggacacttagacaccgagtgattacttctgacaggtttccaccactcagctaagtagcaaggtgaagactccgaggttgagttgtaactcacagagcgggaagaccaataggcagtgagaaaagaagttgcagtggcttcacgttatagcagatgcctgtgtgtacacatgggagcgaatatggctttatgctgtttttcaaccgcttcagccactagcattggtactgctgcacactaaggatccaaatgattgtttttttgttttttgttttgttttgttttgttttgttttgttttaaattgcattgggattaggcaacagaagggtctaatgcggccgggatgagacaggagagtttttaggagggtagctgcattctaagtaagggactctgcggggggaaaagaggcgcaagcgttgcaagaagggagtgcagggggttgagcaggcacctctacaggaaatggatgctgtccaggtgctggtgggcgccccagggctacgtggcgaagcagctcagccggtccaatcagagtgcgtccagggctcgggtttcgcgatctttaagtgactgaggcagatccccacgcggcacctggccatgctctcagctctcccgccgcggtgagtatgtttaaggaatcctttccattacggcggccccatacctaggtccccgtccgggacagaggaagccgcaacgggtccccccgggcacccgggcctttctcctgcctcccgccacgtccgagggtccggccgcagcgccgcctgagcccctccgcggccggcagtgggaggcgggctctccgaaagccgtcgcggtggtcccagaagccgggtcataaataattcacgagccagggtctggcgagctaagggaagggcggcggcagcggtgactagggcgggagcaggagcgggagccgggtgcacggtgagtagctgggtcctcatcccggagcgagagaggcatctgctgaccaggcgcggggctgagcgcactccttccactgtactgggggtgtacagtgaggagtggacgggttcgctctgcgccccccttacc

SEQ ID NO: 31687 - DNA, 2300 bp, Homo sapien
ctccaagtctactggctctgagctcagcatttgggcttgcttaggagttgctgtccttgtggcctaggctgcctttaaggttatttggggccccagagcactttactgaaactcaagttttcaccactggtatgggctatttcctctgagggaaattggctgagttcagcctagttttgctttctgctatgacagagcagtactgagttcaattcaaagtctcccaatcactgcactctccctttcccaagccacaaggctgctgctgctgggggatggaggactggcggcattggcaaatcaaaactgtctttcctggcttcttcagtgcctctttcagtaatatgaaattaaaaccaggtattgtggttactcacctgatttttggttcttataaaggtgctttttgtgtgtgtagatagcagttaaattgtgttcctagccggggtggggggtgggtggtcaaaccttctatttgaccatcttgcttcacccctttctactgatactattgttgttgatattattaggaatgaaaatgagccctgtgagttataattgtcttcattttgcagaccaggaaactgaggctcagagaaatattaagcagccaaagtcacagcgattaaaagaggcgggaccaaactttgacggagatcaggacccactcctttgagaaatcacctcttttgctagctccagcctaaaagtgctatctaggagaaggtttatgggaccccagcagatgttcaaccagaaacttctgacctgcaggggctgcagaggggaaatctgccctgattagaagagatttgttttccacccatattagtttgatctcacattgctataaagaactacctgagactgggtttcagaggctgtaccgtaggcatggccagagaggcttcaggaaacttacaattatggtggaagaagggaaagcaagcacatcttcacatggcagaaggagagacagagcgagcaaaggggaagtgccacacacttttaaatcatcagatatcctgagaactcactcactatcatgagaacagcaagggagaaatccgccctcataatccaatcacctcccactaggtccctctcccagtgaattataattcaatatgagatttggatggggacacagagccaaaccatctaaccttgccatgtcctactgtactttttggaagttttctgaactaacatttcttgtctagaaatatacacactcaagatcaatctaactattaaaaacaaaaaatgcttattttccagtacctgttttatgttagattctggggtaaaaagaaaaaggtactgacttaatgttcctgtctatcattcatttgtagcttgtgcatccatcctttcatctgtctatccatatcacaaacatgtattaaacacctgctgtatgctagacaccatcctgaaggtgcatttcttccctaagtcttttttttgcctgccggagagtacagtattctcaattcaagataagaagtggtgaataagagtgaagtgcaaattggtgaggacacttagacaccgagtgattacttctgacaggtttccaccactcagctaagtagcaaggtgaagactccgaggttgagttgtaactcacagagcgggaagaccaataggcagtgagaaaagaagttgcagtggcttcacgttatagcagatgcctgtgtgtacacatgggagcgaatatggctttatgctgtttttcaaccgcttcagccactagcattggtactgctgcacactaaggatccaaatgattgtttttttgttttttgttttgttttgttttgttttgttttgttttaaattgcattgggattaggcaacagaagggtctaatgcggccgggatgagacaggagagtttttaggagggtagctgcattctaagtaagggactctgcggggggaaaagaggcgcaagcgttgcaagaagggagtgcagggggttgagcaggcacctctacaggaaatggatgctgtccaggtgctggtgggcgccccagggctacgtggcgaagcagctcagccggtccaatcagagtgcgtccagggctcgggtttcgcgatctttaagtgactgaggcagatccccacgcggcacctggccatgctctcagctctcccgccgcggtgagtatgtttaaggaatcctttccattacggcggccccatacctaggtccccgtccgggacagaggaagccgcaacgggtccccccgggcacccgggcctttctcctgcctcccgccacgtccgagggtc

SEQ ID NO: 31688 - DNA, 2300 bp, Homo sapien
ggagtggccactgacatctcctcacacaaaatcaatggaactggggaaagaacaaggactaccccaacagctaaacctggaggcatctccctgataatgacttcctgcaactatgggttaaaaaaaatccagccttaaacatggtgaaccatgttggtgaagaatggatacgtggtataatgaagtccatggaagtccaggtatccagtcccagaaaaagccagggaagaagtgttaagtgatactgcaagctcaagatctgtgctcatcaataggcttcaaacaacttcatttcctctccacgcaaacaacaaaaaaaggcttttaaaatggtggctttcctgcaactgagaaatgttttaaagaaagtatagtgaagcctggctacatctatctctatttacaacagagtgcttttaatattcaagtctaagtaagtaaacagacagttgagagatttgctattttgtcttactgagatcctgccaatgaagaaagtaaatactcttgaaagcaaatgtttaactgagaactaaaccaaataaagtatggttgagaatttttaagtggttaattgaaaaagaccaaacaagaccgtctgtaattttccaaaaatatagactgcttcaaatagaacctacgtccagttctgggaatcagcaaatcaattagaatcgcatctgatcaactttatgccccttaagtagttttaaaatttcagtactcaagtacaatcaatgatgtaatcagcctcacaacttagttatttgcatgaacttcaggaaataacggctaacacagccccttttggacaacagaagtaattttttagttggaagaaatttaatggagttatggttcagttgctgtttacagcttgagaattaaaacgttgggttcactctatattcaagaagacatccatctcaaaaccttttttcatttaaaactaatctgtaactgcaatatgaatacaaatgcaagttttaaaaattcttttaaaatgagaataaaaacctacagcttatagaaactgtaacattgtaacaatacgtttaaaactggtcattgaatgtaggattcataagtacacattttctcatctagtaatttttttggcataagtttcagttcaggaaaagttcagatgcaacattttatggagtgttaaatatttctgtactgggcaaaactactgaacttcatggtcactaccacaccgtcagctgtctgtgaaaaatctacttgcagggcaagttaacaggtttctatggctcaagtttgcttaaaatacagaacaaaaaaagtcaccttggcatgaatataattaagaaatcagccgtgtgcttctcacgtttgggctccgagacgtgggagatgcccgctaacctaagaccttccgagggcgatgcaaggacccggacagaactttcccggccgcagaccccttctagggcacacctggcctggcgcggccgcgggggcctcggggctgcgcgcgcaacccgcccgaggaactgtcaacggccgcggagcctcggcagcctcggcggctccgcgcgcccacagcctggggagccccgggaggcaacggcagccgcgcggctcgggggccggggttccaaggcgcccccgccgccctcggtccccagtccgcccctcggagcccgccacggcctagcgccgcccgcctcacctgtgcggccccggcgcctctcccgccgccggtcgctctcgtagaagcccagcgtctctgtgagctgaggcgccggcgggggcccctgtccgccgctgccgcccggctgctccgcctcgccgcggccgtcccgctgcgggccgtccacgccgccaccgccgccttctcccggagcggccgcgtcgccgacgcccgccatgttccgagcacaacaaactgtccccgccgcctccctccagcctctgcctccggccggccccctccccgcctcgccccgcccctcgccggagcccgagccgccgccgccgccgccgccatccgcggcccgccgaccggcgcgagccattggcgtcagcgacgcgtgtgaggccgctgccgccgccgccgccgccacggtagccgccatcttcttcctgccctcgccgtggcgggcgacggtttctcgcgccgtggctggctcggccggccggggcaccgcgccgggctccatgcagccgggctgcgcggtcccgcagagcgggcgcctccggggctcgagtcggggacccggcaggagcgggccggggatggcggcggcgggcggcgggtcggccgtggagccccg

SEQ ID NO: 31689 - DNA, 2300 bp, Homo sapien
aagccattctcctgcctcagcctcccgagtagctgggaatacaggcgcccgccattacgcccggctaatatttgtatctttagtagacacggggtttcactatgttggccaggctggtctggaactcctgacctcgtgattcgcccccttcggcctcccaaactgctgggattacaggcgtgagccaccgtgccgggccctctctcttctatttaaaaggataggcacagcctttggaactgaatgtctttcctcaggcctcataatagaaaatgaggaaagtccattctgacaactggctgccttaggcaacagaatttgggattcctacccttccagctcctgttgagtcaaaggcaaaggcaataacccaataaatgtggtgagacagtaaatggaaactgacataaaaatagcaataaaagcctacttccttcttgacaatcaatacataatggaatgggtatgattttacaccataaaacatcagagaataatagaatatgggctgaagaaagctcagaagccacaacattttccccaccttttgattttcaaaacgattcttaagatttgtcgggagtatttgttttcaattgtttcagtgaggctcagttttgaccacatgcaaccaaaatagagaatttcatggaggatggtcacaggattggcttagaaaaatgtaatcctgtgagctgtcccctttcataaataataaggttccgacggctgcaccgaatgttcctcctttcaacgaggttgggccgaggttgggctcccagctgctgggacatttttagtccatcttggactctcacctctgcctcctgctcagctgtcagaatgccaggcggctctgcagcccaaagcccactccgttttaaacttgctcgtttgcaatcacgtaacccgctactgacgacagaaccctcaaggcccatttatatgcggttctcaagtttaggtctagggaagtttccaggaagcttagtgttcggggaggaattcgttttgcttttgctaatcaaagagacacaaaagcacagctgagtcccgaagctggcacacgggaaatcgaggtaccactgtcccctcaccggagcgcgcaacaatcacttggggagcggggaaaaggtttccaccttccccgagcctggggcaccttcgctcccaccgccccagctggtggtggtctcgacaccacgctcgttgcggggtcacacgccagagctggaaaggggaggtccagccccaagtaaagcgacaaagtaaggacacagtggtggccaagggctgtctcctaaccccagtcccgaaagacagtgtggaaagtccgccggcgcgccagcccttgaaactctgccggtccggccgcggcccctcccctgcgcgtccccacctgttgtgaagctgcccaagctccttcttgcccaaatgctttggaaactgccaaaggacactcagaggccagggaatgtaacaggcaagcataaatatgcagaagagatggaaccaaaatagcgggcaggcagggccggcgctcgtgggggtcggtgatctggagccgggcccccgccgccgcggccgcgccagcagtgccaagacctggcgggcggcgccggcgcactccgggcaccgagtctgcaaaagaggccctgagcggaccgccggacacctcgcagactgcgggcagcggtggtggcggccgcctctccggggctccacggccgacccgccgcccgccgccgccatccccggcccgctcctgccgggtccccgactcgagccccggaggcgcccgctctgcgggaccgcgcagcccggctgcatggagcccggcgcggtgccccggccggccgagccagccacggcgcgagaaaccgtcgcccgccacggcgagggcaggaagaagatggcggctaccgtggcggcggcggcggcggcagcggcctcacacgcgtcgctgacgccaatggctcgcgccggtcggcgggccgcggatggcggcggcggcggcggcggctcgggctccggcgaggggcggggcgaggcggggagggggccggccggaggcagaggctggagggaggcggcggggacagtttgttgtgctcggaacatggcgggcgtcggcgacgcggccgctccgggagaaggcggcggtggcggcgtggacggcccgcagcgggacggccgcggcgaggcggagcagccgggcggcagcggcggacaggggcccccgccggcgcctcagctcacagagacgctgggcttctacgagagcgaccggcggcgggaga

SEQ ID NO: 31690 - DNA, 2300 bp, Homo sapien
agtagcatttattaaacagcagggcccaaaccatgggtattccttctgaacttgggaatccctaagctccacatccacagctgatggaactgactttacttgagaattctataaaggtataatagaggtgggttgcaatatgacatttcaccagtagatgctgctgttgcacactggctcatgaatttggctatttaaagttcatacttcactcgtaccttggagttagttaccctagggatcccaggagtcctctctctgttttaaagagaagatacaccagaggaaaaaagtttcccaaattttctaatggcaaaatattttaaatccaattatgaaagtggtacttgtagttacatacctaaaaaatatttttacaaaattaaatacataccattagagagaatgattaaataaaaattatttgatctacacacaaagaaaagagtgtcacatattttgtgctaaaaacacatctacagttttctccttttattctttctaaagctataagaaatggaaaatgtttaaatagtctactcttcagtttaccaagacagcttccttagagtaaccatactgatgattgccttgttgcttttgccctagaactgatccctcttcccttttccatattgcagcagaacccacaaggcaaccaacaaccaaacggagaaaaaggaaaaattccaccagcagcacttccaacagcagcgctgggaacaatgcaaacagcactggcagcaagaagaagaccacagctgcaaacctgagtctgtccagtcaggtacctgtaagtctcgctttcctcttaggcccgaaatcctaactgtctgcttcctactcaaagggcccaaattaaagtctcttttcattagaaaaaaaaaaaaaatcctgggcaggttggaggtgggggagggataaaagacagggacagaggttgggatgggagggaggaactctgccatggaaaccttcccctgcaaactgggaattagaaaggaatattaagagtcgtgctgcaatgggacctgaattaaaaagccatcagagtcacagacaggagatatgtcacttaaggtttaattaaaatatcacttagcagcatgcctggtggcgtattaaggcctctcagcaccatcattggagaccctgtgctccactggaaactagctcccagcggctcagtcccatattgtaatttgactgggccttcccaacatgggcgtcccctcttattttaagactcaggtaattaaccagcagccactaaacatgtagctcagtgaagctctcgcttagcccattgcattagctaagggggaggatcagcctctggtttggtctcaactctctcgaacccttggcccctttctttcatttctttatcttgacaaagaccattaggaaggggacttctttgaattccaaagctgacagctgagggtaatcccatatagtgaaaactgcacaggaactttcttcatcttttattcattcttcttgaattctgtcccttctgcctaattccctcccatctcctaactccccagccccttattagactatctcctttaagtactttgctcctttaaagtgcttctgttccttctctgctgtccctgtcataccaccctatcaccaggtgtttggccatcattcaaatcctgagattttcttagtgcttcatggataccttttagatactctgttttccaaagttgccctatttcttgttacatccctcaaccagtacaattttaccttttccgtctttcccacgtttttccccctcacccttcttgctctcatccttacccttattgttctgatcctgctccatcgcttccatgtgcgagtggaccttcgcacagggattccccacttacttccaagtgtgtctttcacatctgcccccacctacttgtatctactttccactggtcagttctctttggccaaaaccaaccccatcagtaccctgaggattccttgggccattgtttctcttctcctgtctcccacagacagggggtatacttttcattcccactgcattagaaagaaggggtcatggggagaatgaccagcctaaaatggaaggtgccatgttacattttacaaggttacaaattgcagtcttcaaataatgaaaatagtctccaggtggtcctccactttctgagctaggctttatacctaatacctctgaagatcagggggaaaaagccaaaagagggaaataaagagtctctttattaaaaaagtatcaagttatgcccacttctggtgaaattttg

SEQ ID NO: 31691 - DNA, 2300 bp, Homo sapien
atctgtgggcagggggaccagttcggagactcctgaaataacggggatgagaatcagggatatggatcagcattatcaagtttcagatagttctgaaatgagagtctttcactattaatggcaagaaatatttccaattataattggcaatggtctgcagaaacaaatgagagcaaaccagaaccttattcagagagggattcccttcctaaatggatttttgaactgtttcatttttttttgttactattggcctgcacaggcctgcctaggtgttactttcattcttgcactgaaatggtcacattaacacaaactcaggcagacactaaactttcagaatgtctttagtttgagagtttaaacataaggaaccattaggttttgcagtggctgccataccaaaacgtaaatcatgccaaaattgtttgaaatcctgtctttagaaggttgtgtgttttgacaaaccttgcagcaaatttggtccagctttcggatttgtaatgaaacctgaaaccaagcattctcgcctgccttggggtctcctagcgcaagttccaagcagccttagtgtaatacctaccctaatctcatcctgggaagcgacattagtgtgttaggctgcgctgctggaagtttggggtggactcagcaaatatttcatgcaattatgaagaaggactgatcaagacagcaatacacttttctgtgtctgagtatttttaagagtgtaaattgcagaattagcaatactctatcccctgttggctagtgacttggagatacccaagccatgattggggcagaaagttaattaatctgcttattaaaaagaagaaatgtctcatttgcatgcatttgcattcaggtcttgaattcattatgctttttggtggtcctttgctttatttccttaataccactgacctacctaggtgttagctcaatacatttaaattttgtgtggctgggctttgtttaagtgtcgtatctctggttatagtgggttctagcagaatttgattattttatagattgtttaattctctatagagattttccccttccatgggctgttgggatttcttatggttatcatataccacagttgggaaaatatttgtttacttgaccaatcttggaaaatacagactttgtctccataagagttggacatgttatctggggatgatccattcaattatttgcaatttccttctcaaccaaattttccgtggtcatttttgtggcagttttctccttctttgcttttcctgtcttattgggaggtctgtttgggttttttgtttgtttgtttgtttgtttttccttcctgggaaaaaagaccattgctctccttaagtgtattttataccttccacattcagaacgactgtttttacctgaaaatgcccaggcaccttaagggcctgaatgaagtctttggagaagagggaggtggctgggaagaggggtgagtggggagagatgggagtgagatggagtggagggcaaagaatataacagcccttggaacaacagcaagtaaagcaaaactacatagggagattagtgctgaaataaatctctgcatgtgagtgaatcaccggtcccaattcggggcaccacagtgcccgtgtttctgtattttgtagtaatcaacatttctgatacattacaacagtgtggttgtcaggggtgagcggctcatgtagcggttagaccacctctatgctaacaagcttagcaatcaggttgtgaagggtcctggctggaggaaaaaaattaaaaccaaaccttagacctcttgtcagactgtgaggagaattatatttgtgaactagtctacaatgtggacaggaaatgacctctccacaaactgcttctttaaaaacaagcagtggtgcctaaagctatccagctcctctctctctctctctctctctctctctctctctctctctctctctctctctctctctctctctccccctccctccctccctcctccctccctccctccctcccttcttccctcccttcctccataccaacctccctccctctctggagctcctgctctctccctctccctcctctcccgtgctccctccctccctccctctttccctccctcctctcctctccctctcctctcctgctatagagggctccgacagcagttcccagccagcgtgttcagcctgcctgcctgcctgcctctgtgtgtgtgtgagcgtgtgtgcgtgcgtctactttgtactgggaagaacacagcccatgtgctctgcatggacgtt

SEQ ID NO: 31692 - DNA, 2300 bp, Homo sapien
ttgctaattctgcaatttacactcttaaaaatactcagacacagaaaagtgtattgctgtcttgatcagtccttcttcataattgcatgaaatatttgctgagtccaccccaaacttccagcagcgcagcctaacacactaatgtcgcttcccaggatgagattagggtaggtattacactaaggctgcttggaacttgcgctaggagaccccaaggcaggcgagaatgcttggtttcaggtttcattacaaatccgaaagctggaccaaatttgctgcaaggtttgtcaaaacacacaaccttctaaagacaggatttcaaacaattttggcatgatttacgttttggtatggcagccactgcaaaacctaatggttccttatgtttaaactctcaaactaaagacattctgaaagtttagtgtctgcctgagtttgtgttaatgtgaccatttcagtgcaagaatgaaagtaacacctaggcaggcctgtgcaggccaatagtaacaaaaaaaaatgaaacagttcaaaaatccatttaggaagggaatccctctctgaataaggttctggtttgctctcatttgtttctgcagaccattgccaattataattggaaatatttcttgccattaatagtgaaagactctcatttcagaactatctgaaacttgataatgctgatccatatccctgattctcatccccgttatttcaggagtctccgaactggtccccctgcccacagattcacagtcctcttctaacttgtggtctgtccttattcaaatgagaatgtggatttcagataagtgaaagcgatcatgtcccatgttttccccctcagtgtttccctgctgccagaaggaaaacgtgcaagttccttaggaacatggcatacagggctcggtaagacccgcacttctgtgctgtctctttctccctctgtcacatacacacacacactcacacacactcattcatttactcatttgtgtgttcattcatttatttatttgctatacttgatcttcctaaacttgcaatctttcttatgcatggccacatttgtacttctggccctagtttacctacaaactgctacttatccttctattaaattaaattgtctcctccataaatctttttaaattacacattcatttgtttatttattcaacaaatattccattcacagtggatagaggcagagccaacagcagggccagagcacgtttcaaccctagctccaccatctagttgtcgcgtgaacctgagcaaaggactcagtctctctgcacctcagttatctcattgcaagatgaggacaatgatagaaactagtctataagattgttgctaaggattagcaaatacatccaaatgcattagaaccctgtcatctaaacgctcaaataataacatgataggccgggtgcagtggctcacgcctgtaatcccagcactttgggaggccgaggcgggcggatcacgaggttaggagtttgagaccagcctgaccaacatggtgaaaccctgtctctactaaaaatacaaaaattagccgggtgtggtggcacgtgcctgaccagctactcaggtggctgaggcaggagaactccttgaacctgggagatggaggttgcattgagccgagatcgtgcaattgcactccagcctgggtgacagaccgagactccgtctccaaaaaaaaaaaaaaaaaaaaaaaaggaaaagaaaaactagctggacatggtagtgggtgcgtgtaatcccagctactcaggaggctgaggcaggagaatcgcttgaacctgggaagtggaggttgcagtgagccgagatctcaccactgcacaccatcccgggcaacagagcaagaccctgtctcaaataataataaaaataataataataacatgattattaggtacctgatatctgcttaggttctagggatcattgggaggccaaggtgacatagcacacaggctacctgccttcctgccccttgccatctagtgagggcaagggaaagacagtgtagaagagctagtaaatatttgggaacataattttaaactatagtgcaagctctgtgcggtggctcacgcctgtaatcccagcactttgggaggccgaggcaggtgaatcaggaggtcaggagtttgagaccagcctggccaacatagtgaaaccccatctctactaaaaatacaaaatattaaccacgtgtagtggcagatgcctgtaatcccagctactcaggaggctgaggcagaagaatcatgtgaacccgg

SEQ ID NO: 31693 - DNA, 2300 bp, Homo sapien
tatcatagtgtctgacacatagtaaacaccaagtcaatggtatttttgatggagtttagtacttgtttatttggtaataatgttaactatgtatttagcacctatatgaggccagggctgtgctaactagacattagggtacaaagatgaggtaagggagtcaggcacataaattcttgcaataaaggcctatgtacaaaatgctctgggactgtggctaggaggagcatttgaaagattttgtgtatgtggttgtcgagctggatagtcaaggctgcataagaattttcttagcagagaaaagaatgaagggctaccttgtgtataaatactcagacataagaaagagtgtggtgtgttctgtgaatcttccaaaaataatggttaattcggtgttcctctagtgaatgggaagagaccaacaacatatgagattggaaaggtagacgggtgaatggtgaaaggcactttcccaaacttataagaatttaaacttcacgttggaataaaatttgtgttttcaaaaggccactcttcaaaaggatcttctcaaaaatcaattaaattatgctctatagattgtatgaggaagacatagatatgagagaagaatcttagagaagttactatccaaaatggtggacaaatatttttaagggacaatgtagtctcagatttgttgaaaacttagggaacccattcctcatgcattccagtgagtaaaagttttctgcatcagacttacagctaagtcaacgcaaactttgtcattgaaactaaaaatgaccagagagtggtgagagttgttgccttggcaacgctgacaaaagtacagtcagagaaggatttacctccagctaggctgggtaggaattttctgcagctaggctgtaggtaaattactgtttggtgtactttgggccagcaagttaacaccatagaaaagtctagcttggcatttcctgacttggaagtgctttaatttgctcctctcggcgaagtgtccccatgggctttgctctgggttggccctttgtgaggcaaatgtgtgattcgatgggctttgacaggcctgccaggccaaaaaaatatcttgccaggcccaacattcccactctgagctttttctgttggttaacacattatttccagaaagctctgtcaaaatgtagaagcgttaccggagaattacagcacaagaagcaaacagcagagaaaaatgcaggtagtgtcaaagagagaacactagatcgccaggcagaggtctgggttctacccataaaataaccatagcacagtcctctgatcttgggcaagtctattattatgattactatttgaatattggtttcactgtatatattgatataatatttgttctctactgggcagctatgagggtcaaatgatatagtaaaggtgttttgtaaactgtaaagtactatgcaaaatataagaggctattattttaaatgtgtctaggactgaggcagaggatataatattttgattggggtgaggaaggaacacacagtgactacagcatgggaaaaaaggttgtggcagaagatgagaagagtggggtgggcttccatgaggacatggcatgctttttgagtcttgtcttcatgataccctaagccactctctgtctatctcagccatcctgaattacttgccatctactcaacagatcatgttgtttcatgtttgcattttacaaaaactgttctctctgcctgggtttccctgctccatctggtccacctaagtaactatgtcttctttaaagatccatctagataggttagatgcttcaccacagaaatacccaatacctttatgttatttgtttcatcacatggcaattatgtgtacatatttgccttttccacttagatggtgttatggaatgaattgtgtccccaccatgctcccaaacccctaaattcatacgttgaagccctaatcctcaatggaattatgtttggagacacagcctttaaggtggtaattaaggttaaatgaggtcataagggtagaaccctaatccaatagaactaatgtccttataaggaggggaagagaactggagtttgagtgcacaaaaaaggccatataggggcccagggagaaggcagccatctacaactcaagacctcatcagacactaactcttctggcactgttatcttagacttctgactttcagaagtgtgaaaagataaatttctgtcgtttaggttaccaagtttgtggcattttgtgatggcagcctgaggagactattaggtagacat

SEQ ID NO: 31694 - DNA, 2300 bp, Homo sapien
ctgacctttagtggcttttatttatttatttatttattattttttgtgagacggagtctcattgtgatgcccaggctggagtgcaatggtgcaacctcggcttacctctgcttcccgggtgcaagtgattctacttcctcagcctcctgagtagctaggattacaggcacgtgctaccacggccaatttttgtatttttagtagagatggggtttcatcatattggccaggctggtctcgaactcctgacctcaagcgatctgcccgcctcggcctcccaaagtgctgggatcacaggtgtgagccatggcgcccagcccttagtggcttttaaacagtcgctgctgtgccaccccttccccccaccccacaagccgtcactgtgaaggtcagcatgtgcccagatttttgctttgagaatataaaaaaaacttttattttctgttccagaactttccatgactggatcacagggaaaaaccgaccgagctcaggaagcctaatccaggtggtaaccacagaaggaaggacggaactcaccccagcatatttttaggcctcatctcagtgcctatgaggggcctgccagaaaagtcactaacctgtctcagtgtggccttgtccagccttgtgttttctgtaacccctgtttgtggtacgagataatgagtcctatttttctctcacataatatgcatttgctctcctaggacagtgtaatacatttatgtgaagtaaagacatgcgagactggtggcctgcaaatagcatccgttgatctgtgttaactgcatagggagggctctgcatagcacctgctatagcggtgtcatgttggatcgcttttgtgactgttcatctgtccttgacagtggctgtcatcttgactactttgttgatttgttggtattggggacattttaaaggctgagttatttttgaatgtcatgtttatgtcatagacgtagttttcgcatccttgaattaaactgccttaactccttttgtggtataagcaaaactacatggactctgtcctggtatccttttcctgtgtggttgccccgtgtcctctggcctagggttaagtgtgcaagataactactcgtgagtattcagaatgttgttcctaataaatgcacttgttgtctgtcttctttaatcaaatcacatcttatatacagcagtcagagatgagtatactagaatcatggattgctggaggtcttttaatctgatgttctcagaagggggtggatttaaatcctgaaataaatatttcaacacaagaacacaggcctgattctgccttggacatgtcaaaatctgggggtgatgggatggccctgtgcatttagaagcagctctccacatatggccaatgtaggctgtcctggttgagaactagtagtggtttaatccaacccgatcattttacagatgaggaaactgaggcccagagagacattaccttgttgccagtaactggcagagctaagcccagatctctagtcaccagacagttgctgtttttaaaggcctttaccacgtattttctttctttttttagtgaggtgaaattcacataattttttttttttttttttgagacagagtcttaccctgtcgcccaggctggagtgcagtggcgccatctcggttcactgcaagctccgcctcctgggttcacaccattctcctgcctcagcctcccgagtagctgggactacaggcgcccaccaccacacccggctaagtttttttgtatttttagtagagacggggtttcaccgtgttagccaggatggtcttgatctcctgaccttgtgatctgcccacctcggcctcccaaagtgctgggattacaggtgtgaaccactgcacccggccaaaattagccattttaaggctaattttaagtattaaaagttaagtaggtgagcagttcagtggcatttagcacatttacagtagtgcataatcaccacctctgtctagttcccaaacatttccatcaccccaaaagaaaaaccagagctctttaagcagttcctccccattcctgctccctaacccctgcaaccaccaatcttcattttgtttctgtgaattaattctgggtattactatttttttgagacagtcttgctcttacccaggctgaagtacagtggcatgaacatggctcactgcagcctcgatttcctgggctcaagcaatcttcccaccttggcctctcgaggagctgagactacaggcacgtgctgccacacccagatattttttaaagttttttgtag

SEQ ID NO: 31695 - DNA, 2300 bp, Homo sapien
ttagttggtcacagaagcctgaaggggggttcaggaagttgcactgttaaccaataggggtcccaggaatctcacttggagagtgtcaaggaagcagagggacacattaatggaaatgtcagtttccttcctcgcaactggggctcacttcagtggccactccacaatgaaaataaaaatgagaatttctgagcctgggcaatgtagtgagaccttatctctacaaaaaataaaaaaaaaaaatagttgggcctgatggcgtgtatttgtagtcccagctactggaggctgaggctggaagactgctccagcccaggagctcaaggctgtagtgagctatgatcatgccactctgagtaacagagtgagatcctgtctcttactatatatacagatgagtggcactttaccatgtacaaaatgcaaaatgctttgaccatatgcttgctcacctctgatgctccagcaaccctttaaggtaaacaggagatgcacgatttcagccatttctctcatgaaaaactggatgtcagtgctggggctgaaattcaggtctttgaattacaacagctcatcttcatcccagtgactttgaaacagcaaatgtttttctggtaaaaaataacagaatacatataaaaggctcagaagactgcttggcacattaagtgatcaataatgttagttcacgttcttattttaacattaagcatgctttgacaagtcaggacttgcgtaaatatcattgagtcatatttctgccgtcagtgagggacctgtgtcaacttttggtgttttgagggttaagcaattgttttcagaaaaactctaagggaaacacttgattcccaacaagcctttgtcttgctgaacaaaggtgtggttaagtggaactctagctattgaagacctgtgttcaaattcccactcttccagacaagtgtctgtgactctcatgcctcagctttctaatctgcataggattatcgtgtggagtaaagtgaaatagcacaggcagatcacttagcgcagtgccttggatataaggagcactaaatagatggtgctctcctctccatccagcctcctagcagttctatttctgataatgaagcttctgacaacaaaatgtgctgctggctgcatcctcttctctagtgacatatttctgcatgctttacctggcacaagtttactgaacaaacatctgtgtctgctgtgtacaaggttatatgtggatgggaagtgacacaaagatgtatgtaatacagggttctgctatcaagaaggttatgagagtgttagagctctggttctctatcagtgatgaatttgcccctaggagacaactgttaaatctggagatatttttgattcttatgagtgaggggtaggggtttgctattgatttctagtatatgcaggccagggatgctgtaaatatcctacagtacccagggcagcacctgtcacaaataattatctggcccaaaatgtcagtagtgctgtagatgagaggctctgtgttaaagatacaggccatgggcagaaataactaatatacaagggagaaaatgccaggatctgtgtctggcgatgggtggcatatagtaaaagggccatttggattaatgggtataaatttacggttagatagaagaaataagacctagtgtggtttgtctcgtctcggcggtggactttcagctccttgagcggagcgacctcttctgtttttttggcaggtgggaatacttaaatctctattttgatgcacaattaaaaataaaaaattgccaaaacagtggtcgaaaattgtactatactatattttacatgcttacacttcacaaattaatgctcgtaaaacacccgctctccaccctcctcgcccttagcccggctcgctgcacgccccgaggcccagcacttgctggcgggtgggaggaggggcttcgccgatgtccccgtcccaggggcagggcctggccgaagttacagtccctccgggtggcggggcgccccgagcgtggcagcgcgctaggcggcagcagcgggcgcggagcggggcgcggccgccgcgcgttccctcttggcggggttggccggccggggcggggcgcggcgctccggctcgaggcattcggagctgcgggagccgggctggcaggagcaggatggcggcggcggcggctgcaggcgaggcgcgccgggtgctggtgtacggcggcaggggcgctctgggttctcgatgcgtgcaggcttttcgggcccgcaactgggtaatgctgcgggctggg

SEQ ID NO: 31696 - DNA, 2300 bp, Homo sapien
gagtcactgcacccagctggctggtgtcattattaagaacaatttttgtatccctcctcgtgcttacccatattctccgagttgcattcagctgtgtacttttttacaatgagaaatttaaaaccagccgggcgcggtggttcacgcccgtaatcccagcaatttgggaggccagggcgggtggatcacttgaggtcagtacttcaagacccacctggccaacatggtgaaactccatctctactgaaaatacaaaaattagccaggcgtgttggcgggcgcctgtaatcccaactacttgggaggctgaggcaggagaatcgctggaacccaggggtggaggttgcaataagctgagatcacaccagtgcactccagcctgggtgacagagcaagactccgttaaaaaaaaaaaagtaaaaaataaggaattaaaaaaaacaaaacgctttacagaaaataaaaatatataaaaatattgagcactacttgaaaactttctattgaaaccatccccactgtgttgacaaaaatttcatgccaagttctaggcagaaatatagttataattaagcattaatcaggctgtactttggcccacttccttgttgctaaaagtcacctagcactacatactgaccatttgcattcccattgttcctatagacaggatctctgacattagaatcataagctttctgtttaaggatcgcttaagatatttttcagaccttgaattccagctaccagtttgaagatccccagagaggaatggggtcagcttaagaatacaggttcttcaacgccctgtcccatgacttcaccctgcactcttcaatcaacgatctccacactatagccctctccaaaacccttaaaaaccttgaccccaaattcctcagggagatggatttgaggtttcctcccatctcctcctttggcgactccacgattacacctctttctctgctgcaaccctggtgtctgggcgtattgacttgctatgtgcacgagtcaacgaacctaatagtgttacatcattttcaaaaacagtatttacaccgttgcacctgtggaacagatgaaaggacacgaataaaaataactcaggccaggtgcggtggctcacgcctgtaatcccagcacttagcgaggccgaggcaagtggatcacgaggtcaggacttcgagaccagcctggacaacatggtgaaacctcgtctctactaaaaatacaaagagttgccgggcacggtggctcacgcctgtaagtaatcccagcactttggcaggctgaggcgggtgtatcaccagaggtcaggagttcaaagccagcctggctaacatggccaaacactgtctctactaaaaatacaaagattagccaggtgtggtggtgggcgcctgtagtcccaactactcgggaggctgaggcaggagaatctgttgaacccgaaaggcggaggttgcagtgagccgagattgcgccactgcactccagccagggctacaagagcgagactccgcctcaaaaaaaaaatccaaaaaaacaacaaaaaaacacaaagattagctgggcgtggtggcgggcgcccctaatcccagctactcgggaggacgaggcaggagaatcgtttcaactaagcagcgggaggttgcagtgagccgagatcgctccattgcactccaacctgggtgacagagcgagactccgactcaaaaaaaccaaacaaacaaacgaaaactcagtgggagtgtcttcactatgcagtcgtctattcagcaaccttgacaacaagctctggcactcagtttctatttcccgggagttgcccagcgctccgcccacgcccgcttgcagaactcgccccgcctccgccccacccatcgtgtgacgtcaccatatcggtcccgcccctctacttcgcgttgctcccgggactgtcaaccgcgtccggaagccccgccttttcgcccccgcccgcatgcgcgggcgcacacgaatgcgggcgcacacgaatgcgggcgcacacgaatgcgggcgcacccttgagtcccctccacaaccgcggtttgatcccagcggtccagtcggccggtgctgcccatccgtcccgccccctagacgcacgtccgctcgcccggcgcccgagccagtccgcgcgcacgccgtctgcgccccgaaagccccgccccaaggcgcgcccgcccaccgctctccacgtgctcgctggagggcggtgcgaggggccgagccgacaagatgttcttgctgcctcttccggctgcggggcgagtagt

SEQ ID NO: 31697 - DNA, 2300 bp, Homo sapien
tggtgctccctggcgttctgacagcctggcttttgggatatgagctgcctgcttttcagcgccacccacagctgcgtggcttggctgtgacctccccattgcctcagccattttaataatgtggtcaaaattaagcccaagctctgctcctggctctcggcatatgtctgattcccccatgactccctgacccctccctgctctgattacaaggaagccataaccaggtagctcttacctgagagggaggaatgacatgacagacatatcccacaggtttcaacccagataatgttcattcatttacctggcacctgctggccttgtgctaaatgcaagcaccacacagatgaagagatcctctggatgcttggtccttgcccttgtgggctagtggggtccctgccatcaggaataaataagatgagaccttcagcagatggtgccaagcacagtgggggccctggcactggccaagggttggcagctgtggggagtgggggagagtgcgggctctgcagccagtcagcatgggcttaagtcctggcttcaccacttactcgttgggggaccttgctggttacgtggctgaaatctctgtgcttcattttctgcatttgtttactagagttgtaataccgatttcatggggtttgtatcatcatccaaaagagcacatcaagtagggggcatgtggcaggccttctaggccatctactgttactcacccacctctgtgctgccataggaagagccagggttgtgaaacacgtgcctgtatcctttctcttctaaagctggtcctgcttacgaatgggttggaatttggagccccgacttaggtaaaagaaagcaaaaaggtcttcagttgccacgttagagccattgccatacgcttgctttgcagttagcacttggggctgcagcattcctgatacagtgaaggagaacaaaacgggcttttctgtggaagcctcttctcttcatttatgtggtagatttagagcttcaaagaccccacagcacaggccctttttcatgtagatgaggattctgaagggaagtgcctgaccggataccctctggttctgctttgtgtggccatgttttctagctttctgcaccataccatctgctgccctgggtcagatcacaaaaaatgaatccaggtcctgtgtgccaattgtttttgatttgtagtcttcctcttttgttttctgtaaggtaagagtgtctcttagttggcaggcagtcagcgttcttgagaggttgtttgacagtcactttatctttcttctgccagtggggatcaggaggcctggcagaaaggagtcctgtttgcttctgggcagaacttggcacgccaattgatggagacgccagccaatgagatgacgccaaccagatttgctgaaattattgagaagaatctcaaaagtgctagtagtaaaaccgaggtccatatcaggtaattcaggattgtgtcacagactcgagatgttacagccagaaggagcccttgagatcctaaaatccagctccctcactttttagaggaataacttgagaccagagatttgagatgacccacttgggtccacatggggagctggaatagagctgagtttgaggttctttctatctttccttgcctttgagagagagagtgccatgatatactatgtatgtgtatatttcataactgtgttattcagacacaattaacatgccatagaattcaccaatgcaaagtgtgcaattcagtgatttttttttttttttttttgagacaaggttttgctctgttgcccaggctggagggcagaggcatgaacatgggctcaatttcctgggctcaggcctcccaccctagcctcctcaatagctgggattacaggtgtgtgccaccatgcccagctaatttcttaattttttgtagagatgggtctcccgctgtgttgcccaggctggtcttacactcctgggctgaagcaatctcaccttttcctcctaaagtgctgagattacagccatgaccccgccatgcggcctggtatttagaatattcacagagttgtgctaccatgaccacaatcaattttagaacattttcataacccccaaaggaaaccctatacccattagcagttactccctgtttcccattccctaaagccagcaggggatggacactttggttgtttttaccttttatttctttttggtatatgcctaggagttgaattgctgaatcaaatcgtagttctgtttaactttttgaggaacttcacatggcttat

SEQ ID NO: 31698 - DNA, 2300 bp, Homo sapien
agagagagaaggaggaggagggcaggtgattcagttatgaaaaaatgaacaagataatttcagattacataaatgttgtgaagaaaattaaacaggggaaagtacttaggagtggggatctaagtgaaactgaggctgggaagatgacttgatccgagcctggttggcaaagggaagctcctgctttttctctgaacatttctgccctggctcactcctctggcaatgagcttcctgtggttccttaaacatcccaggcaggctgcttcttcagggatccttcggtgtagaaagcactcctagttaaattttcatgccagtcactacagtccagatctccttggagaggcctcctccaatcacctatctcaaagaacacccctctcactagccatccccttactgggtttcattttccttcccagctcttctctctgcacaatattgctatgtatttatgtgcttgtctgtctccttccagagatttgggatgattgctataacctccagatcattaaatagtgcctgggaagtggagcgctcagtaagtgtgctgggtaataactgtaaaatcagatataatgaaaaaaagttatttggttttaaagagataaataagaaggttgggcacggtggctcacgcctgtaatcctagcactttggaagaccgaggcgggcggattgtctgagctcaggagttcgagaccagcctgggcaacaaggtgaaaccccggcgctactaaaatacagaaaaactagccgagcggcgggcgcctgtagtcccagctactcggaaggctgaggcaggagaattgcttgaacccaggaggcggaggtttcagtgagccgagatcgcgccactgcattccagcctgggcgacagagcgagactccgtcaccaaaaaaaaagagagagataagcaaatgttaaaagcaggttactacaagattagcagcctagtgccgggcgcggtggctcacgcctgtaatctcagcactttgggaggccgagtcgggcggatcacgaggttaggagatcgagaccatcctggctaacacggtgaaaccccatctctaccaaatatacaaaaaattagctgggcgtggtggcgggcgcctgtagtcccagctactcgggatgctgaggcaggagaatggcgtgaacccgggaggcggagcttgcagtgagccaagatcgcgccactgcactccagcctgggcgacaaagcgagactctgtctcaaaaaaaaaaaattagcagcctggcgccttggctcattactgtattcccaacactttgggaggccgcggcggtagaatcacttgagctcagtaaaacacctgactcaactaaaaaaaaaaaaaaaaaaaaaaaaaaaagcccgtcgcgactgcacgcacctgtggtcctagctacttgggtggctgaagtagggggattgtttgagcccgggaggtcgagccctgatcatgacactgcactccggccagggcgacagaacgagaccctgagaaaaaagaaaagaaagaaaaaaaaagattagcatagtgactttctctttgatgtaaccataaatatttaaagacatcagtgccgggcacattgggaacctcaacaaagttgtttccgttatccatctccgaccagaattcaggaagaactttgcctgtcttgttcccgctataaccaatgactcaacaaatgtttgtggagtgagtgggtgaccctctccttttaccaacggtaaacagcccgcggaaagaaaaagtgacttagccaaagtctctccaggcatttggggcagagtcgggactagcatagtagtatcctgactctcgcaggagggctcgctccactgtagttattaattctcctctccacacaaccaggtctaatccggccaaagtcttcaattcttaagctaagaaaaaaggaaaatacatgtaaactctgttttgcgatagacaagaaaacagaagaattaaaaatcctccttccggggtgcaccagaatcctcccatcgctcggtcctgtcacgtgaccacgcctactacaccagccacgtgagcttctgagccggcttccgcgcaggcgcagtggatctctcttgcgccattccaaacatggcggctccactagggggtatgttttctgggcagccacccggtccccctcaggccccgccgggccttccgggccaagcttcgcttcttcaggcagctccaggcgctcctagaccttccagcagtactttggtggacgagttggagtcatctttcgaggtaatataagacatggg

SEQ ID NO: 31699 - DNA, 2300 bp, Homo sapien
aaaggagatgttgaggccaggtgcagtggctcacgcctgtaatcccagcactttggggggctgaggcaggagaatcgcttgaacctgggaggcagaggttgtgatgagccaagatcgtgccattgcactccatcctgggctacaagagtgaaactccgtctcaaaaaagaaaaaggagatgttgaatgggaagtcagcaagggtgctagaatgtagcaagtattcttcaggtgttagtgatttctgttgttcgggaagaggagggttatggaggaagagtatgggatttaggtgggttaagtgatttgcccaaagtcaagaggttagtctttaacctttggcagaagcaggatttgaagtgagttttcacacccctcttccctggtcagtgtgttgataacagcccacccacctgtggttccagggtgttcttaagaagccaaggttgtcttgggtgtggtagctctttgaaaggtagaaagttccaccaagaaggccttttttcttgaatactgcttagcttccttgtcaggctccaagatgcagattgcctgtgggctatctctctccacagataaacctactcacatcttcaggacagccttttttttttgagacaggagtcttgctctgttgcccaggctgtagtgcagtggcacaacggggtcccacaggcaagtgctggggaaaggcccacccagccatcaggtagcctgtgtgttctacaaacagcagctggcagcactgtctcctgccggacattcctgccacccgacatcaaagctggtgggtgaccttttcagccatttgacattcctcccagaagaacctctgcctcccagaggtttaagcagttctcctgcctcagcctcccaagtagctgggctatttttttttttttttttttgagatggagtcttgctctgtcgcccggttagagtgcagtggtgcaatctcggctcactgcaacctctgcctcccgggttcaagtaattttcctacgtcagcctcccgagtagctgtcaggtgcacaccactacacccagataattttgtatttttagtagagatggggtttcaccatgttggtcaggatggtctcaatctgacctcgtgatccgcctgcctctgcctcccaaagggctgggattacaggcatgagccaccgcgcccagccttaatttttgtatttttaatggagatggggttttgccatgttggccaggctggtcttgaactcctgacctcaagtgatctgtccgcctcagcctcccaaagtactgagattacaggcatgagccaccgtgcccagcccatcttcatcttctttacttgaacttaattctttttcatgcatcttcccttctttcctcttttctcctccacccaaatgtcttaactgttaacattcccaggtgtttggtcctgggcctctggaggttgtgaaggagcactgctcagtcctcccttcaagaaagcagcttcaaggagttcaattacaaaagctcctggcattggggacctgccgccatgttcctgcccagggcatgctggtcctggctgtcaccaagcacagtggaggtcaggtgctaggccatttctgcccgacacaggcctcctctaatgagcagtctgaggccaggcacaggaggctgaggcaggagaatcgcttgaacccaggaggtggacgttgcagtgagccgagatcgagccactgcactccagcctgggtgacagagtaagacttcgtctcaaaaaataaaaaataaaaaaatactgagcagtctgcttgggcgcttccatcagcctggccatgacatctttggagctgtcctgccctcttttgccccggtgttccttggcccacctgtcagacctacatcataggctcttcctgtcttctgtttcctctcccctttctctaacataggtgtttctcctgagaaagaaaaaaaccacctgtccctgacattcagaagctgacaacactgttcggtcatgccattctcctgttggacataaacagtctctgaatgccaaccccaaagttgctctcaggccatgataaaataaaccacttaataattttgtctaagcacgtacaaagaaaattcaaggtcagtttaccactcacaaaataccaaacatccttctgctggttaaaacgagtgacagctgccgtgtgtgtgtgtgtgtgtgtgtgtgtgtgtgtgtgtatgtgtatatgcgtatatatgtgtatgtatgtgtgtatatatatatgtgtgtgtgtatatatatatatgcaattatacctttat

SEQ ID NO: 31700 - DNA, 2300 bp, Homo sapien
cagggaggcggaggttgcagagagccgagaccgcgccattgcactgcagcctgggcgacagagggagactccgtctccaaaaaagaaaaaaaaggccataggtaccggccactggccgcgctctatgtccgccagcagatggcgccagagcattaagagaacctacgggacattttcctgccctggtctgttctcccagcagcatccctggctcttgaagccccgctgagtgcagcatctatgtgcacacaggggcctttgcttcctggccctgcagcctcaggggacctgacagagctggaatcctgggttcggcaagccatctccccagggggccctgggcaagccgctgctgctatctgggcctccctggccgggctgaacacaggatggcattcccatcgtgtgcacttgttctccctctttgttgagtaattgctgtaagggggacttgactgcatgcctgcttggaacagactgaaagattccggagagaagccagggaagggagcgtccaggcccgaggaccttcagctcattggccgcctgcagacccgcctgaaggagagagaggacatcatcaagcagctcacggtgaggctgtcagggggcgcctcacccacgcacctggccgggcactgcgggctcccccgggaggggcgttcacttgcacccagcatttctctaggtgccctaatatcttacaaagaatcctttcttgccgtgcgcggtggctcaagcctgtaatcccagcactttgggaggcggaggcgggtggatcacttgaggtcaggagttcgggaccagcctagccatgttgaaaccctgtctctactaaaaatacaaaaattagctgggtgtggttgtgggcatctgtaattccagcttctaggaaggctgaggcaggagaatcacttgaacccgagagacagaggttgcagtgagccagcatagcgccactgcactccagtctgggcgacagagcaagactgtctcaaagaaaaactcctttcttttctattattaaagaagacatactcactaaaaaattaatacaggaaaataggaggcaaaaaaaaatcactttactcccaagtccaacagcatttgccccatgttaatattggttttttaacttacagaatttgagaaaatctataatggcttaggtttgaattgtagtagaattagtgtttttattgttgatcttctttttgtaaaaatgaccacctgttttctacttagcaaagccactccctaagccccttggaaagaacccagctccctctgattcagtatccaaccaaggcctgctggtcatttctgctcctgctcacctgcctcacttctgtatctctctgtgctttgaaaattaggtgacattgatatggaattattgctcatttgctacgtgtgaacaaaggtatcatgggtttttttttttttaaagtaatccttatttctaagaaatacatactgatgtttttacagagaaaaattatgtaataactggaatttagtaataatacagcaggagagaaaaaagtggaaaatgatacacacaaacaagatcggccatatagttattataggtaaagtggggatggatttcattactctccctatgtttgtatatgttaggcaacacaaatgtcaaacaagacagaggaagaaaggcggcaaaatcctttgcatacctgggggttttctttctttgccttaattactaactttctgcattaggttaccttcacatgctaagaacagttgaattttcaatttcctaaggcatcagcttgcccttttctttacaagaggggctggggacataaaaaaagcaaaggtgcttcctcaaaagcttcagtgcctggcagctttattcccactgacttccccttcctcccctggactttccttctctattctgccctcacagccatcttccttcaagtcaaacccagtgctgtgtggttaggctcatttagactcagttgtattggttttctaggaagagagaagatttcactacgcagcattccccagtgccatgtcccaccggaatcggtctttctctttcaatcctcacccgggatatttgaccccttccatgaaggtaaattggttctaatggttttaatgcattatacaattccattggtttcgtttttcttaaaggtaaccacaggttatttaagggctggtgtacgctcagaaaaatattcattggaaaaaaaaaacccacttgtttatatctatggctgggcggattatgtgtgatttttattttttatgggattttg

SEQ ID NO: 31701 - DNA, 2300 bp, Homo sapien
caggcacggtggctcacacctgtaattccagtactttgggaggcctaggtgggaggatcactcaaggccaggaatttgagaccaacttggccaacatggagaaaccccatctctactaaaaatgcaaaaattagtcgggcgtggtggtgcatgcctgttatcccagctactctggaggctgaggcacaagaatggcttaaactcaggaagtagaagttgcagtaagccgagatcatgccactgcactccagcctgggtgacagagcaaaactctgtctcaaaaaaataaaaaaaataaataaataagtgtgttgtattggcaaccaaatatcatgagccacctggcccttgatgtgattttccaaaatggtcaacaacttttagtaaagttcttgaccaaaaaggctaattttcctctagtttacacagtggttgaattcctgtaaaatttagtatatattaagatcctgcagaaaatattctaaatacacaatttggaattaagcagagagctgtttaatgtggattcctgaccccctgacccccatcctcagaggctttgtctctgttttctaaaggaactgggggagggaggggttgtgctaaaaagagaacttaagatggtaaattagaaatcaaaaaccgaggccggtcatttgatacagaatctagaataggaatgtctatttcagaaacagttctacttgtaattgcctgacttggtacaaattttctgggtcaattttcctcatcgacaaaaatgggttttgttaccttcagtatggatgggtggaactgtggtttctgagaccctttgaagcttgcttggtttatgaagattattaaaatttctgataaaaggcaatgtataaatgatatacattcactatgcaaactatcatgaagacctattattcgagctttaggaaaagctgatcacggtgctgtcactttcccttaaagtccactgtctgaaaccagagaacacgccagaaagaaatttggcccgctaacctctcccctcaccaaacactaaacagacaccagctcagaatccgaaaacttgacagtctggctccagtctgcccaaggccagtagtgtggatttggacgactcactttactttcaatgggctcggtttgctaagattttcagttccatcttttactcatctaactgctccattcctctttgcttcttcctttcccgcacctgccaccatcctttctacctccctaacgactttgtctttgcgttcctaccgcttcccgcattacccgtttcgcactttctcatctcagatttcggtcacccgcaccctgccatccccttggcttctcctctttgggcatctccggtattcctcccgcaatgtcctggctcctctccaagatccaaaaaggaaggctaccatccccagccccgctgtgcactcgcgcaactcaggcgctggcccacaccgtgcgccccggatcccacacctccttgagtcccgatggctcgccctcacctacccgcccctctcttagcatctcgtcccccaccgccatctccgctatcagctcggagactcgggagccgccagtcactgtgccctgtccctctccggaggccgccagtcactgtgccctgtccctctccggaggctcttcttcctctttagcctgggatccccacctcgggcagggtccgtcgccaccaagtccagggccgcgcgccacccacgtgtccaagagcgcagtgcccgcccaccgcaaaccccccaaggccggcagctcctagccgcggaagctctccccttgcacacgaaacctgcactggctggggaactgcagactgatcgccagcggcacgtgcggggcgccgacgcctcgccgcagggtgcgggtgcccgcggagccagccagccagagaaccagcaggagaggaaaaagggtgggcgcgcgggtgggcccgggaggcggagaccttcgggaagctggggccacgcggcggtgcaggcgacgggactgcagtgccacctctcccgagaaacccacacgctcgcacgcccgcgcgcgcacgcacgtgcacacggtgggcagggagaaaacgagagagtctgagtgctgggcgcgttttagcgatggcttctgctctcaacagcaaaattaacccgcccggcacttgccagggctccaaagccgacggtggcgccggctggagaatggactgtgatccccagatgcacgtgaaaatgtgcaagaagatcgcccagctcaccaaggtaaggtggggcgcagcgggccagcgagctgca

SEQ ID NO: 31702 - DNA, 2300 bp, Homo sapien
aaattgatttaactttgtccttggtatctttagttcagtccagaaatgattaattgtgatgtgattaaattcattttttggtctggtgctttatgcttttttgtttaagaagtctttccctggcctcatttcacaaagatattctgtattatatttaactaactatatagttttaccatccccatttaggtctttaatccatcatgaatcctcccttatacatgtcattatatgtatatgtattaaatggttttacttttcatttttttcttaaccttgttcttaattttttcttaattcttattccaatacagttttactttttttcatataatgagccagttgtaccaataatatgtactaaacatatccattcacccttagtttatgtgccaaccttattttatattacattcccaaattatatatagctctgtttctaagctctattctgctctattggactattgtctgttcttatgctaatcctaccttattttaatgtctgtgactttagtcataggacataccttgaagaataggaactcccttactgtttaaacagttcatttggctatatgtggaattttattctttctatataaactttaaggtttgtttatagagttccttaaaaatttgattggaattgtataaattaatagggagaaagttgatatctttatgatatttgttccatccaagagcatggaatgtctgtattttaaattatcatctatattgtttattaggtcttacatattcatgattagttcctaggttctttataggattaggtttttgttgtttgtttttccttctgtgaaatgtctttatatatggtctagttagtattgctggtataaaagttagtattgctggtataaaagttaacagtgcctgagttgaaacactggccccgtgacttactagatgaatggctttgatcacgtaacttaatccacaggtaagatggggacaataaaagtaccaacttttagggttgttagaagaattttaaaatagttaacatttgtgcagttactagagtagtacatggcaaatagtgttatatgagtaattaaattaatgaatattcataggttaatttcagatcaggaacattgttgaactctaatagtttgtatggttttttaaattggatgatatcatctgtaagctaatagttttatctcttccaattcttaacgtatctttttccaaaaagagaaaaatgttgattagaactttcagtactgtgtcagacagtatcagtctcagtcaacatggttatctttagctaatttcactttttgctgttgttgttgttgtagagaagagtctcattctgtcacccagactggagtacagtggtgtgatcatagctcaccacacagcctccaactcctgggctcaagcagtccgcctgcctcagcctcccaagtagctagaactaaaggcacacaccaccacgcctggctaaatttttaaaatttttttgtagagacagggtcttgccatattgcccaggctggtcttgaactcctgatctcaagtgatcctccacccttggcctcccaaaatgctaggattacaagcatgagccactgtgtcctgcccctgacttcacttttaaaggaaatgtatctcatcttattcaggataatgtttgcttaaagattttggtagataacctttaccaagttgagaaagttacattctctttctagtttggtaaaaatgttttgtcttttaaataataaatacatggtggtcaggaactaacaaaagttatccacattcaataaaattctctctttttttcctttagttctggtaatttatacttttttttaatttgagctattcttactttcctgggataggccatatttgataataacattctttttaatgtactgttggattctgttaagtgatatttaggattttgcaagtgaagtgagcctatacttttcttgtttggttcatctctaagtttgggatttatttttattatctttataaaagtagctggtcagttttcatgcttttttcttttttgtggaacagcttatatagaattggtgataggatcacaacttctgaggtcccagcaagagtcctaacatctagcagctctaccaccaggacaggccccctaaaactaattccaacaagcacctctgaaggtaaaaaaaaaaaaaaaaaaaacttttatagctctctatttggagtttggggcataagggatcagcttttgcaaaagtaattttctaggctaaaactgcatacaaact

SEQ ID NO: 31703 - DNA, 2300 bp, Homo sapien
gtggatcacctgaggtcaggagttcgagaccagcctggccaacatggcgaaaccccgtctctattaagaatacaaaagattagccaggtgtggtggtgcatgcctgtaacccagctacttgggagactgaggcgggagaatcgcttcaacccgggaggcagaggttgcagtgagccgagatcgcgccattgcactccagcctgggcgacagagcaagactctgtctcaaaataaaaataaaaaaatatatattagaaacgtcacaaagcaaaattatgggcaacacaaatgttaccacattcttaactagcagctgaatatctacaaagtttgaggaattaagcaggagaatggataaggtatggcatattaatacaatggagtactatagcaacctgtctgtgccgtagtttcctcatcttaaaagaagatcaaagttatcctacagggtttgtgagcagtaaacgaagtaaagtgcttagcatggtgtctggcacataataaaggttaattaagtgcaagttactattatgaacatatcaatatgaaccacagcaatattgattgaaaaaagccagatgcacatataattattcatttaacggttaaaacatgcaaaatagtacaatatcctcattcagggatttattcatgtcattaatatattaaaatatgtcattaagatatagaaagctgcatggtaaaagttaacagtaaattcagaaaatccattacttcttcggagggcaggtaattcaaaaggagaaagatgtacaggtggctttagtaatgttctatttcttcagctggcagtaggttactgaggtgtaggagagggaaaaacggcttccctccatcctcctaggttctttggctgggttacaaattaacctgacatagacattaacaagaaaaaaaacccgtacttaattacatacgcagaggagtcccaccatggtcagatgattgaatattatacagcatcctacgctactcaagaaatgggggcttgcggctttctgggggatggtggccacaaagttgtggaaaggtgaggggaggaaatatacggtgaataaaagttgtcttggtatgcagataagatctcccaggtaacaaaaattatcgcagagctgccctctttctgatacagatcctttactgatgtatatttcctctgtagatgtcaatttcttttacaacaggacagattttcagagcgactcctgtgtctgcattttatcagaataccagctcaaaatatactctagaagtatattgtagggtggcatattttggtctcctacagtcctatttttggatggtgcatcctgagatccaacagaagttctgtctgatataatttcatttaaaatttaaaaacctagttcctactcttctttattttaaccactacccgaaagacctttccattctcttgagttctcccttaatacactgtccttatgcacacttgtaaacagggcctacacagctgcacatctagaaacggcagcagctaagttagcccgcaccccccttcgcaacgatccccggactgcctgcacgccctgtggaacctcgcagtcggcttcaccagggcagggactaaggccttcaaaagacagcatccgtctccactaacctcgggtcgccccgctcagcggacccagcagcgtcgtctcccttctcagaggtggccgggcctccggaacgcgctacgaactttcctttgtcgccgtctctcgaagcggagccctcgtgtggggatcccccgcccttcggccacaagggaggttgttatcctcggcagatctcccgttctcactcttggaggatcgctttttctttctagcctcacgctcagccgcacgacccagccaggcctaacgccagcagcccttcccctccggtggcaaggccactccgctcagctcccgcgccgacgctacttccggccgagtcaaggcccctcccccttagaaacgccacttccctccgtgaaaacggctggacaaggttgaacctagacgcatgcgcccaaagcgcggggtgcgaggtgggtggacccatcgcttcccgctctcttctcccaaagcgcttacggcagtctcgcgggatttccccctctcgcgggaattatttgaacgttcgagcggtaaatactccctggggctgtcatagaagactactcggagagcgctgcctctgggttggcgggctggcaggctgtagccgagcgcgggcaggactcgtcccggcagggttccagagccatgggagcggaaaggaggctgctg

SEQ ID NO: 31704 - DNA, 2300 bp, Homo sapien
tttcatttaaaatttaaaaacctagttcctactcttctttattttaaccactacccgaaagacctttccattctcttgagttctcccttaatacactgtccttatgcacacttgtaaacagggcctacacagctgcacatctagaaacggcagcagctaagttagcccgcaccccccttcgcaacgatccccggactgcctgcacgccctgtggaacctcgcagtcggcttcaccagggcagggactaaggccttcaaaagacagcatccgtctccactaacctcgggtcgccccgctcagcggacccagcagcgtcgtctcccttctcagaggtggccgggcctccggaacgcgctacgaactttcctttgtcgccgtctctcgaagcggagccctcgtgtggggatcccccgcccttcggccacaagggaggttgttatcctcggcagatctcccgttctcactcttggaggatcgctttttctttctagcctcacgctcagccgcacgacccagccaggcctaacgccagcagcccttcccctccggtggcaaggccactccgctcagctcccgcgccgacgctacttccggccgagtcaaggcccctcccccttagaaacgccacttccctccgtgaaaacggctggacaaggttgaacctagacgcatgcgcccaaagcgcggggtgcgaggtgggtggacccatcgcttcccgctctcttctcccaaagcgcttacggcagtctcgcgggatttccccctctcgcgggaattatttgaacgttcgagcggtaaatactccctggggctgtcatagaagactactcggagagcgctgcctctgggttggcgggctggcaggctgtagccgagcgcgggcaggactcgtcccggcagggttccagagccatgggagcggaaaggaggctgctgtcgattaaggaggcctttcggctggcgcagcagccgcaccagaaccaggcgaagctggtggtggcgctgagccgcacctaccgcacggtaagcgctcccggccccggccgccgcctctcgcccgccccggcccaccctccctcaggggccctccgtggccctcgggctcggcgcaccgtgactccagccttgttcaccttcgcgactcacttcatagggatctgaggttcggagaagtcagggacttacccgaggtcgcctgggcccaggccagaaagcctccgaagcctgggcgtcgttcacacgggccccgccttggcttttctgagccgacacccccagcttctgggcggcgtggaccgttattccttagtccgatcgtgaacgtggagagaaacatttacgaccaccgaggcgatcagacatcaaatattgaaccgcagagtggatcctgaatgcgggggttcagtggtcgttgcccctggggtcatcgctccccgccgaacatcaaatgattctacccttgtcctacggttacgttgaatccaatcaccaaataccaaattatttttagggcctggccattcttatttatgtacatactatttgtttgttttgagtggaaccttgagaagaatagaacaattaatttggggaagatgaattatcttgaggtccaagaaaaattgtgagtaaacatcacagggctttgaggatatgagataggatgtgcaagttatctcataaagaaactgctggtgataggaaggcctgaatatgagaaatataaaagccagtattgattttgggttgttgaagaagcgtatttgtaacgtactggtactaaaggcttattgagaatcaaagatattgaaaaaaatatatcaaaggaatcttttcactgtcaaaagtcaagcttgtgtactcccattatagcctggagagaaattcatgcaaattgattgccctttggctggtttggataattaagagtttactaaataaatattttaatttgtctgcattattatggctagtgctttcatcagtcttagggtgatgttgggaataaaggatttttatcggtgcagtttatgaagggtttcttttgtctttcagatggatgataagacagtttttcatgaggagttcattcattaccttaaatatgttatggtggtctataaacgtgaaccagctgtggagagggtaatagaatttgcagcaaagtttgttacctcatttcaccaatcagatatggaagatgatgaggaagaggaagatggtggccttttaaattatttgtttacttttctcttaaaggtactatgaaaatgatagctttggggagggattttagaaa

SEQ ID NO: 31705 - DNA, 2300 bp, Homo sapien
tattatctgaactctatacattcggaatgcaagaagttacaacaacaattcatttcctgaagagaacctataatgctaccttggtccatatgtatagcaaatatatatattttatacagtctcaaaatgaacagtctgaaagaagtctttgctaagttacatagtcctctttgtagaggcttctaaaatacagaactcatttaaaataaacaaaggagaactggtttaaagaggtcattaaaaatttaatgctggagttaaagtccactttttaatcataatgataattctaatatttcctatgaaaggtagactcattcaggttttttcaatcactagatatttcattgtcaaaaacatacaaactcccacgactcttttaaagtggcaaaattttctaaaatccctccccaaagctatcattttcatagtacctttaagagaaaagtaaacaaataatttaaaaggccaccatcttcctcttcctcatcatcttccatatctgattggtgaaatgaggtaacaaactttgctgcaaattctattaccctctccacagctggttcacgtttatagaccaccataacatatttaaggtaatgaatgaactcctcatgaaaaactgtcttatcatccatctgaaagacaaaagaaacccttcataaactgcaccgataaaaatcctttattcccaacatcaccctaagactgatgaaagcactagccataataatgcagacaaattaaaatatttatttagtaaactcttaattatccaaaccagccaaagggcaatcaatttgcatgaatttctctccaggctataatgggagtacacaagcttgacttttgacagtgaaaagattcctttgatatatttttttcaatatctttgattctcaataagcctttagtaccagtacgttacaaatacgcttcttcaacaacccaaaatcaatactggcttttatatttctcatattcaggccttcctatcaccagcagtttctttatgagataacttgcacatcctatctcatatcctcaaagccctgtgatgtttactcacaatttttcttggacctcaagataattcatcttccccaaattaattgttctattcttctcaaggttccactcaaaacaaacaaatagtatgtacataaataagaatggccaggccctaaaaataatttggtatttggtgattggattcaacgtaaccgtaggacaagggtagaatcatttgatgttcggcggggagcgatgaccccaggggcaacgaccactgaacccccgcattcaggatccactctgcggttcaatatttgatgtctgatcgcctcggtggtcgtaaatgtttctctccacgttcacgatcggactaaggaataacggtccacgccgcccagaagctgggggtgtcggctcagaaaagccaaggcggggcccgtgtgaacgacgcccaggcttcggaggctttctggcctgggcccaggcgacctcgggtaagtccctgacttctccgaacctcagatccctatgaagtgagtcgcgaaggtgaacaaggctggagtcacggtgcgccgagcccgagggccacggagggcccctgagggagggtgggccggggcgggcgagaggcggcggccggggccgggagcgcttaccgtgcggtaggtgcggctcagcgccaccaccagcttcgcctggttctggtgcggctgctgcgccagccgaaaggcctccttaatcgacagcagcctcctttccgctcccatggctctggaaccctgccgggacgagtcctgcccgcgctcggctacagcctgccagcccgccaacccagaggcagcgctctccgagtagtcttctatgacagccccagggagtatttaccgctcgaacgttcaaataattcccgcgagagggggaaatcccgcgagactgccgtaagcgctttgggagaagagagcgggaagcgatgggtccacccacctcgcaccccgcgctttgggcgcatgcgtctaggttcaaccttgtccagccgttttcacggagggaagtggcgtttctaagggggaggggccttgactcggccggaagtagcgtcggcgcgggagctgagcggagtggccttgccaccggaggggaagggctgctggcgttaggcctggctgggtcgtgcggctgagcgtgaggctagaaagaaaaagcgatcctccaagagtgagaacgggagatctgccgaggataacaacctcccttgtggccgaagggcgggggatccccacacgagg

SEQ ID NO: 31706 - DNA, 2300 bp, Homo sapien
atatgacctgaaaatggcccttttctgacctaatggtgggaatcaactcttgtttgatgtttcttaaaagattctactttattaattctgcttgttttagttacatccagagcattccagttgttaatgaagaacacagaggtgatttttcctatattggaaatttgatgacaaaagaattcataggtcaacaattgattctaattattaagtctttggataccagtgaagaaggaggaaggtatgtctaaatgttaacactcattctaatttgcccttctaatttcttatattgaaatatagtccttttacaatataactaaacatatttaccctagctctctaaagtggtataaaaagttttcttttcccttctacatatttccatatatacacatacatttatatttctagttcaatttcctcagaataaatcaatgaaattgcagtttttggttaaaagtttctgtttagatttattaaggctagtagcattttctaaaaggtttaatcatttctggtattttgtcattttatcatgttgatttattaaaaatcatagggtgttttataaaaatttttttttgtgtggaataagaatatttgacctaaagtctgtacatacagatttttgtacctattatagtgataaacctaagtgaaagaactgaggcaaatgtaattaagtttgcagagtaggtgaatgttagagataaaacatgttttgtcataataatatttaaattagttctttttgactgcagaaaaaaactgctggctgttttacaggagattcttattttacccacaatcccaatatccctggtttcttttcttgttgaaagactactccacatcattatagatgataataagagaacacaaattgtaagtaattttcctcattgttgataaagaggttttggtcaatgacattgaatactgtcttattttctgtttagaactttttgttttgtctgttttgttttaggttcgtctctttaatgagttttaaaatttcttaaaaccattatctatctcttacatacacagaatatttgaaaaatgtcaccttcttcctcttagtgtacctgttattgttgaatcagtttgaaatggagcaggtttggtaggaagttacaagtggggatatggttttgtccatgaggcactgggtgctagtgtttttgagagcttactcaaattgtacatactagggtttagaatctcatctgacactttctggctttgtggctttggacaagttattctgctgttttacttgtctgcaaataagaatagcaatgaaatctacctttcatttttcaatgaggtattgttcataaaggtattgttctgtattgcttgataaatacagaaataattgtttactataatactatttcagtgttatttttttctggcatagccaaaaaagacagatctgtatcatttatttcataaaaatcacataatttcagttgcaggttaattcacagatcatctcttccatcctctccttatatatacaccccttctacaacatgcttagttgttattcagcatctgcttaaatactttcatttgggaggcagccttttcctgatcagccaattccaatatacaagtggttctgaaaggaaagtccttccttatgctattattatttatgcattgtctacccaaaggaagaataaaaggatattccatttttctgtgtttaactcctacagagctgaacaagagaagggttgaggattttaggcagagaatttaagtgtctcatcttaagcaccataattcatatttctgtttttcaaacattatatgagggataatttactttcactgtctgtgtgcctatttcccttccattcaaataatttcattttgtagtcagatatattgttttgttttgtttttttctaaaattgtctagcaaacagaatgtgtgctatttctaccagtatgtttttgctccattattcaatatatggtggatactacttggagttttatatagaattttgatactatttgctgatatatcaaacatatattaaagcatgtactctgaacttacaggttacagaaattatctcagagattcgggcgcccattgttactgttggtgttaataacgatccagctgatgtaagaaagaaagaactcaaggtaagtctcttttaaatgaaagaagtgcttgagtgtaatgtagctgggcaagtctattctttcctcttgctgtgcagttctgaaatgtttctcacataatcaaattattgtttaattgttaaact

SEQ ID NO: 31707 - DNA, 2300 bp, Homo sapien
cgataccattctgtcttacaacaaatgataaatatgtaaacataagataggtatcaattaatatttgatattaactttaatttcttttgggatcttgccttttgtaatgaacatcatttattgttgtacttttgggatgtgctgattattctcataaaaagaatgctaaataggagactcttttatataggagagtttcatgagttatgtttctgatctctttagccatagacatcccaactccaacacccaccttcccagagtgtatgcctgaattttattttgatagctggtggcttcttttatttgacgaagtctgtgggccattataggctattaaatttggaaagcaaatttaaagcaaaaactgaaaatatcatctgaaaaatgacaaactttaggtcaaaattataaaattagcaaaagtagtctatcatggttaatatcgtctgtttaacttgacttgctttgaccatttatgtgtctatttgtcctgttcgagggctacaaatctgttaaaatgcaactacaacagagcataataaatgctatggtcagggaagtatagaggttttatggagaggtttctagtgctggtagagtattgttggcttccccagaggaagacatgttttatcctgagattagaataaaaataacaatataatctaacagtcagaggatactttttctgtggtagtcacagcattaattacttcacaaatgtgaattcattcttttcttcctataggcctatgaggttggtactattattatcttcattttacaaagggcaagtaacttgcccaaaatcacacagatagtaaatggtggaggcaggatttaaacccaagaagtggctctagacttgtgcttttaactcactctgtgctgtctctcctcaatgaattatggaaggaatgttgtagacagatggagcaacatctgtgatggtccagaagttaaagaatgcctattatgttttaaaacttcaggtccatgtgactagagaattgatggggagaagcaggagaaaaatctggggaaaaattaagggctaggtcatgtaaggctttgcgtaagcaatattaaaaattttgtattctaaggattgtggtgaaccactagtattttaagtggttaggtaagtcttatgtctcagatcactgttgtttaggaaatggattggagagtagtaaaagcttagacaggcataatagttgggagacttacagtagggttgggagacttacagatgatggtagtctgaacaagataatgacagtggatttggaaagtagtgatgaacttgagaggtatttagaaattagtaacggagaaaagggagtcaggaatgtatcttaagtcttttggtttagacaactgggtagatggtgatgacagtatgaagatagagaacaaggaagaggagagatttgtgtaatgatgagttcccttttggacatgttgagtttgaggaaactgtggaacatcaagaggaaatgtcttttagcagttatatatatgaatctgaaacttagaaaatagctgggctagctcatagatgataaacgaggttgtcaggtttttttttttttgaggtgataattaggcaagatgaagattagacttttttttttttttttttgagacaacgtctccctctgttgcccaggctggagtgcagtggcatgatctcagctcactgcaacctccacctcccgtgttcaagccattctcgtgcctcggcctcccaagtagctgggaccacaggtgtgcaccaccacactaatttttgtgtttttagtagagatgaagttttgccatgttgaccaggctggtcctaaattcctgaccttaagtgatttacctgccttggccccccaaagtgctaggattacaggcgtgagtcgttgcgcctggctgaagttgccaattttaaaatcctgcctctaccatttactatctgtgtgatagctgtaagatcacctacagagtctatatagagtgacagtatgccctacacaaagccctgagaaagcaaacatttaaaggatggggagaagatattactaatgctgaatattttgtcttcattttagaatgatgctgaaacattgcagaaatgtcttattttatgctatgaactgttgaagcagatgtccatttcaacaggcttaagtgcaaccatgaatggaatcatcgaatctttggtatgttgatggcctcttgggctttattttagtccactcctttcttattttgtaagtgatatgttctttagaaatcaaaataatgaa

SEQ ID NO: 31708 - DNA, 2300 bp, Homo sapien
tgaaaacagaagtaatcaatgctaacatttttgctactgaaaagaaattactaaaaatccaccacccacaccatgcccacctagtactgactgttaatctgaagtaataacctatgttatctaggactcacagagtcttcaaatgttggcttacctgctatgcttctggcacaagaaaggagaattcaaagactagaactcacctcaagcttttttggcttttaattcaaagaagataaatcaattgcacactgactcacagactgaacttaagctgggttgttttaatcctttaatggcatttggtcaaacttgttaccatttttgaaatttaatgtattagtgatttcagatgctaacagattaagttgaaagtattactctattttatttgatatttagtgataagctactctgttcaattcatatgttgtatattattggaaagataagattacaaaggatattaggcaaaattaggtaagggtcagtaatagagctattaagcacttcatgacttgagacaagggcaagagtcatgtggtaggaatgatgagtacagcattagttttaaaactcattgaccaaaattcagttaggccttgttggtatttggggagtggtttgggtagaggaaggatgttttagtaaaggtgatatatgtagatggttatgcaaatattggggaactgtagaaagatgactttggctaaggatcctgaataggactgttagggcacaacactgggggtagattatagattgctttaaaggccaatgtagggaatttggagttggccttatgtgcaatggataattatgcagggcttatgatgaaagggttaatgtcatgaaaaccacttattggaaagattaatttggtggtcagtggtggttatatgagatgaattggtgagcagaaagaaaagaatattaataaagaaagcagctgaaaatctgtataattcgcttgtagaaaaagtactagaaagtaatagtagaaagaatagaaattgacctaataaagaattatgggtacaagaatctaaaagaaagagcttgagaggcaagggagatggaggagtccaggaaaactctaagtatgtgtaacagcagacttcaaaggagctgttgacatagtttaattggggagtactctcatgatcagtgtcttggaagagtaagggaaaagtagattggggcatagccctaagttcaactactgctatgcaaacaaaggccccagccaatcccatagggagttccggaactgggatgttcctttgagttgtccagaatggagacaagctgaaacactgtacttgtgcacgggccagtcattggatttggacaaatctttgggagaagaggtatgatcttggacaaggtccaccaaagtccaccattgtcagcctggatcagtactgcagctgggaacttttaccctccaaaacatgcagcaactgggggatgagtgcatctttcctaaagggagtggaactgggccctatatcacaacatccacaacaagaagtcaagaaggggagcttattttgggggtagggaggatgttaaatttggttttagacattttatatttgggattatggcaagaaaattagttggaaatatttgttagatgtgtaagactatataataatcataatcatcttcaatttacagagaattttctcttaattttttaggccttaacagtacatgacaatttggctatgaaaatttgcaatgagatcttaacaagtccgtgctcgccagaaattcgagtctatacaaaagccttgagttctttagaactcagtagccatcttgcaaaagatcttctggttctattgaatgagattctggaggtaaagtagtttctcattactctaaattagtttgtgtttatatttatacatgtagaatttacatggttgtattagattatacatatgttagcatattgtgacttatttgaagtattttcttcataaatttcatataatttagtgtttttaaacaacttgatatgtattggtactattttcaaagattagggaatgcggtgtttacaaaatgttaataatgttttcttttatagcaagtaaaagataggacatgtctgagagctttggagaaaatcaagattcagttagaaaaaggaaataaagaatttggtgaccaagctgaagcagcacaggatgccaccttgactacaactactttccaaaatgaagatggtaatcacatactgaacagaatatttataaggttctgtttttttttttccatctttactg

SEQ ID NO: 31709 - DNA, 2300 bp, Homo sapien
gtttttatttatgtaaatgttataattacattttaataacatgcgtaggcagttattttataacattatttttctaaagttgcattatcgtaaattatgtctttagtcgtagatataagcacaatttattatgtaggcaatgatttaactattgtatagttcaataatttaaaagagtaaaattttacactatgagttctagaaaatacatgtttatacgtacagccacagtttaccttttgctagtcctagtaaatgctaattattcaattctcttactcatcatcacattttctattctctccattttgtacaatttacatcactcccaccttcccaaagcattatctgggcagctttgaatggaaaacagtcatgaatgagcaatcaatggctattcactacaaaatggtggagaggtgactaaaagtttatcttagacaaattttatatcatatatttagttagtttcttcctatcacctggcaatgccagctcctcctctgttctttttttcctatatagtgccttcccagtcatatcctgttcctaaacccgtttaagatgaataggtaatggccacatatcaaatactagtgttatgaattagatcaacaaaatatgaaatattaaaatgtaaggattgcctatctgttgcaaatataaagttttttctcttgcaaaaattataggggatggagtgttagatctctctacaaagaaaaccagcataaaatctgaagagtcatccatatgtgatccttcttctgaaaattcagtggctgggtaagcaatatctaggaaatataatttaatattaatataaaattatctctgcagagaactcttaatactattctgagtagtattgacgtatatagttttcctccagaatttttgtcactcataagtgtctctctctcatacctttcatttgtcctttctctttcttttttattctttctgttaaagaaaagttatcagaacaatcaccaaactttagttcatgttactaaaatgaactaccaacttatagaatacaaactaagaagcaggacgagtaagagaatattaaattaaatactcaggacgcaattttaagggaaatatgtaatttattaattttttaaaacaatgaacaaattccaaaagcactgtacttactaattaatgctagtttatagtgtttagatttttttattgcactttagatgtggtggcaaactacttaaatatatctagtaatcaccacaaaaagtcctctcatgttttgaaaagtgtcattaatcattaaataaataattagtagtgaaatgctgttctgttggatttttggatttttttttacaacttttttgcatcttcccattaactaactgcataggaagcttttttgtcacatttaaatcttagaggtagattgtaatttgtttcaactacggctgtagtagtatttgagtcgtaaggtatagtaagctttctgtttgagaaactttgaaaattacaatgataatttgaaatagtgacatttataatatctaaaattaaattattcaaatataacatctacttgtttcaagttttaagctcttgtctagagaaaaattagtcttgtggaaatatgggatgtttgtgtttggaaatattcctgctgctacaaatttcctttaaaggggttgactcttttattacttgtttagcggtaacgtcacgtttgtactaacaaaaactcctttaggatttgggtactttttataatggagctctaattgtataaataaaatttataagtgttgctctgcaagcatctatcagaggaatagcaacatcatgagaatatttttacaaatactgagttaggattttatgttcttggaaggtctgcccgttgaggccaccgtatcattgtcacattgtcctaccaggactgtagcgtttgctttgataaggagtaactactacatctcacagacttaaaagtgtcataagcagtgatgttacctaagcaaggagtataataaaggagtggaccctccccttccatagctgtgtgagagtctctcatgcatcagtttaccatcgtttcattccatccatccaggagactacacagaaacagagaggactatgtggaaagaagtgctgagtttgcagatggtttgctctcaaaagctttgaaagacattcagtctggagcactggacataaataaagcaggcatactttatggcatacctcaaaaaactttacttcttcacttagaagccttaccagcagggaagcctgcatcttttaaaaac

SEQ ID NO: 31710 - DNA, 2300 bp, Homo sapien
tagatcacagtaatccttgatactatttaccaataaattctggttatcttctttttgcacatataataggatcgcacttccctgctccctttaagatagatacgcccgaataattcgctttggtcaatgaaatgtgagaactgacttgtatcacttttaggaagaaccagttcgccattcttcatcttccttttgcctatcacccaaggggggacgttgcagagattccagcctctttaaggatccagttgcttagtgagaccacatggaatgaagccccctcctcctgccacccagagatgaacatgtagataatcaggaaatagttttttgttgttgttttaagccactaagattcttggatcatttattactgcaccataatttttcccatcctaactaatgtagattactataaaagtgatcaggaaaactgcaaaggctgatcatcgtggcaattgtgagtggaagtggttaactaaaaccatccactgacaattccaaaatcaccttcactagtgatttcacctgcactccaattgtgaccgttctagaaaaggtgattatgcgttcaaactttattatttttaacttatgaagatgcaaaattacatcttcactactgaagtcataatgagcaaagaaatactttctcataggaagaaaaagaaggtggataaggataagccacaaaacagggaaggtggtactgaattcagagtttatgagatttccaagaagaattaaacatatttcccacagacttgtgaataaatttccagaaatacacagtacttcttagcaaacgttgggtagcttagcttcggcttgataaactgcacttatacggaaacaaacgcacaatcgctctggtgcaaaagtaaaaactgtgattggagtctgtatttaaacgtaagattcctctctagctctctctgaagaagttattttctctagcacgtggtagaattcattccattaacctttgtaaagtgcttaatcccgtgtcacgcactgtactagggtctagcgagtgacagatgtcacggtacagagatctcagtgggtcgctgccctccaggagcttataaagaaaattttccttctgcagttttcagccggctacacccagtcccctgcaagtaattttcagtgaaaaaaacccgcatctttttcctagtccttgcaaatattctggctttccgagatctcttcgccttgaataccgaagtcactccgggatctctctctggacgtttggcagttattccagatgtagccgaatgaccggcttgccctttccctgcggagtgacaggaagacagcgaccccggaaagtttccagcacttaaaacgcaaagcgcagcctgaacccacaaggagccgacaactcttgcggcttccaccacccttctatcgcggagcctaaggaagctaaagcagtcgggtcagacccggccaccgggcagcgcatggttccgggcgcagggagcgacagactcagccccccagcggcgcggcgcagagaagttgcaggccagcctgcatacccaagtgcgggggggaagaaaaacaaacaaacaaaaaaaatcctttcttctggactacaatgaccggcaagcaacgcgccacggcgccaagttcagcttcgggatcctggcgaaatggagcctgggaagtgaagtctccggactgtcggagtcccgtagtgaaggcagaaagtaggcgttgctagtccgctccactagcacgccggttcctggctgggctccgggtctctcgctcccgctcagggttttcgcgggcggcgggagcggtatggctcgcctgagtaaactccagcgggagggggaggagggtagtgggtggggaggcggggtcagcggaagcggcaggttgcttccttctcctctggctccctccccgcctctccctgagggagcggtgggagggggagggcagggcagagggaaggtagtgacacgtgtcaatcaacccccctccggggggcgcgcgctccggggctcgcgccgagggctcgcgcccctgcctcgtgcctgcgctgctcgtatgtaaatgagggcgcgtgacgcgggacgcagatggacaagggaagagagagaatggccgctgccgccgccgctgctgccgccgccgccgccgccgctcagtgccggagccctcggtgcgcggcggagagaagaggattccggcgggaactcgactcttggcgccaccgcctcatgcactgtgtaggtaagagagacgcgggccggggccccgggctccgcgcggcgacc

SEQ ID NO: 31711 - DNA, 2300 bp, Homo sapien
aaattgagaaaatgcagttctatttcctgagaaaaaagtctctggagcaccatgaaaccctatccattgcagcggcctgtaagcaagaaatgcacagaaattcccaggcagcattttcacagaattagaggactttggtaattctgtcatcttcacgtgtttttgaaattacaaataaaggcagaaatagcttaagaagggaagtattattattgaggaaagttatgccatcaaaactgaggtttaagaatttgcatatggagacctcgaagactttctgcatttcaaataacattattggtacaagaaagtgcccaggacattagcctttggattgggcatttacacagagccccgaagaagacacacattggaagcagaacctggcaatgaaaaagaatcagtaccaagataatttttctaagcatgtcctcataattattcccttattatttgatatcagtgtttcacaattattaaggttgggagcaggaacatttttcctcacagaggactggcccaagaatgtagaatgtttactgtctctattcattatccacaataagtaaatgttgtcatcaccaggcctaaacaaataaataaataaatacccctggctatcaaatgcttcttattagggcagaaccaccacatttaaaaattactactttgttgtatctgtgtactgttaattgattaagtatgtggtaaaatacctgtttaaaaaactgtggtatagtcatgcgtcacttaatgaagaagttgtgttccgcaaaatgcatcgctaggcaattttgtctttgtgtgcacatcatacggtatatttacacaaatgtagatagtatattccatcatgatacaccaaagctatagggtatagcctattgcttctaggctatgaacttgcacagcatgttactgtactgaatactctacacaactgtaagacaatggtaagtatttgtgtatctaaacatagaaaaaatacaataaaaacatgctattataatcttatgggaccatcttcatatatgtggtccattcttgaccaaaatgttgtcttgaggtgcatgactgtacttatttcatgagagtcactcaaataatcttgtttgagctaacaacatctaaagaaaataaactattcacgtatgattaaaaataagtaactgagtatcatcaatccaccagtattgattctcatgactgtggaggattgtgggtctgccatgtgtgcatggccagcctctgccttcacgctcctaaactgagaacaaccaaagagagcctccgtctgtttggtaattacactgatatgattcactaaaagtcatctttgttgtcacttctatttaattccagggcttgaaaagaagcaattccaagatttctatttcattcattccaaccaaattataatctcaatgcaagttcaacaaaattatatttatatcaattgtaattattgcactgtgctaaatgtttataaaaaataataaccatgacatggtatgaatctcaaaaaactcgtattctagtagggaataagcacatggggccaacaaataatgagtatagagtgtaatcaattaaaggagatgacagtacaatcctgaggcaacatagaagagaatatctcgatcatagatagagaaagcattttaaaaggtactcaaatgctgagctcagaacgataaataggcatgtatcacataaacagggagttttttgttctaagcatagtgattggcatatggaaagataagagccctttaaccaacatagtttgtggaacaaaagatattctaatacttctataaagaagatcaaagagtagtaggagattagcctaaagatagaatcagattcagctcatttaggacctaacacatgtaaaataagaatttcatccaattgcgtaaaaccctcaaatggatctccactaatatagaatatactcagtaattaaaaggaatggacatgcaacaccaagaatgaagctcataataattatgctgagtaaaataaaccagtgtatctggaaaatataaactaatctacagtaacataaagcaaatcagtgggaggagccaagatggccgaataggaacagctccggtctacagctcccagcgtgagcgacgcagaagacgggtgatttctgcatttccatctgaggtaccgggttcatctcaatagggagtgccagacagtgggcgcaggccagtgtgtgtgcgcaccgtgcgcaagccgaagcagggcgaggcattgcctcacctgggaagcgcaaggggtcaggg

SEQ ID NO: 31712 - DNA, 2300 bp, Homo sapien
gagagtaaaaaatcacacagatacgttcaagcccttaagagttttgtgagcctattgaatatccaagacatcaactgaccacggtgtggttcagtgtgtgtctacaaaggaagggttaaacggaagggggtggcttggagatagaaaggcaagcaagaaggttggaaaatgctgttttccaacttgcaaaaactgaacttttcagctccccaaaatacacgtgtgtgtctgtaagcgcaggcagatctatttcggtaggatttttcttaaatttaaatcataatttctctgtttctgtctctctgtctcttgctgcgctgcaaagagtgagcagcccccttaaggatcgcgtggcaaaagctgcaggagaggcactggcagggctgtttatttatgagccgcgttcaaagccgacctcttcccattctcccactgcaaacgactatctccgagcccaggtcacctctggggccaaggagttgggggctggggctcgggtggctccttcttcgggccaagtttgcccgcgcgtgggagcgagggggcgagccagggcgcacgggaacgcgcgccgccagccgccgcctccgcccagcgctggcagccccggcctcacctctcccctctccccagcgaggtgcgggctcccagagcggagccagggggcgggcctgggcctcgaggggcggggtcagggggcggaggctcgggcggctatataaggcccgcgccggctcaacttcggacttggtgttatttatttgggaagcgcccggacggcggagcttggcggcggcggtggtggtggctgccgcagactgtggttaaaaaaaagaaggcggcggcggcggcggcggcggaggcggaggcagctgcgaggcatgggagcgccgaagcgcccaggcgcaggccgaagctgccgcgctttctgggcacggcgggagtgctgagcagaaaggggagcgccgggggcccgcagccggctccggaggcgcgggccgggtttttgtttggctacgctgagcgccagtcagccccagcgaacaactccagttacgacaacaacccaccttccttccagacaagcgagacttgggctgctgcgtccgtcctattgtttagacacttgccaggggctccggagtcggcagagccaccgagtccccgctctgagtcgtcgccctccctctccccgacctcgctccctggagcgggaggccaggaaagcagcgggagaggggaaggggctagaaggagaaggactacccgggactgcggccgccgcgtcaggtgcagcgccaggagccgggcggcgtcgccacgccggcaggggtaccgccactgtggccttgggggacggaattcaaagcctgggaaaagttgctgcactttgagaaggacgaaccactagtgggagaccgccgggggccggccgtggctctgcgccctccggaacccggctcttgtttcttctacctttgccatcaggtgtctgccgcggagctgcggcttatctgggagacgagcggggttgacacgcgcgcacacactactgccattcagctgccgcctggctctgcctggagtagtggatcccacccgcccacctgccaccgagccattctccagtacgccccagcaggacgctgacacctccaaccttggcctttgcctttccactccttccggtctgcctggtttttaagtccgcccccagtcagtccccactcagtcttcgcagcagctctcatcctccacttggcctcttggagttcctcgccggagtgctgactagtggatatttctgcccggctgcggcggcccgactgcccttttgtcttttctgcgtgacctcggggcaggtcctggtgcagagcgtcgccaaggacgccgagcgggaggcgggattgcccagacatccttcagcgaagtgcatgtgtgtttgtaaaccatcgttggctgtcgggagaccgcgaggaccggtccaggctgcggcggagtcgagggcgagggagaggccgcgtgagtgagcagagtccagagccgtgcgcccccagaactgcgcgtccgccccgtgcacccccgcgcgccatgcccagttgccccgcgcgctctgctacgggcccgctgggcttccgcgccttctagcttccggagcccactttgatcggggccataatacctattgagatcccctcttctgtcttgtaccttcgccactggcatcggatttgcagaagcgtgcgtgggatcagaggaccgccctccccacaacaaccggcccctgcatcttagcagcc

SEQ ID NO: 31713 - DNA, 2300 bp, Homo sapien
aaagaatgtgtacatgtaactccaatatatttctctgctagagacttggatcacttttataggtcagacaagtcttgctgcatcagaataccttattctaaaatgtaacctcactattctaattaaatgcaaagtcagctgtctgatggaaatgtaaaatattgtatataagtaatatacaaaaaaaattgccgtgcattgaataattgacactattgattttgcttcaccaataagcatcttaaaatataaattacaaacatgcgtgaggcaagtactatcacagaattttcaagactgatgctttgcagtggatgataggaaaaataatacagagataacattaggatgcaagctgtataggctttgatattttctgacagaggggttctggggcatggagtgagttcctaaaaccactagtagtttgagttgaaacgtcatttgaaaaagacatcacaaagttcctatggcactgtcggcctgctgcattgaagaatgactagtttccttttttgttgtattcttcatttagaagtagtgctgctttaattggcattttaggattaaaatttattaaaaggagtatgattaaatgtaaaagaaaatatcaacacattatttttcaaagtcattattttcaacattttagaaaaagatcttattttttttttttaaaaaaaaatatatatatactaagacaattagacttccccaaataccataaaacagacctttggttttttacttcattgtaaattactgaaattcattacttaattgtatgctatgaaattctttgaaagttcatgattactttcaagttaaatttcaagttcattggaaaaaatacacaaagtatctgaatgcataatcttacataattttttccagaattttaattttacggtgcccataaataatccacttaaagatggaaaacatactgtgcttcagggaagtatgcatacaagttgcttttatcataaatatctatttgactctaaaggccaaagagcctttttgtaaaaacggttagaattgtcggggtaaatccttttacctatgtaaattacagaacttgttgcagaataatgtatatgtttctccaggcttctctggtgggtgataacctgatagtttttaaaagtgcatcagccacaatgcacataacccatctcaaaagcatcttgatattcctgatgcatgaaataactgttttgaatgactggcaaagtgtatgagatggagatacaacagtcagggaaatacacacgaacagaaaccaccaagaggactgccagcaatttcattgcaccaagtgtttattcaactgtggaaagatcatatttggcatagaaagtacattctttacagaagctgactatattgttcaacagataatttgcctttatggctgatccatttagacttaagctggaattttcatgacacaattcatttgctgaaagcatattgttgaaaatgtgaatactttgaagtgccaggttaaaaacatgttttagcacgatttctgattcaaccatacaatactggatggtggaatagttgagtaaatgattggcgacctggttatctttctgagttgtaggttctgatggttcctgacttgacttatgttgtcagaagaagtttctgaatgagattatttaaaaagatagagttagtaaagatggcttgatatctatatggttcttttctttgttttgaagacaacgtagtcttcttttgaaaaaaagtcctcaaaatggatatcattgatagtactagtgtgccatcttctagaggaagaaaccaagtactaggtaagaggagaatgtgggattctcaacgataccagagatcactcatcagttcagtgcagagtactatacctatgctcttcaggagaaattgatagtatgccagttgttagcatgagagaattttatatacggtaatatgacacttaacgatggagatacattctgagaaatgcatcactaggcgattttgtcattgtgtgacatcatagagggtacttacacaaacctagatggaatagcccactctacacctaggctatatggaatagcctattgctcctaggcttcaaacccatacagcatggcactatatggaatactgtaggcaattttaacacaatggtaagtatttatgtatctgaacataccgaaatatagaaaaggtacagtgaaaatatggtgtaaaagatttttttaaaaaggtacacctgtatagggtgcttaccatgaatgaggcttggaggactggaaatt

SEQ ID NO: 31714 - DNA, 2300 bp, Homo sapien
aaaatttgctcaccccacaccacacccacacacgtagtcttctctgggactgacaataggcatgtccatgaagcaggaggaggttaaagtacagacaatgaccaagaaacacatccacataaactagtcagcccatgaggggactctgtgacactggcaccattaacatcagataccaactcagagtcccacactgacttcagagaggctcacagtacatccaattgagaaggcctcctgttgcattcttgaacatcatcggaggatgctgatttctggcttgtcatggatgagagacacatatagatatgtgaccaataataattttatatgaaatttaccattacattaaggcatacaagtaattaaaagtaaactggaagagcgtcagttgcttatatttttgaattaattttcaggtcctgtggatgtcaatattctagctaagtgtaacccctgcctatcaaatccgtgtaaaaatgatggcacatgtaatagtgatccagttgacttttaccgatgcacctgtccatatggtttcaaggtaagtaaaagcactttaagagtcacagtttgagagcataacttttcttggtgtgcctttattattctactgtgctttctgtatgtgccaagaactacttcactcgactatacttgccccttcttctccaggggcaggactgtgatgtcccaattcatgcctgcatcagtaacccatgtaaacatggaggaacttgccacttaaaggaaggagaagaagatggattctggtaggtcattagtctatgaccatctgtgtctgaagtattggagcaaagataactaagccaacatacattttccttttcaaatcaaaggacagtatttttcaaagaatttgagagaaatggcaatatgtattggtccctctcgtagatattgcaatataaaaaataaatggagacactacagcattctcagcacaggatgctacaaaaccaaaactaatttacaaacatacacatgtgcacattatggttaatcaggtcagattagggcaagacaaagtattaatattggctccattatactaattaatagccaactagtcccctactgctagtcatatattcatctgttgttttgcttattgctttaacagacagtgtgtaatgacaagatataggtcccactgaaacagaaaattaacgatttatttccaagacacaatgtaagtagacagacttgctgtgaacgattttaatctggagttatttaatcatatggtacaattacttcagatgtacttcatgaattatgaactggagctctttattaaatgacactaataatgtcacataagaatgctaatatactactaaaacttgttagaatttcactttttagaagaaatagacttcactgctgcattctattatgaagttctctcttattcatctagactttactcaaaaattattcgatacatactcaagatagttttatgccagaggaaggattgtatttaagacaaagagaacattcacattttgtaattgcaaggaagacaaaattttgttttcggattttttttttcaaaacatcaaggacattataagtatgttagtagatattgcaattttaaagatcagaaccagttcctcttcatttatgagcaaagaagcctgaattattttattagagcacaactcaagattaagatatctagggctgtggaataaaactgcttgtgttttagacctgcaaatacagtgggtttgttgacttttaagaccatggaaccatttgccttcttgcaaccggcataaattttattttttgaagggtttctgctttggtggatattaccttaaattgatgtttacaacatgtcagttaaaagcattttaaaaaatcaatttctggtagttaaaagctctatggttgatgagtgtaattatgcttttttcaatatttagaccacatgactttaaaatgcaacaaaaagatgttttttgccttttctcctctggcattcaggtgtatttgtgctgatggatttgaaggagaaaattgtgaagtcaacgttgatgattgtgaagataatgactgtgaaaataattctacatgtgtcgatggcattaataactacacatgcctttgcccacctgagtatacaggtacaaataataggaaatattttgccttccatcagtatatctgtttgaaagcatcattggaactatgttatatatgtttagtaaatctttttttatttgataaatggtaggtgtcttgaaaatcagatgtaatgtaaa

SEQ ID NO: 31715 - DNA, 2300 bp, Homo sapien
aaaaaattagccgggcatggtggcgggcacctttggtcccagctacttgggagactgaggcaggagaatggcatgaacccagtaggtggagcttgcagtgagccgagatcgcaccactgcactccagcctgggcgacaatgggagactccatctccaaaaaaaaaaaaaaaaaattatgtctacagtgagataccatctcacaccagtgagaatggctattattaaaaagtcaaaaaataacagctgctggcaaggttgtggagaaaaaggaacacttatatactgttggcagaaatgtaaattaattcagccattgtggaaaacagtgtggcgattcctaaagacctaaaaatagagctaccattcaacccagcaatcccatgactgagcatatagtcaaaggaatctcaatcattctatcataaagacacaggcatgcatatgttcattgtagcaccattcataatggcaaagacatggaatcaacctaaatgcccatcaattctagactggataaagaaaatgtggtacatataaaccatgaaataccatgcagccacaaaaaaagaattgagctgatgcccttggcaggaacatggatggagctggaggccattatccttagcaaactaacacaggaacagaaaaacacatactgcatgtttctcacctataagtgggagccaaatgatgagaacacatggacacagagaggggaacaacacacactggggcctagcagagggcggagggtgggaggagggagaggaccaggaaaaatcactaatggacattaagcttaattcctgggtgctgaaatagtccgtacaacaaacccctcgtgacatgagtttacccggtttgttatacggtaacacataatacactgttggtggggagtgtaaccctcatatacccctgaacttaagataaaagttaaaaaacaaaacaaaaaacaaaaaaaaccagggatgctgcccaaggaggactgcctgaaggtgttgcctcagcatctggggagaggcagccccttggtgagtatatggagaggcagcttaacctacccttgggttatcaactacccatgatatgtgctttacttgacacaattttttttgtttttctgagatggagtttcgctcttgttgcccaggctggagcgcaatggcacgattttggctcactgcaacctccacctcccgagttcaagtgattctcctgcctcagcctcccaagtagctgggattacaggcgcctgctaccacgcccagctaattttttatacttttagtagagacggggtttcatcatgtttggcaggctggtctcaaactcctgacctcatgtgatccacccacctcggcctcccaaagtgctgggattacatgcatgagccactgcgctcggccgacacaaaataatttagttttcatgtttttctgtctgtagtccaactgaacccttattacctaatggggaagaaaatcaaaaaataagccccatgcatggaaatccatgtatatgcaacaaatgtcctccttgtcctgccacgggacagaggacctaggcttgatacttggtctctttattgccattttgaggcctgtagaaataaggctaaaagctgtttgctaagttatctgttggttgattgattgattggctgattgattgaatgatttccaactaggccaatagcatagaggaaaggcttaaaaaaaatcatggatctggccaggcgtggtggctcatacctgtaatcccagcactttgggaggctgaggcgggtggatcacctgaggtcgggagttggagaccagcctgaccaatatggagaaacctggtctctactaaaattacaaaataagccaggcgtggtggtgcatgcctgtaatcccagcttctcgggaggctgaagcaggagaatcgcttgaacccaggaggcgggggttgcagtgagccaaggctgcgttcatggcactccagcctgggcgacaagagtgaaactccgtctcaaaaaaaaaaaaaaaaaattcatgtatctacttctgtttgtcaatgaagacctagcacgtgaaaagattgactcagaataattcctgattttatgatagcctattgaaactcaaatatacgtatgatgtctaaacattttcatttacaaattactctagtcaaagctgggctttttctaattgttagctttggaacaaaaaggaacagatttactaattgtttctctgtgctgtggaactttgccaatctgtatttattcttgacatgtgcacatatgtgtgtt

SEQ ID NO: 31716 - DNA, 2300 bp, Homo sapien
ttcatgctcacaatatgttcttactctcagtgcaatctttgacttaatctctctcaaattattatgttatgccttaatagatgacattccccttcattctgatattatggtttctataataatttaacggtaatcattcactatcatcacaaattctccctcacacgtttaaatcagcacttcttaaactgtaaagcacatttcctcctctggtgaatcttggtagaatgcaaatttggattcagtggacctgaggtgagacctgagattctgcctttcttacaaactcccaggtggtgatcacaatgctgacccgagaagaaaattgcgagtagcaatgatgcagaggtctccctgcaagctacagttcagaaatttaagccttctagaaagagaatcttcagaacaaccaaaccattttcctcagcaaaggactgtaccaggtactcttaactatcaatttacagagaaggaaacttgaacaggtttttcactataacttgacattaccgtggagacttgtcaaatcaaggctttcatttttattttattttattttttggccctttggcaaatgacttagtgatagaagactcagtagcctgagatcagcagaacagaaattaattacttaacatttaaggaactgattgaacaatgtttgatgttttgctttttaatggacataggagaaatgccatgtctttcttatctacctctaactgtcaatttaattggttatactgagctaagtggaataaaatactcattaaacagtatcttattctgacttaacacctcagaatttttaaaaaatctacagttgggggatgaggaaaataaagagatctgggttaaaggttacaaagtttcatttaggctggagggataagtcctggagatatattgtacagcatagtactctagttgacaatgctgcattgtacgcttgaaatttggtaaaagagtagatcttaaatgttctcattatacacacaaaatggtaactatgtgaggttaccaataaatggtatctatgtgaggttaccattttgtggatatatataaataattaattatatattacatataataatatatattatataattaatatatattcacaaaatggtaacctcatatagttaccattaatatatccatatagtgaatatatatgtggatatattaattcacctgattgcagtcatcactttacaatgtatgtatagcaaaacctcatgttgtacaccttgattttttttttttttttttttttgagatggagtatctctctgtcaccaggctggagtgcagcggtgcgatgtcagctcactgcaacctccacctcctgagttcaagtgattctcatgcctcagcctcccaagtagctgggattacaggtacgcaccaccacacccagctaatttttgtatttttagtagagacggggtttcaccatgttggccaggatggtctcgatctcctgtccttgtgatccgcccacttcagcctcccaaagtgctgagattacaggcgtgagccaccgcacctggccatacaccttaaatatttacaatttttatttatcaattgtacttcaataaagttggcatcaattctataaaatattctaaaatagattataaactaatgtcataaaatatttcgtaaaaacaacatttcctgctaccccatgacattttttccatgcagactgtagctgaactattttatgcttactgcctcagggaggagttgtcatcataaaagttctcatgctaaaagttgaattcttgactttggactttcaaaagttaaggtcaagaccagccattatttggaagagctagaagaatatgtcatcagtcagagtcaaggtctagatctgagagcaaagagacagtatgctctgtccttcccatcctccatcctccccccagggcaataccccagagctaataagcccctagatacccctgaacctagggtataggatgagaagaaatggccttgtagtgtgtctagacaaaagactctacggcaacctcataggttcccatggtttctacaaggtagaaaccaacagctgaatttcttaggcttcagattggaagaatagattacctcctggatagttaagaggagattggaattagctctcaatgagaacctggaatgaaaaacacatgagcaatctacaagaatgaaggataaatgactgaggaccagaaagaccaaagtacgtatatcctagcagatgacaacagaggaccagatgccacactcctccaagcctc

SEQ ID NO: 31717 - DNA, 2300 bp, Homo sapien
ttctctcttaaatagaaaattaaaccttaaaacctgaatagaagacaaaagtccacaatcagtgctctgtttctcacatattgtgagctttcctagaaggtattactcctatcgcccaactcagcgtctacatatgctgatggctcaaaaatccatagctatgcccagttctctttcctgccctctagatgagcagatccaacagcatgctagttagctccccctggatgcctcacaggcttgtcaaaccagtgtattcaagaaagcacccaccacttattgcataatatcctgatagagttgcaatgccaaggagcatgttttctgttcattttctaaaatgatgacagaaagtttagaagaggctgttttaactgtgattaggagaagcttatactaattgttattataaagatctgaaaaatccgtgtcatcgtccatggttcatacaccaacacatagcatgagacttttgccacttacgatgtcctccacgttagtcttaatttgctttcacctgaataattgcactagctaatacttattgagtacttcctatgtgtcaggtattcaattgtcctcttaaatttaagtctcgcaataacccaataatgaagaggaaattgaggcttgtaggagtcgtcatccacaaggactcatagctgataaggggtggtgagttttagatagcttaactccagaacacatatgcttgtcattcctctgcgatactgaatacaaatcattcttatagtccagggaggaggggttaaaaggtcacgaactaggagctctactgagtctgacactggagatgctaggagtaaggaaaatataataagtcttgaggaagctggagatgagagattataaagtaaaagtagctgaagatacaggatataagatttttttttttaaaaatttctttttccttttaaaaacgttagttaagcatgcattgcgctaggcattggggatagaaaagcaataaagacaatttcagtctagtgagaaagataggtaaatacattataataaattttaaaacttagatttgtatgcaaggttcacagaacattagagaaattagacatagacagaatttattaattcattttattcattcagaagacattagttgaatacccactgcattatgcttgaagctggagaaataaaaagggcaaagttaaaatccttatcctgaggaaactcacaatctaatgaagatgcttctggggtgctggtcaagtagcaaggatggagctacaggagcacagaaggattacacagcctcgagtgctcagacaatgccaatttagtgttacctaagcaaaaagttagggctttgggttggcaacagtagaggatgctaaagaggagtgcagtggacaggtccaaagggcttggacttaactatgacaacccaaattgttgctggtggaatgcaatacaagggaatatgcattttcctgcagcatcagttttgttatgatgtggagcataaaatcgtgcttttcactattaaatatttttactattaaaaataatgtagagcacaaaatcgtgctttttactatttaaatgcggatatactgtgaagaatgcaatagcatatgagattcataaaatacgacaggaaacgaatttccacagctaggcttatgatttagccagatagaacaggaaactacaagaaaatcccacagctgggcatgcagatggcttcggctctcacccctgaagactcggggggaggagttcacagtcttcagttctccgagtattgagggtaagatagctgaggaacaatgagtattaagtgtgcgagaaaagcgtttaggagttaagcacatggactgaagagaggctagggcgcaggcgactgggaacccgtcatcgtccctctgctctccggacctcttattcgaaaaacatcctccaccacgtgcccctttgtcgccagagacagcgcctgcagtgcgtgagctgccccctgaactcctggcgcctggttgcctgggcaaccctcttctggggcgcctccgcgacctcttaccattggtttagacgacgcagcgtgcgtctgacgtcattgcgcggcgcgaccaggttcaggggcgggccgcgcggagcctcatttccccaaacgcaggcgctcggtggcggtagccgcggttgttggccgaccgagtgccggtcataagccccccccggtggggggcagctggtgtgcggatcgcggcgggagagaggcgcggtaggaacgggtccccggagccgtgaaccgcgggtacagg

SEQ ID NO: 31718 - DNA, 2300 bp, Homo sapien
attcttttatcagttctaggagctttctggagaagtccttagggttttcaaggtaaacaatcatgtcatcaacaaacaatgacagtttgacttcctctttaccaatttggatgcccttgttttctttctcttgtctgattgctctggctaggatttctaatactatgttgaagaggagtggtgagagtgggcatccttatcttgtttccattctcagagggaatgctttcaacttttccccactcaatattatgttggctgtgggtgtgtcatagatggcttttattacattaaggtatgtgccttgtatgccaattttgctgagagttttaatcataaaggaatgttggattttgttgaatggttttcagcatctactgagatgatcgtgtgatttttgtttttaattctgtttatgtggtatatcacatttattgacttgcgtatgttaaaccatccctgcattcctggtttgaaacccacttgatcatggtggattatctttttgatatgttgttggattcagctagtgagtattttgttaaggattttaacatctatgttcatcaaggatatcagtctgtagtgttctcttttggttatgtcatttgctggttttgttattagggtgatgcttcatagaatgaattagggaggtttccttctttctctatctccttatatctttcttcagatgtccttccattctgagagtctaaggttctattttttttgtttgtttgattgtttgtttgagacagggtctcatgctgtcacccaaactggactgcagtggtgccatcactgctcactgcagcctcagcctcctgggctcaagcagtcctcccacctccgcctcccaagtagctgtgcaaaatatctgatttcattggaatccttagtgaacattatcagaggctatcttgtagttgcattttacatagggcacaaaactgattattattaaatgacaattccattgtttataactagtggttgttatatagaaacaaattccaggttggactatttgtgatcttctatgtttttctaactataccttaaaaatgctagagatgctggtgaggttgtagagaaaaagggaaacttttacactgttggtgggagtgtgaattagttcaaccattgtggaaggtagtgtggtgattcctcaaagacctagaggcagaaataccatttgacccagcaatctcattaccgggtatatacccaaaggaatataattcattctattataaagatacatgcctgcatatgttcattgcagcactattcacaataggaaagtcacagaatcaacctaaccgcccaccaatgatagactggataaagaaaatgtggtacatatacaccatggaatactatgcagccataaaaaggacagagatcattttatttgcaggcacatagatggagttggaagccattctctacagcaaactaatgcaggaacagaaaaccaaacactgcatgttctcacttgtaagtgggagctgattgatgagaacacatggacactgccagggaacaacacatgctgggcacctgttgggggagggagaggatcaggaagaacagctaatggatgctgggcttcatacctgggcgatgggatgatctgtgcagcaaaccaccatggcacatgtttacccatgtaacaaacctgcacatcctgcacatgtacctctgaacttaaacgttggggaaaaaagaaatatatgttactgttagatttatagagtaatatatattgctacttaaactttttgtttgacgtaatcatataatccactgattatctgaaataaattcctgtgctcttttttgttgtcttaaaacaatgctagggttgtaatatctacattaatgacaagaatatgcaaaaaaatcatatacaagtgttttagcttaatacgcttaaactgggaaatgtaaaggccttataggcattgtgagggtccttcctctgtggacagtcacagacattagcagacatgttcttccgttttcctttgttgctctgtgtaagcatcggtgagcagtggctggtcctaagactctttcttgttttcctccacagacagcgtggaagatgaactggagatggccaccgtcaggcatcggcctgaagcccttgagcttctggaagcccagagcaaatttaccaagaaagagcttcagatcctttacagaggatttaagaatgtaagaactttctttttgactttaccttcacacaattcccagaggagcattgagaaatgagaggaaaaggggga

SEQ ID NO: 31719 - DNA, 2300 bp, Homo sapien
gagaattgcttgaacctggaggttgcagtgaactgagatcgcgccactgcactccagcctgggcaacagagtgagactctgtcttgaaaaaaaaaaaaaaaaaaggctgcactgggatacagaagttgagagttggtgaacagctgacaaaactgagggaacagcacatatcctggcacggaggtttgaaatggcataaaggggaggagcagagtgcctgtgtagggagctaaagtaagaccctcatgtcctggaggagtttgcaaaggagagggtagttaaatcgttgcatccttccagaaatggaaatcagaagcaaaatatagggtgtgttttatgtaaaccagatttattttgcaagtttaaaagaaggggaacatcacacacgggggtctgtcagggggtgggggtcaaggggagggaaatattaaggacatttataacattttgtcaccccactctacacatacatgcggagcttaaaacctagatgatgggctgataggtgcaggaaaccaccagggcacatgtatacctatgtaacaaacctgcacgttcttcacatgtatcccagaacttaaagtaaaatttttaaaaagcttacttagatactaatctaggaaatgaatcaagtcttctttagatatccaaagtgaatttatttactcatttgccaggcatttattgaccttctgttacatgccagaccctcaaccagcagttgaatgagacatttcataccacataagtgtcaaggccagaggacggcctgctttgtgagttctaccaaaggcaaaaagggtagtgtggccaatagtggatggcccagaaagcagagagagtggctgcaaatgctgccagagactcagacagggccagatcatacttggcgtcctcgatagaaaaacaacatgaagcttttagagggcttttaatcagaggaatgatcttatttaatttgtgtatttactacttcattttgtcatcctactctacacacacacatgagttttagccagtggatactgttggtgggtgcaacatatgatttaggaaactaaatcagtaggcttgtggtcaggaatttttttataattccaagataagaactagaaaaggaacaagtgatacatttgccagattcctgttataaagatggtagaacctcgatttaaattgttttctgcgctgatgctttatatttgacaccttgcatgctgatctcggggaggctagttacctattaacatgacatccaagtgtctgagacctcagggtgggtaaattgatgctgacttggatagttggctcctgacatcaaaagttgtttcagcagtttgcaagctcacccgtccagccacttttgatttttcttgagtcatctccaggtatctgctgtcacacatactgctccgtctattcctgggttaatgtttgacaagcttgtctggcttcttccagaattagtctgtttgaaaaagttccattcattagcgtccacatgtaaaaaatgggaaagattgtcacatctctgggcatgtcagtatatgctaatgaagctgcatattaaggacatttattttctcattttcaggaaggcaaaggtactaacaggtgattgtggtgtgaatgatttatgtgaagcatctatctctgctataatcaaagatggggagcaatagcagaaaattgtcatgtgggcccttagcgctggtttgaatattgaaatttcaatccagttaactcttctagtgatacttgttttatccctgatctaagggccaaaaaaaaaaaaaaaaaaaccaccagatttttttggtggctttttttaatcttttgccgttcaatagatatattttacgattctgctttcacttgttcgtcattatcttcaaaacaacatttagaaataaaaacaaaactaaataagaagaaaacaaactttttttttcctttcgggggtcccaacccactgcctgtgattgcctgagtggatggctgcgtccctgatccttcctgcctggcttctctgataaaccctgcagcacgtcccttttctctctgcagacagcattaacagaactgatcctgtatcttctaggtttcctgtacgctcagaacagcaccaagcgcagcattaaagagcggctcatgaagctcttgccctgctcagctgccaaaacgtcgtctcctgctattcaaagcaagtttgtttttttgtttttttttttcctccgaaactcttgtttcgtttctttaggcctgcatgcattgccgttctctacaaagaatcagtatat

SEQ ID NO: 31720 - DNA, 2300 bp, Homo sapien
cagtagtgactatctagattagcaaggcatgatctctgccctctggcagcctaccctttaatggagagaatgtatacccatatggctatcatataatacatcataagtaggaaaagtaccgtaaaaacacaaaaaagagagatttgatccaattctggttgaagtttccatgaaagagttttaagagcttgacaggcagagatggtgtaagaaggtttttctaaatagatagagcaattttagcaaagtcctagaaatggaaaagcccagaatgagtttgggtgaaggaagctgagctgtcaggtagagtgtatcgacaggagtaagaccactgaggtgcaatcctcaaggaggtaccggatcacggagagaaaaggatgctcttcaaaggagcttcaactttgttctgtaggcaaatagggagccatggaaggtttctgattaagagaatgataagaggaggactgcacttcctccagattgattcctctggcaacccagcaaagtctgagtagagcatggagacacttgtgaaaagcacccgaggtggtagtgattgagcactcactcttttctaaaagtgtcactcattaattccctcaacagagtgatgagctaggtgctattatgcctctcttcatagatgaggacattaagacactgagatgttaagtaacttacctaaggtcacacagctagtaagagatcccagcagtctgtccctggagtttatattctaaacttatactccactgcctcaaaagccaaccccaagtgaaggatgccttcattctatcctgctctgcctttttgcctcatttcttttgctctcttcagtcctcagcttgttcatctatgaaataggagactttaattggctttctaagatgctgtctctctcttgtagtttttttaaattctgtatttcattgtggagctaatctatttgggcagtgttaggaggaaagaaaaagatgaaacagtttgtgcaagagagagacaaaaacttccgctttttttcagattttttttttttattctcaaacttttcctggctccaaatttacttacatcattatttataaaggatagaaggacacattaaatactgtatatattttggtgtattgaatggtatgaagtagtgcagaggaggtagctgctaaactctaagatactatgcaaatatgatgaatacttattagtttattattcccatgcttcaaaaagatatgatagttactactcaaaccagaatattagtgctcagtgactgagctttcggataaggtgactcatgggaaagaaagtcaatattgaaggactcccttaagcctcgttgcaatctgcactcagctagttgggacaaaatacacatttggattttccttactggtcaacaatgtttctgaaacagctgaatgcaagttgtcactccacctctcagcgttttcaggtttttctccgtatttcaaggtgcggtgctctgctccctgtctgcagcaggagtccagcccttccttgggttctcttgtttccaaggcaactggccggcccaacaaagccactggtggcggcggcgcggcgcgcagagtcccggggcgcagagccatctcctccgcgccgggcctcatgtttcctcgggacgttcctggtgacctcctgggtcctcgggtgatctgcgccgcgacttcatgcgtggctgtctctctgtgcaagagtgataatgaggaagccgataattccgacaggcccgactttatccggctgctacttctggcctctgctacagcagacaggatgaatgcattttctgtcactcacgccctttttctcagcctctccatctccatctagtctcttttcccttctctctctctctccctctctctcctctgtctctctctctctctctctctgtctctctctctctctctgtctctctctctctctctctctctctctctctctctctcatacgctctcctcctcccctttctccagcagtagccttcttaatgtagtttaatggctttacaaagaaagccaggcagaggagcacttctcagtggctgtggtcggaccatgacctagctgaccatgaacttggaagggcttgaaatgatagcagttctgatcgtcattgtgctttttgttaaattattggaacagtttgggctgattgaagcaggtttagaaggtaagggagtgctttttagtgacttctaaaaattctctgttttgcaatgaaaatgtcttaggtgaatgtaagaggcacctgaaatgagatcagagaaatg

SEQ ID NO: 31721 - DNA, 2300 bp, Homo sapien
ctcaggtcataaatctatgttactactttatgataatctgtcggtccttgttctcaaagttcaaagatgctgtgcttcttctttttttttttcctcctgtggttcaaaaagaagaaagcaatcccacttacagtgatttccaaatacgcattgaataaagcttaaaatactactgctataccagctttccataatttccatattataaagtaccatccagtgataaagtaccaaccacagtgttttggatttaatacttatggtttacagtttcccaaccacttaccattttcgtaaaattctttgaaatcaaaagtttaagaaaactattcaacaaacagaatgagctagacaggcagaaaactgtacctaaatccagtcagaaacagacagaaccttaggattgccctatcagagaggaaaggacagacaaccatggaaacctcatggaaagctttcttttataaaatatttctctaatttcatagcaaggtaaaagatcacctcttgctcattttcaaatgtgacatgataccataaatggcacatcatccttacttgaatgtttaaagctaatatgcaggtaatgtcaaagtcatagtgatgggactaaacatttgtaatctaaaggtgaagactgcgtgagaaacaccacagagctccgagttggcaaaagtcagatacagactctcaatgattattccttaaagaatatccaaagtcaccacaattcacattacctaaagattaaaatgcggatattaacaggaaattaacattaggatgttaacaatcctcttaatatctattaatatttgatgatgctctctaaaatcatttgattgtcagttactctcttaaaatggttttcccttattacactaacataattgtatatgcagtttagttaattatcgccaagactttactttcttaggtaaaatgttgctcaaattcatctctcagctttatatcagcacaagatcacctcttgctcattgtcaaatgtgacacgatatcataaatggcacatcatccttacatcatccttacttacagtgtgtgagtttctttactctttttttctctttatttagattaaagaaaacaaatataggtcagtatttgaaaaataaagctcacaacagttctttatgaccagaatcaaagtgtgtgtcctgttaaccaagatttgtctctcagaagtttgatgatctgttaaaaaatatatatattatcagtgtcaagtattttagtcccacctgtcactaatttaatgacggcattgcctaggaatttcatgagcaacaaaactgttgatttagcctcataattttggaacatattaaaaatattttcttgctatcaacacttagatttaaatagaatttctatttcaatcatgaaaatttttaaacattgaaatccactgcaatgaaacaaatatgaaacctcacatggacattttactcttcagctgttttcatattttgctcacattttgcaaggaacccagagatccaaaagaaatatccttaactctttcccggccaagccctatgatcaaacacatgggaaataatctatggattacaataatcaaacagttctagagaatttctaaatatctgcaggaagaaaatctgtgtgcttttcaagtaaactgcagcaatcaggaaagaagagaaaaaccccttgcacaatcatgtatttaaaaaaaaaatctttctactctgcagatactgtttcctgaaatttaccaagaacactgccttgaagagataaaaaaaatacatccatagaagtcagttctacccccaaaagagctgcactgcacacatttttagaaacataaatctcagcaaatacagttgcattttattgacaacattaaaaataatcacaacaaagaaatagcctttcctattccatttcaacttcattaccatgctctactagcctctactaaaaaaaaaaaaaaaaaaaaaaaaagtcattacctgtatgaagagaacctgttaatagtctgagaaggtactgggcaaatttcagtatttcacgtttacaccgctttctacagccactcatcttaagcaacaaggtattcctctgaggagagccagaagtctttgccaataataataataataataataaaaagagagtctctgaggagaaacttctgtctcagtttatgcacaggctgccttacaactcctgtggaattagctgttagcgcctcaatcagaaattcctttaaaatgctagagaagccagatacagctacaacagtaacaggg

SEQ ID NO: 31722 - DNA, 2300 bp, Homo sapien
aaagagactgaaatctaaatcccttaccccagctataaggcttcacatactgtagccccggactttatccatgaaaatgtctcccagaagtctctcctggctcagcatgtttcagcagccacacccttctctctgttccttaaggatgccaagctcattcgcagcttggcgtatttgcataagctgtttcctccacccaaggtgccctttaccctaaacatctcacggtcagttccttcttgtaatttaaactcctacttaacttcttttcttagagacctctttcctgacctctcaacctactcactttctattctgccagctggttttaatgttctctcctggttcaacagcacttactcatatgggatatgttcttatttattatttgataacctgatgttttctttgtttaggtgtaagctgcatgagaacagaggctttgcctttctcagttaccactgttttcccagcacatagaaccatgtctggaacataataggtgttcagtatagaattgctacatctatgaataaaagtgctgtgcttaaggttgtccattccctatcttattttactctccaacaagtaaataaaatatgcattctattcccacttttgtagataaggaaatggggtgttcaactaattaaaccaactgttgaactacaattgtgtatttcttctgcctatttcaaacttagggatgccatcactcatggtaaatgtgtaggagaaagaacttcagaaagcacgttgctgatttttgtgtatgagtctatttatatcttaaataatttcaattaaagttctgaaaattcctagaatgcatgctttgttattccatttaaatggttagaatggttagaaccctgagactggtgggaatggggaagagttctagaagagaatgagtttccattcaatgtgtttcagtctatgagtccaggagttctttctttagtgtagaagaacataatttcttatgtagtactgttgggaattatcagtttcaactagaattattgcaactgtcagaaaaagaagccaaaaggcctgtctaggtatttaaaatatggccccatctgtgctaaatctcacagatataatatttatatttattcagaataaacaaaaataaacaaactctaggagtataaattaagagtgtagacaaatcccgaaaactgcctaaggcacttaagaattcaggaaaaccactttttcagagaaggcaagcctgtagttttctggctttcacagcaactgcctctatcccaatgtcttaaaaggaaagtactttgtgaaaattgcaaatccttgcaattgttctggctattaactttaaaaaagttgattggtagggagatggttgtgtttgcctttttgaaatatgaagaaactgaggcacttctttctcttaggacaacgcagtaaattagttttggagctctgttgcctggaggcaatgtaaagggcttaagatttctggtttctaggctactgtgttttaaaggagacaattatgtatcctaatttccaaatacctgagcccgcgctgtgcagaaaatgtagccagttttaagaaacagcttgttttctccctctaagcccatgaagaagaatacatttatccctgacaaaatagcattgtccccatttggtggtaaatcgtcaagtctgtttagaatcagggtcagcttctcaaatgagcctttcccccatgtagccttcctgaatctgattaacactgtgtcaagggagttgtctgatgtctgaccttgagcagcatgcttccctctccccacctcctttttttgggaatcattcattttgtacagcctcgggccctgagattcctccccagcaggctggagtgcactcgcaggttccctttattggtatcggaagggtttcagacccagtgacctgtcatctgtcttctcacctgcttacatgctgattcactgatgagctggcatcgcaggccccgcctccctctgaatggtctgtgaggttgcaactgcttctggagaggggatgccgagccgaaccagagctgggttactacaagtgtgaaccggcagcctgtctgttgccacagaagaacttggtcaccacactgagaagccgtgttttctcacctccctgttactgttgtagctgtatctggcttctctagcattttaaaggaatttctgattgaggcgctaacagctaattccacaggagttgtaaggcagcctgtgcataaactgagacagaagtttctcctcagagactctctttttattattatt

SEQ ID NO: 31723 - DNA, 2300 bp, Homo sapien
gatatgaagtccacagtctggatggttcaagtgttcaagtgagatgaacttgcttactggccagggctcaggaagggtgtagctggaagggtgagattttccactcccattttgcttgataaatcttccatagaggggaaaattcatggaggcagagagtatagagatattacagatgaaggtgttttaaagagtgagactgcaggatatttggtaaacagcctcgggttcctgttaggtggacatacaggtattagtccattttcatgctgctgataaagatatacccgagactgggaagaaaaatgtttaatggactcacagttccacacggctggggaggcctcacaatcatggcagaggatgaaaggcacttcttacatggtggtggcaagagagaatgaaagcagaaaccccttataaaaccatcagatctcgtggtgctctggtagtgcaccagagcagtctgggggaaacagcccccatgattcaactatctctcaccaggtccctccctcaacacatgggaattatggagagtacaagtcaagatgagatttgggtggagacacagagcccaaccatatcaatacatctagatggagttccaccaacttttgtttggtaatagctttattgaggtataatttacataccatgaagtccacccattgcaaatgtaatatccagtgattctgtatagatttctagagtagtgcaaccattaccacatgtggatgttcaaaaggctgtatgtccttctgccttctcagccctctgttctgcaatgagagtgaactctcacagtgagatcctaatctctacctcttaaaccagtgaaggaatatttttaatttgtggtctttttcttctccattgaattgtagtcatttctctgttgtcaggtaaacattataaatttgttcttagctttgtataaatttgttcttagcgttctaacatttcaggtttcaatatattgtttgttagtgagtggaatggcagtggaatgtgacagaatgaaattgtatgtttaggaatgtaagtgcctgtgtggagggagataataaagttttcattaagtcacaaaattctataacttagttttccttttatatttatgataacatatctataggctgttatatgaatattcaagtaaattttgaatatcttagaattataggtttttaaagtggcagtggtttaaagtcattttctggtctaatttgagcaggtgaaatgttatcccccaaacatgaagcagctgatgctaagagtggctaaatttattcattcaggttttcatcaattatttgatgaatgacttctacaaccaagtcacaggattatttattagtgaggaaaaagaaaaagtgaaatttctgtggtcaactgagctggcttggttgtaactgctaattcagtgtttgttcatcaaatatataatttcacagaatatctacatcacacaaggtcactgtatgatcatgatggagtgagacaaaaacaagaccactctataatcatgtctgatcacaaacaaaacaagaacacaacccaagccatgaaaatgaccatgtgtgctcagctaacatgactgctgtttctttaccatcattttagccttgcattgtccttcttgccttctaaatgaaaactactaagatacccagtcatagaattggccttgcttttcagcattcaacagaaaaatccaattcacagtccccagttgagaggaaaattagatttgtctgaatcttccacaaaatcttctaacacaaagccaaatcttgtaccaagcccctcttaataacctctactgagacctttccttcatggttccacgtggttgctttctcccttgttgcaatgagcctggctttgtttgactgctgatctattccccgtgatctttgcctggagatcaagtactttatgtttggaggtaaaatggatataaagagactttgtctcagttctcatggagcttttattctgttcagagagacagacataagtaagataatttgctaattagtagaaaattgccaatgaaatcagtgctctggagacaggaattgcctgtttgtataacaggggtctggaagcttcactggggaagtgtctattgaactgagaggtaagaaggacagacaaggggaaaggtgggaagggcaaagggaaaggacctgagacagcagatagggtagcattttggagacattgagagaagaccagtagcaatagagggcagggtaatggtgggggttgggcaggtgaggtccagtgttaga

SEQ ID NO: 31724 - DNA, 2300 bp, Homo sapien
ttatcaacttgggaattactgaattcttttgctgtgcataaagattattgaagagcagcatctactcccttagaattttcacatctagtattctttctttatattgttaaaataattttaataatgatctaaattggatataaattcaggtaattattgccatcattttgtataagtactgtcgtatctggtactagttgtctctgacagcaaaataaaacatgatgatcaatattttggattgatttttttctgctgggacgatgtgagcatacactgattagagctgatttttgctgctgatcagtctctatgaggcaaaatttcaataattgttttgtttttaggtgactttcttctctgatgtccagactgatttgcagattgcaaagatccactcttataatagaaagagatgccattagattagaaaaaaagccacttatcacaggaattacgtgctaacacagtggttcaccttaatgttctctctttataatgccccctttcaagatgtgcataattgatattgccataagcactctcctattctttttgcacagctaaaagaatagagtggattagaatacagagtaaagtctcaggattgcacaacagaattaatcctgttctatgtcataaaatattgcattcattagaaatgaatattttcattgcaaatgaactgagaccggcaggtagacggagtgattccttttattttgtttctcttagaaggaatgattccaacaaatggtaaaaatacaactaaggtttggcatgtgccaatcacctatttcacaatgtattttttagaggaaaacacacacacacacacacacacacacacacacatatatgtatatcacaaagtaacccttttctcttgtggcagtatctccttaggtcccattcatttttagaacccacatgtattcttagcaccctgtgatacttgctaccagagtgaacatattttcccagccacaacctgattgcatgttctggattatactcatattctccagaaataatttaaggattgagttcaataatcgtgctcccgaggtgggtgccatctgaaatctaacccataatgtttacctgcggtgatgatcaagaacctctcttgagagaattaggcccttagggatattttagagcaacgtttagattttttaaataacaaaaatcatgatcaagaacatctgttgaaagaattaggcctttatggatattttagagcaatgtttagattttttaaataacaaaaatgctaatgagaatgatgatggattctgcttgttgagtgctttttgtcttcataaatttccatgagaaaggtgttaatgtgtccattttatgaattagtcatctgacactcagaacacctaaataacttgctggaggtcacacagctgggtgagcgacggagccagaatttgacctcagcactgcctgattatgaagctgtgtgttctgtctgctttcagctgctgcctcttatttccagttccaaggtcagtctaaaacagtcctcccaaacacccacatatgttgaatccttatgctgaaggcaggtggtgccatgggcttttcagggtgagtggtttatttttcaagaagcacagagaattaattcattaagtggaacttgagaggctactcaaatatctgagctgctgagaagttcaacctttttaattatctggagtgagacttcccacaatgttaaaccttcagaatggtgccagactcagaagctcctctgcagtgattctgaattgacagaatacagtcaaatagccaagatgaagtcaagatctgaacattccaaccagcgtgttgcaatggttctgccacacaggaaaaaggaaaggcgggcttttgttgctagtgaagggataatgaccaattaaaaaaataaaactgagcaaagagagacaaagaaggaaatgagacagggaaagagagaacatagagatgagcataaaaattgcagagaaagtgagtaaatgtagtgtcagaaaagataaaaaaaggtgaaatattttgtgtaagggatgacaacagggtgtcaagtgacagctattctaagagcacaaaagaaacctgagactaaagaaagaaatcatttttgtgattaagagaaggattaggaaacaaaaaacaatttaattattacagataatattgctaagtattttcgttacacatatgaagtacttctgcgtgtgatatttcatttaatcccctcacaatattcctgcgtaattggttaagtggatatttcagacttt

SEQ ID NO: 31725 - DNA, 2300 bp, Homo sapien
ggaagaatgcattggctgtaaaagtatgcagacaaaattcaataaacatttacactgcacatgatcccatcctctctgactctctctcctgttaccctttccttctctcaatgtacttcagccctgtcaacctcctggctgccctgcaaacatgctattcttatgttagctcttgctcttctctctgcttggaagttctttttcccttgagatgcccatggctagctcctcgctttcatcaggattccaattaaatgttgcctctttcataaagcccttatggaccccctatataaaagtgatctccctagcagatcacttctgattccttgatttattgtcagtctctctgccttctagatagtcagccaataactgagggtctttgttgtattcactgtggtatcccagtgcctataattgtgtcttgtacacagtagttactagatgtttgctgaataatgaaaaaacaaatgtttagtgaagaccaactatgtgcaaggaacttttctaattgctttgtcaatataacattgttctcaacttcaagaatcagggttgcctgtctttatacagtgattgctacatgccagtcacggctctaagccctttgcatctattgattttcttaaatcctcacaacaaaacaataatgtaggtaccagttatagctgatatttgtaccaggccacaggattatgaagtagtggaactaggatttgaacccagacaatggggtgtcagcatctgtctccttaacaatgaactaaaagagtaaaaggctctcaagaaatatacaaatacatgctacaagggctcaaaggactaagtaaatcgctcgtgcgtttgggggtggggagaagggcaataaggtgtcaattgagacctacttggagaaagggggaagatttcacttggtgacagtgtgtataaataatccagcagccatagggaaggcaaatagtttcacaaacacttagaaatggcttccacccaagtcatggccaactgaccttgcagctgagagtgagagggaattttaattcagtttgcctggagaacgggtcaacttgacctttcttctgaaaagagaggcttcatgcacttgactcttggggacacagaaatctgcattttaattttgacttctcaaacagtaaccatggccacaagtggtctattggtttctctttaccttcccaactattcccggccttactgtgctttagaagggcaaatgaccttgcgggtggtgagcgatacctcctggttgacctgcctgggagatctcaaatgaaaccccccacatggatgcttctccaaaatgccaccagtctatgccaccccctctctccaaggtggtattctgcacctcggccctgcgatgttcacctggagtctagagccagtgtttccccacacttagccgagtcgcatgaccggttctagcttcaatgggggaaagtttcccgtctaggagttctggcgctctgcccggctccggagaagggcatctccttgcgcttcctctctggtgtccttcgaactcagcctaactttgtgcagcagtatttccagtctagctgtccaagttggagcccctgggggacgcagcggcgcgttgagaaggcgcggcgccttcgagcccctccccagagcaggcgctgctcgcagtgacaaggggtcctagaggcgcccgctgagagccgctggcaactcccgggggtgtcctgcccagcccgaagtcacctcgggtctctttcgggtccatctactctgtcgccagaggcaccgtgccacccgcggcgctttcctctccccgcaccccgccccccgcatccccagtccggtgacttggcagcaggtggcaggggcggcgctcacgagggcgaggggctggggtccccgcactcgagccgcccgtgcagcccgcccgcttccagccgccggcgcgaagctgccggcgcctcggcctcccccgccaccccgcgcgcccccgccgccaagggccgcgcagcgcccccggcgccccccgccggcctccgcccgcacctgcagcccgctccgcgcgccctgcccgcagccgccgccgaagctctcgctcccagcgccacggacgcccccgggccgagcggcggtgcgctcccgtgcagacccgtggacagacgcccctggccggtggactctcgagtctcgcttctgcaccctgcgtccctagacatgaatgtgaggagggtggaaagcatttcggctcagctggaggaggccagctctacaggcggtaggatgcaataagcttg

SEQ ID NO: 31726 - DNA, 2300 bp, Homo sapien
catttccaactcactcacagtgggccatcttttgatccatgtttcagctaatcgagcaaatcaactattggaaccttttttaactccctgagctacaacattaaatgcagaatccctgtttagtaggcccatgtcaataaattcagcctgatctaactttatgtctttccaccattatcccacacccttaataccattcccattcctgttctccagatttctgcttatataaattagaaaactcaagcagttcttttggcatgtagcacactgcctcgtgggtcacactctgaacctcacctttaggggcctgtcaggactttagttataggtctagaagcaaacaggggtgttgggggtgggtcttgaggagaatcaacattgttttgcctggcaactgcctcaggggaggccatcactgttgtgtcaggaagtgaagggtttatctcaaacaaaggtggaaaggctgggttggggaggggaggggaggtggtgtgggtgggaggctgtttccctggcaaaaaaaggctcatcagaatttaggagctgagtgcttctggcctcatcagggtcctcccacatgtccccattccaagttgcagagtcccattttttttcaatcaatgccgtcaccttaacagtagacacctgacaagtctgtgcatgcatcttttattgcaggtcagccattcacaggataagagcttgttctgattttccacaatttcagctctttccctacaggaggtaagactctcactcagggcaatattaaaagatttgagggtcagtatgggcttctggagctgagagacagaatctcggagttaaatgtttcctttcatcactttggctagtgaacttaggagcaaccaaccaaccaacttcattatattccttggttcccacatatggtcaaagatattatatatagaatcactaaattccttgcctgtcatgagtggtgaatcagaagtatcaaatgcatttattttgcttaactgtctaaacaattcatgccaaagactctccgtgttctccatactagtagaagtagagtccttagcattttggggtctagtcatattaagcaaccaactccagaaacccccagaccaactaaagaacttcatccttaaaatttttttcctctagaaccactcctgataccaaaatctgtgttaatcagggttctctagagggacaggactaataaggtgtgtgtgtatatatatacatgatccatgatggatcatgtatacagatcctctatgtgtgtgtgtgtgtgtgtgtgtgtgtgtgtgtatacaggtttgaacagtgtggatccatttttatctggattttcttctgcctctgccatccctgagacagcaagactattccctcctcctcctcgttctcctccttctcagcctcctcaacatgaaggcagtgaggatgaagacgtttaggatgatccacttccaatcttccaattaatcaatagtaaacatatttatcttccttatgatttttcttaataacactttcttttctctaccttactttattgtaagaacatagcatataatacatgtaacatacaaaatatgtgtaaatcaactgtttatgttatcagtaatgcttctggtcaacagtaggcttttagtagttaagtgttgggaaggccaaaagttacatgtagatttttgactgcacgggggtttggtgcccctaaccaccaaattattcaagggtcaactgtatttttgttgtttaagccacacagtctttgatactttattatggcagctgtggaggaagagttaaaatattatatttgaactcaattgaacgtgggcacaaacaacggtcaccaagtcccggcacaggttgtgtgagcttcttgaggcgtttatccagtgctgttttggagaaatctctatttcaatctattctcatactttagttattgaagaacaatagacactggcaaaaacaagttgatctttttgtgttccttgagcccagtcatgaagggccctcatgactgggcctcatgccaaacaactcgttacaaaaagagctagagtcccagactgtgccgaagcttcatgagacctctcctcgtctgcacggatgagtggccaactcaggagccaaggctgttgcttcccagtctggtggtgaatcttccatattctggtgagtgtaaatatatatatatatctgatttcccttctccccttcccattgcaatttgcttattatattaatttgcttattctatcatttgcttattatatctgaattgccat

SEQ ID NO: 31727 - DNA, 2300 bp, Homo sapien
gttcaagcagtatcatgcctcagcctcctaagtagctgggattataggcaagcaccactatgtgtggctaatttttgtatttttagtagagacggggttacattacgttggccaggctgatctcgaactcctgatctcaagctatccacccgcctcagcctcccaaaagtgctgggattacaggcgtgagccaccgcacctggctaggtcactgtgtttgtaatgtaagtcagtggagtttccctctcagattcatgacctcagttgagactagcttgtcatatttatgtccacctccgccatttagatccattttaaatctcatcctttagccatgcttattaatcagctgaaagaacttcccccctttctctgaactgcattcgtttttctgacaacccaagggtacaataaaggtcatagtaggaatttgcataccatctctatgtgtaaacaaagttccaggagatgatacatctatgtataataagtaaaatgatatggcttcacaggtgcctcaaaatgacagatttctttcaaccaaggtttcatgtgttgggcctaatgactgctgcttgtcagaagatctggtggttgtttacatgtgtctttgactagcaaaaaattagaatacacattattaacaaataagttgaattaaaaagacttttcactgtgtttacattgtgaggcaaaaactaatacaaagattctttatgcttgaaaagtttgggaaccactaattattttctctcacatgcataagacttgccaaattttactttactttttgtatttttaaatttgtatcttatttcctaatagattgtaagcatcgtgcatcaaaatttcatactttaaagaaaaagacatccatatgtgatacgtagaatggtgccttgcctgtgggataggcatatacttaatcatccttaaaggagggagatgccatgttgtccctagaatttacggtaaatcctgtcactctgctggatgtgaaggtgtggctccttgtcacttctcacgcccactctgtcctccagcgagtgggcctggtggctgtctgtattgacaggttgtatgttttggtggttccccttggttcacttttgttcctgaattcctttaaaactctagggcaggtgccatatttttcagatgatttttctgacctaatttgcttttcagatgatttttctgacctaatttgctttttttttttttttttttttttttggagactgagtcttgctctgttgtccaggctggagtgctgtggcacaatcttggctcactgcaacctctgcctccctaagttcaagcaattctcttcccacagcctcctgagtcgctaggactacaggtgtgtgccaccatgccaggctaattttttgtatttttagtagagatggagcttcaccatgttgaccaggctaatttgatttttaaatctgtccatttcctactatttaaattaacatctgtcttccttttctgaagaaacagctttggagagtgtgtaaagcttttattggtgaaacttaatgcaaagagttaatgatcttcctgtgaaagaaataggtaaatatggccagatgtgtcgagtgcatttcccaaactaatatttagctctcattcttcctgtaagatgagcatttagagggtccactgatttctctagctgaattttttttcaggatgcttccatttttagcttgttgtttccttcgaagtgctccttaaattatttttaattgacttcttagacctgatcttctgtacttcatgacttcttcttttccttttttttggtctcccttccattttaggacatccttttcattccagggtctgtctttctttttttttttttattctgccagttatctacacagtgattttgtttaggaagaacctgggctttctggtttggctaatgcatagtgttttgtgtttgaaaagtctttgaaagtgcttttcctttgtgctataaatcgttcataactcctgtttgattgacttttcaagtattcacccaatattgctctggaagcttatgtcatcaagtctactggcttcacggggatgacctgtaccgtgttccagaaagtggcagcctctgatcgtacaggactttcggattatgggaggcgggatccagagggaaacctggataagcagctgagctttaagtgcaatgtttcaaatacattttcgagtctggcactaaaggtatgttacattctgcaatcatttaagactatttacagttaaattagaatgctccaaatgttctgctt

SEQ ID NO: 31728 - DNA, 2300 bp, Homo sapien
gaacagtattgtgcttgccaccagaaatgtaacccaatataaaacaaaagtgctatttaattttattcactataatctctaagttgtatttgcatgttacagggaattccagactgagtatcttttgtgtgactgtaacatactgtggatgcatcgctgggtaaaggagaagaacatcacggtacgggataccaggtgtgtttatcctaagtcactgcaggcccaaccagtcacaggcgtgaagcaggagctgttgacatgcggtaagggagaaatccaaactgagaaagcatttaccatattttgacttgctaccatgtttttcttgacaaattgtaagattctctttatacttggacagaactagtatgcagccagtaatcattatggatttgataatatttagtttatgccaacgattaagccagctagattaaatgaccttttttttttcagttgtctttaaggtagctgtttttaggttcacatcagctttctttatgcaaaccaatttcaaagaatagattttcagattttccatcagttggcaactcgtgaatttgtctgtagtaacacaatctcaggatgcccacatcctgtgtgtgggtgggaatgtgaacgatacagcctttttgaagcaacatgtttcagtgttcttaaaagactgatacaggcagggcgcggtggctcacacctgtaatcccagtggatcacttgaggtcaggagtttgagactagcctggctaacatggtgaaaccctgtctctactaaaaatacaaaaattagctgagcatggtggcaggtgactgtaatttcagctactcgagaggctgaggcaggagaattgcttaaacccaggaggtggaggtttcagtgagccgagatcgtgccattgcactacagcctgggtgacaaaagtgaaactccatctcaaaaaaaaaataactgatacagttagatctagtaattctgtatcttatagttaattcttaggaaatgatcagctttgtatgtaaatcttcagactctgtgtataagcatatcctaaattctcaaaaataggggattggtttaattacttgtgacatatccattcagtgaatgcagctattgaaaatcatgattttgaagaatatctggggaaaggagggaaataacatatttgccacgtgttaaatgaaaaagaaacaaaaacaaaaacaaaaaacaaaaaagcacacctacacacacaaccccataaaacaaaaacagtcctaaagtgatggggggaggtcccagtttagtctttgtttggaaataagctatcatatttttttccttttctctttattattattgttgtatcacaagtaaaatatgctcactgaatgaaaattaagatttgtgcaaataaataaaagaagcagagaaacaaagaccatgtttatgttcatgactgaaaatagctagtgttaagacctttttgtatcatcttctacgacttttttctattttttaaccaaaatatcgttacactctaatgatattttataaccttttttaagttgaattaatgtaaatgtattttctcatttaaaatagatgcatatcaattcattgtatagatgaagccatagtttaacaacttctctattacagcatatttagctcgttaataatttcttgcttcataaataatggaaggactaatttctttgtatgcatttttgcatattttctattattctttaggatacagtactactaaaagtagaattgtcatgttagaaaaatggactacatatttagaagtcttttaatgaactagtgtcatttgtgtacatttttgtacatatatttaaaatattttatttttctgactgaaaggaaaaaactgattaaaaactgtttacggtatatgggatcttaacatactgtttttttctgttttctttaaatgttctgatttttctggagtgaacatgcattagttttacagccaaaaactcgtgttgtaatcaaaggtattgcagtctccaaagtgtattttaaagttgtaaatatcaacatttacttatcactgatgccattttctagagcacagcttgttcttttagttcatttctgtaatcatctgatactcttaggatgccactgaagaggaataactctaaatgtcagaactggttatgaaattgtttctttttaattttgttttaatctgttatcactaaactcagtagcagcctggttgatactagcagtagcatgctgattattgaggaatatttgttgttctgtttttattattttacctaga

SEQ ID NO: 31729 - DNA, 2300 bp, Homo sapien
catattactctaatctatatttagagtaagtaaactggtaattgtttctttttgacttttttttcaaatcataaaatgttgccttgtttgactaattaaatttccaaagtataaaataacccttcctatgaagaatttgtaagaatattttatactttaggaatttaattttatcctgtaaacccccccccccacttaaaatcaaacttacagcttattactgatgtttctagggatattcatttagaatgcttactttatgaaatcagtttaagttctgatttacagtttcttgtagctttagaattggttgattttttttcccccagttttgttaactgagagattgcatagaagttattttgaaagtaactattttcagataaaccttaacatatctcagactataaattatcctaagcttattggaattacagttaaatataatgttgttcaggttttcattgtgagtaatttatgggattgagtgtctttcttccagggaaagagtttttctctcctgattcctctcttccctgtactctgacttctcctctcatctctgttcctttcctgcacccgtcatttaaatctcatttaggagtcttccttgggatgtagctaatagctattaggagccccaaccagctcctcaccatcatagcaggcatgtgtgtgtacttctggagtcactttggctcacactccatactccatcttgtttctctttttggcacccttaccattcttatccagaagactacctttgagcagaaacatctccttttggcttatttagtgggctcaggtcaaccatttctgcaaagattaggaaataaaaaagacaaaagctagtctggcttttgagaccctgggtagcaggaacgtgggaagtattttcatcccccaaatgggggaaattgccagtgtttttacctggtagtgttaggaactgaccataaagtggtgcttaggaattaggagtctgtcacgtcctccttctggtattatttaaatttattttctgtgctgtattacatcagatcctttttcttttttccttattcttttttgccaaaactactgaggtgaaccctgagccaacactctagctgtgttagaagcacacacacttaaacattattgcactttgttgatttatttttatagaacatgttgcattctattttagttatgtttacattttgattcttctattatatgatgccctccatgttggcatgaacagggtcctgcattcattgttattagctggacttagcaaatgtgtggcacatgaatagtcagtgcttagtaattatagtatttaagagattttgtgcttatatctcagctttgtttatcctttcttcttcttgcacccaagtgccaaattataaagctttttgcctcatataaagacatttctttactatcttttatatcaaagctgaggtattcttatttgtatgcttttgatttgttgggtctttatctcttacatttgtaaatatctatagtgtcacttggcacatagcaggaggggtcagaaacagtccctaccctagggaagttcacagtctagttagacatacagaatatagccataaaacaatctgtattgctttaggttgctgtttgattgccagaatcagcagagttggtaggcatttaggccaagaatgtggcaatgatggtggaaaattggggatggcttcaagattcaatattaatgccacacactgcatgataaatgggtagaagttcgatagacaaaaaggaatgggatttggtattccagaactctggtgttcagtggcttgttgcatagaagagggatatctgccaaagagtctttgtttgcctacaaaatttcatccaaagcagaaacccgggatcagcaagaacagtgttggggtccaacactctgcaattcagctccttggagagaaactgtagctagttgatgaaatgtactttaggcatggtatgggtgaacagtattgtgcttgccaccagaaatgtaacccaatataaaacaaaagtgctatttaattttattcactataatctctaagttgtatttgcatgttacagggaattccagactgagtatcttttgtgtgactgtaacatactgtggatgcatcgctgggtaaaggagaagaacatcacggtacgggataccaggtgtgtttatcctaagtcactgcaggcccaaccagtcacaggcgtgaagcaggagctgttgacatgcggtaagggagaaatccaaactgagaaagcatttaccatatttt

SEQ ID NO: 31730 - DNA, 2300 bp, Homo sapien
tatctctatgctgagatatagtttgaagaaaacctattgttaataaaaagcagtttcttcagtatgttttagatactgcagactatcttaatgctgattttatctctatgctgagatatactttgaagaaaacctattgttaataaaaagcagtttcttcagtatgttttagattctgcagactatcttagattctccatctagttatttatctttcagtaaataatctctcaagcactgccatccaaaatgaattttaaaaattctcattcaggagtatttaatataattactgatattgtaccaggcattgccttagtagtctttcactgtgttacacgttaagtagtctcttgtgttcttgcttaggaaggtaattgccatttataatattcttcccactagaagatacattcttaattccaaacagatgacttataattaacttagggtacacagcttgcaagctgaagaagtcctgtatgtaaactcaacgggatataaagatatttgacagtagtgatgtttgctagttgctcatagatacagaccgtttttcttatgggttcttaagtcattaatttcagttgtgcatctcccttaacaagaacacataaagtatttttgttattaaaccatgcctttgcctttagtttataaataatttgatttaggaagttgaagtggctttctgaagaatatactatcagaagtaggtgaaccctagatccatcagtttctcttgttttatcaacgaatttaagttgattctcaatccaaataacaacccattatcaatatctaaataccattttaagtaggtatagctgtaatgaaattgtttcccagagaatcaatggtgattgcaccacttaaagctcagaattgagacaagattataaatagagcctagatatgcttgtttatgcaacaatttacaagaagatgcctaatttttgttaacagtgaaacccagaattaaaaggaaaatcaactgggatttaaaagaaaaagtcccacgtgattaaatacttaggagctacagaaaaacgaggacagataaagacttatattgcttaagattcttttatcaaatgttgccataacagagggaaggcagaactatgaaattattgaaattaggattacctaaggtgctgtattaggcctctccagagagagaggaccagtaggatgtatgagaggggatttattagggggaattggcttacatgatcacagagggagagaggtcccacaataggctttctgtaagctggagggcctatgaatcctgtagcatagctcaatcaaagtctggaagccttagaactggagaagctgaccttgcagtccccagtccaaggccgaaggcatgaaagccccaggaagcccactgatgcaagttccagagtccaaaagacaaagaacctgtagcctgatgtccaacaacaggaggagaagacatcctgctgtggaaggggagagagagagcagagagagacaagccctctcttttgcctgtttgtcccagcagggccccagctgactggatggtgcccacccatactgagggcaggtccttcctgtctctgtccactgactcccgcaccaatctcccctggaaacgccctcacagacacacccaaaccaatgcttcaccagccattgaggcctctcaatccagcgaagttgacacctaaaattaaaccatctcattttaacttttgaaatagtcaaggaaaaaaaacaaacgagttaggtacctgattcaaacattatgttcttagaatttctggtgagactactacatgaccaagtacacagtttggaatccaatacttttagtttgaaatggatggtgcagatcgccttactgaagagtaactcgaagaatgcgtacctctctatgacagagaataatagggacattggaggcaatatgatgaaaatatttttgaaagtttgacttagggagcttattctaattattctgtcagaattcaaagtgtgatgaattattccaagtctagcaactaataaaacttaagattcattgttttagggttttcttgcatagggctaagtccactgaaaacaatgatgcgagtcatgccatgccaggtgtaagttacagatattgtcagtggttatctcccaacataaagtttttacttttaaaccagtgcaggtgtctgattaaatgtaaaaataaaattgtgttcattgtccttgatgtcaagcaaagtaaataaagagggatagaacaaaatattaactaaaacttttacataggtaaa

SEQ ID NO: 31731 - DNA, 2300 bp, Homo sapien
catgtgaccaggtgtggaattttgcacttgaggtattacttgtcggaactcaaaaagttttggattttggagcatttcaggttttggatttttggattagggatgctcaatgctcaatctgtagtaaggttttatcttaatcaaaaaacagatcattattttgttagggaataataattcttcagataaattcaagagaaatgtgatccatttcacccaccttaacacagaggcaccagtgtgcctgctaaggttatttatagatccgaagtcacttaatggtgcagataatctcccactttttcttcccatcatagtgtctgggcttatgttgttcaacaccaacagggtagccactgggcatttaaattcaaatgtaaattaattaaaatgaaatgaaaaatttaattcttattgcacactatctacattccacacactatgtagccacagttggccaccatattagacagcaaagaactagaacagctatacaatcacagaatgtattattagacagcactggacatggttgggttggtcaaatgaactgctattcaaatttaatacaacactgataaatgataaatggagaccatttatttacttcccattgagaaagctctagccagataaacagattcctgcaaattggtccctaagataaattttgtaggggccagaggcagtagtgtccttagacccaagcaagaaaaaccgtgttctaggccctccattttagaggacaccaacctgactcttcttatggggtgaaaaatctccaggccagcacccaaagcctgggtacccactatgtccccaagacccaggaccctggaattccctgactggtattaccaaagccacttcttggccctgagctagcttcttctgagaactgtcctcccaatgaaggacccaacaactggtataggcacacctgagatccagacgcagacagagggtggctgttagaaagtgtgaacagaacttggttttgtgggctgcggtgttcacacacaggtacaaaaaatcccctcttgtccttgaagatagctgggcacaggaagcaaagacggtgaaggtgtacaggccaaaggtttggatctgactctttcccacctgccatgtttcagggagaaactccaaggtgtctgagaatcctgcttacaaaccttccaggttgttatgaaggtaatttctcaaggcaggagcacagaatatattttattagcatgatatagtccttgtaaaattttaaacatagggtaggtaagccctgggcttgcaaatgttagggcgaggctggaagtcagagtaatcaattctgttggggtttcttggagggtttgctcattattgctcgaactggtgaacatctcaagtatctttgcctgtcgaatttctttcaaaaggctgcctttctagtgaggtccagatgcatcctttagagaccatcgctgttgttgctgaaggccagaaacagcttcagattgttcactgtattgaagaggaacctgtttactggctccagtgtatttgggacaaataagactaccataatgaggtgagaaggcgattccttccgaaacacttggttttgggtacttttcccatagggttggtcagggaaattccctactctcgtccctactccatcctccgggccaggctccttgggccacatgggcagtctccaggagcgcacaagactgctttgtcctgtgcccgcggtgcgagcgcggtggcggcgaagggaaacgagcaggagagtggccaccgcgggtggagtttggactcgaactttcctccgttcggactcgaactttcctccgttctctctacgagttactgccttcccgcgggctccccacaactcctgcccggaggccgaggcccgggcgcgcaccgggtcggagtcgggctcggcaggtcccgggagcgcgcgcctcctccccgaggtcccgggcagctgcagacacggggagagcaggagagccgggaaagaggaggggaaggggcgggggcggccgccggcggcgggcggggaggagccgccgcgcgcgggtcctggccaggggaggaggcagtggcggcggcggcggcggcagaggaggaggaggaggcggtgctcgcgccgggcggtagagcggcgctgggacccatgcggccgtgacccccggctccctagaggcccagcgcagccgcagcggacaaaggagcatgtccgcgccggggaaggcccgtcctccggccgccataaggctccggtcgccgctgggcccgcgccgcgctcctgc

SEQ ID NO: 31732 - DNA, 2300 bp, Homo sapien
actggtgtagacagccattagtgaaataactgaattttaataccactttatactgcaacttgcaaacctaaaaaaattgcaatactgccatctagcgttctatcgtgaaaacatttcgatatttattttttctctcaatttacaattgcttcagaactgaatgacaacataagccaaatttaatagtttgccatgcatttgttaggttatttcaccaaacatgtacctttaaatatcttcagtgtcttttccaatttctttctgtatataatctcttcttagagttaggataactggagaaggtaggatttcaacctacttataccttgtttcaaactttatgttcctgtcattacacaatgtagaatgatttaatggcaatgtagagaaaccgagtaagtaactttcctcacttcggttatacatacctcctctctttccatagtctttttttttttttttttttttttttgagatggagtctcattctgttgcccagggtggaatgcaatggtgcaatctcagctcactgaaacctctgcctcctgggttcaagcgattctcctgcctcagcctcccgagtagctgggattacaggcgcctgccaccatgcccggctaatttttgtatttttagtagatacagggtttcaccacattggccaggctggtctcgaacgcctggcctcaagtgatccgcccgccttggcctcccaatccatagtcatttttttttaaataaactttttattttggatcaattttagatttacacagaagcttcaaagatagtacagggagttcccatggcccctcatccagtttcccctactgttaacatgtacatttctgtggaaacccatacccactgggttcctggcacaatggacagaagttccacaccaatgaacatgactgaaatttcagaaacagaaacttgggggtcagagagggtgggctggggaaataaaaaagtttacatataaaagaacaggacttgtattctcatcaaacttgtcagtagccacaccagaagctagaaaatcaggaaccaatgccttcaaaattctgagtgaaaattattttcatcataaaatcctgtacaaaactgcatattaagagcaatgttagactaaagacaattccagagcaactacagagttttgaaatatttatgtcccatgccccctttatcagacagttatttgaggatgtgcttctctaaagcgggaaaagaaacagaaagaccaggggagaggtgaaggagcctctctgaatgatgtgaaggagatcgtgggtcaaagctctgtggtgtcctaaaaaataaacagtgcagaatggagcaggaagacagagttgtttgaacaactcagagatgtattcttctgtcagagtgtttggggatgaattagtaataggtgtaaagaagatgaaataaacataaagatcaggcagtggattaaccctagagaaaattaaaagttgcatggaagcatggtatgtatactatatggctcagctttgagccatacagactcatagaaatataaatattgaattcatttaaatgaaaaggtaattttatcatgttggccagatgggagaaggtggaagagaaggagggaggaggaacagagagagagagtgctagatcctctgccctatacccagaagtcaataattatctaaaattgaaaaaaataagcagcaacaccctattatttacacaatatgggattaaatatcagaagaaatggttaaaagtggttacctctacagagtacggatcaggaattgggatgaatgaactaagggaaaattctagtaggatgataatgactttttaaaacaatgttcatgttactttaaaaggcaaaacatcaggtaaatgggtgccctgccaaatcagggacttagcacccagggttatcaactctgttaagaatcagggagtgctgggggaagaaagtataaatgatggccttgtacaaagtatcttggattcttatcaaggctgtggcagtcaagtgtcctttgcccctgcttccttgttgtttgcataaatatttgtattctgaggcttcattctagggtgagagctcattttctgtttgcacaattgcctggctcctctggccaaagggtgctctgcttctggcagctgaagatcccagtagacagcttcttaaaccatggctttccctgcaggatttggatgggcggcagccactgcagcttatcaagtagaaggtaggggacactctctccccttcactggggtgggagtgctttatttctggt

SEQ ID NO: 31733 - DNA, 2300 bp, Homo sapien
ttcatctcctcataaataattattgaaattatttccagctaaaacaattgttgttttcagctgtgctctgctaagccaagttgtccctgtgttctacttgtgtaagttgtttataagagaaccccaatagtaactttacactatttcctattaaattttaactcactagatttaattacaatgcttcgttctgtcaaaatatttttaattttggtttcatcacccaatgtatttgatttgttattttacccaagtttcatcttactgtcatattagatcagttggtctttctaatgattattcaaggtagtgaatttaaaatttacacgaacagaaagctttttgaagtaaactgttacacagtattctaatatataaagattgtccttgtcagtataattttattttgcaagttaaattattaatatttatttattatgaagaccttcatattagctaaatgaggcagttattgttgaacacaaaattttcaaatcactgtttatggatgacagctgaaatcagatcaatctcatgatctaatgtacttgaatattttattttggttgcacagtattgtgaatattgttactgaaacagaagtagttgcagtagtctctttggttggttgatttttaactccattgtctttgcaatctcaagatatctttttttaatgaaataagatgtttgagagaatattagaattttttgtttaaagcaaagtacaagtaatttttacaactgttctcaataacttattcaacaaatatttcttgagaatctcctatgtgaccagcactattttatctgctgtgggccgagtgatgtataatagaaaaaagtaactggctcttggtacctacattctaacgatgtgagacagaaaataaacacatgcacatatagatatgtgtgtacatgtgcacataaattgatgtagttcagtgtgtgtgtatatatgcatattgtatgtgtgtgtatggggatgttatattgtaaaacccaaacctgcgtctgtgcagtacgatagggctggagaaaaaatacacagtttatggactcttctcactttatactcatgtccattaaacttgaacaatactacttggtggttatatcacatttccccagtccactcttctacttttcttgaggactattttgcaccttcttttctcttctcaatcatgaacagttttcccattctcacttgcagccaaagactgtgcttcctacttctctgagaaaatagaagttatcagatgataggatttgtagtgtgtcaatatctactcacctttcaatttttgttttcactatagcctgcgtatttcatagatgaaagagccatgctcctatttaatgccaacccatctacttgttccctagatgccatccccttttgcctattcaaagacctgttttcagcaatccttctttatttttcctacgtttgctttctactggattagtttctcccatcagtcctccttttgatatcacttcctcaaacagctactgcttcatttctttgctctcctttgaaacagaattcctcaaaagtattttctattctcataatctctagttcttcttcttcaattttttaattgcttgataccgtagtatttttctaatgactttggttttttcgttatgaaatataacacaagcaaaaaattacctaaaagttgatattaatagcttaataaattattaaaaactcatatgaaaaccaccaaaatcaacaaattggatatttccagcatctcaaaagcccttcattggcttcttccaaattactacctacctcatctcttccaataggtaatcattctcttgatcttttatattatttcttcattatatagctcatataccagttacgcatctgatatggtttggctgtgtctccacccaagtctcaccttgaattgtagctcccataaccaccatgtgttgtgggagggactcagtgggaggtaactgaatcatgggggcgggtttttcgtatgctcttctcgtgatagtaagtctcacgagttcgttataaaaggcagttcccctgcacatgctctcttgcctgctgtcatgcaacgtgtctttgctcctccttcaccttccgccatgattgtgaggcttccccagccatgtggaaacgtgagtccgttaaacctcctttcttttatacattacccagtctcggatatttcttcatagcagtatgaaaagggactaatacagcatctctaagcagttcagttttatctgtttctgaacttcgtttaaatggaatt

SEQ ID NO: 31734 - DNA, 2300 bp, Homo sapien
ttacaggcgtgagccaccgcacctggccaaccaaccatgctttgattgtctgtcccattgtgagtctaagatccaaaggactccggaagagatgttgccagccatgaacaagagttaatggagataatttgtttgctatctgcctcatcaagcaagattgtactaacctttcagaaattttacaattctctccccctcactcctaccccactatgctctaaaagttctaagggaatatgtttaactttctaaattgtaatgtgataggactactgaaacttgtcaggaaaataattctgttttagacggaagacaaattgacagccacacccagtttaatcaaggatgtttctatcattcttactgtttgctaaaagagaaaggtaattgtggttgatcattcaaaactttttattaagaataaactgtagactcacatgttgctggagtttagggatacaataatacccacacaattcttactcttcatgaatagcagtgggacaaagaaaataattctaatacatgaatatgagtcctatgtttttctaacttcaaaaagctctagaatgtcagagtagagacaacttaccaatactggtcatcaagggtggcctcttaggaaagctcacatgattctacacatgtattagggcatcacggactaacactgaattagcaagattgaaggaaacatagatgggtccccactctaaattttcttctgtctttaaagatctaaggaactctagaaattagcataaccatgaggcagtaaatgattattagctgtgatgtgtgatagggataagtttataggcggtcagaggaaagaaaagatctccagggttatcagcatgaccaatttataaatgacttaatttggacactcactctgctactttgccatctgctttaaaagaatttcccttcattatgtacaacacctgatcatggggttgtgcctatattaatggatgccttttcttttaggaaagcctcatgtgctccatcttaagtcgagctccagagtcattcgatgttcattctctttgccacttggcaattctaatctatcaacagatgtctggatagagcacttttgtgcatagagcctttgaaagaagtcggagctaaggaaactcaccagcttctttagagacagaaactcacaagacacacaccttgtggtccgatctttatggctgtgtgggagaactacagtgtgatttcagactttttcttgacatgtggagtctgttaatcctgaaacttcaaaatgtacatatttcccccaaatgagatgtaagtctgttgagttaattatcatacaattatagcaatggaaaagaaaaccctaatcaaacgtgaacagcttgtctaactattaaccagaccatggtgaaccattacttagctctgacttgcatgatccatcatagacttttggccctctgtgaacaaatgcttaaatgagttcatagtcatttaaaactgaaaggcctggctgcctgggttcttgtgattttcttgaaattgtttagtcattatattttactggcatgaagttatggctatcttcctctcttttccacatgataggaaagagcacccaggtcatggacatgaaagacatagcttcccaggactttgatctactaaagtggtgatttgttttataacatttctacttatagtcccttaagctgctaaaaaacattagaagtcaaatccctttgaataagttttctttctaggaagagccagagtccaaagcattgtattcagggtgtcttttagtgttagtccaatttgcactatattcaggataattcagctattgccagtattctagcagtcaaatacaaaatgacccaggtgaagcatggtgaacttttggtttacagttttaaattcaagaggtcagtttcgattgatacaaggatatgaaattagggtttgttctggttgaataggttgaggtttaggacagggaaggaaaaagagaaaggataaagccaatcagatggtatgacatcacattcaagactaaataatgagactgtgagctcattttatcctcaggcacactggaaagtaggcatactatacagtaacagccaactttttgttcattctaactcttaccacaccgagctttccttggtgtcagccacaggggtcactaagccatcagctgatcaagaaaggtaggaactagatttttttaatatatataatttgtaaagtttatttactcttttttttttttaagttccaggatacatgtgcagaatgtg

SEQ ID NO: 31735 - DNA, 2300 bp, Homo sapien
atctgggcaggttagaatatcaaaaattataacgagcctgttctaatgtaaagaacatctctaaaagatgtgaataggttttaaaaatatgatgaatatctagcattggataaacacaaataaaggtatcagtgaatatcacaatggaagaatcacatgataataattaataaacattgactcttcttggccaggtgaccaatattatttcacagttgatccttgagggcagagccaatgacctttgtcctgaattttaataatttactgaagttttacattaaatcagaatataattgggaagaaaattagtgtttctttgtggggagtgcagagtaatgccactaattgcttgtataaaagcattcccgaggttgtattttcctgttctttcattagaaaattaaaactacagtaattttctgctgtttataaaagggaaaatgtgctggtgaactgtattcagcaaacttaaaatgtcaaagctcttggccacctttttatgcccagtaatgataaactgtcaacttccttacattatttgggaatttactagcaacttgttgcagctctcacagcacacaaatctcttataatatgtatggtctgaaagaagcagcagtctgctggtattttgtttcttttgttctttctttcactttaatatttgagcaatttaatatttaaaatatgtgttagggcaaataaccatgtttttctgtttaaggagatggacaatgaagaacagtgtaaattaacctcagtagaataatgctttacaaattatatttaggtaactgggggattgttttcaggtaaattattatcaagtaaaagaattgagctgattctaaaagtatattgggtttaacattttatgaaaacatgtttattcacacagatacatacacgtgtacatctcctgggaacttggaagggttaagtcagaccactgtcatgttacaggaagtgtttttccactgtgtccagtaccttgagtttgttatgtattcaatatgtagtgtcatcataaaacagttgcacctacctgcattagccctcattgtctcaaggtacaagctgaaaaataatagaaagtaaagctcaggaattgaatatttctgctaatagtgtgttggtatttttccctcagttcacagacattcttgatttcaaaacgcaaactacacaacccagggcactagggttggaattcaatgtttattcaaaaaggcaccctaaggcagttagggaggaaacgctacatgtatgaaaaataggagccgggaatcaaagctgatctgagcagagcagcagcgactgtatttactaacacttgttttctgggagcctatgagagaaatggaaataattagaaggaagctgaaaggatggggttttgtggcttgttctccttatatggagcaaagaaaactgcagcaactcttcgggagctggtattccctactgccatgggggcagccgaattctgggtggaggagtttgtttataccttaacacatacaggctattttgttgattaaacaagcaaaaaaaaaaaaaaaaaaaaaaaaagccccgtttgcgctttcaaacactccctcaatgagaaaatgtctcataaaaatgcatcatgtgataagctcttgctttagtcccaaactgagcttgagtccacttggagatcttagaattaaagagttcttagggaatacacgttttagctaagaatatagttactctgtcatgaaacagggagctttgccacttgcttgttttggaaggaaaataaattaaaaaaagattgcaggggattttggttattatatggccagggctccgtttagagtctgtggcattcaaagctggctttaatcacagcatgatgcttgaagcctccaaaagtctaagtgtttcctttctttctttcttttctttttctttctttttttttttttttaaagcgttacttcactgaagcagagggctgcctttgagtgacgtcacgagttagagcagcaagctgcacaggggaagggaggctgggtgagtgacagcccagcctactttttaatagctttgtcatgtgactggggactgtagtaagacaggtgccttcagttcactctcagtaaggggctggttgcctgcatgagtgtgtgctctgtgtcactgtggattggagttgaaaaagcttgactggcgtcattcaggagctggatggcgtgggacatgtgcaaccaggactctgagtctgtatggagtgacatcgaggtgagctggggcagggctcggcgctg

SEQ ID NO: 31736 - DNA, 2300 bp, Homo sapien
cgccagcagctatctcgaattatggacagatttaatttgcctcgtcgaagtactgactttacaagcagggactattatattaatataagaaaagctttggttactgggtattttatgcaggtatgtagataatatgggaatgaataactaagtattcatatgacactgatttctattaacagtcctttgaatccactcaaaagcaaaagtgagtttgtgcatgctcataaaaatttatcttaaatgttggtacatccagtttctttgagtgaattaatatactaagaaattttaagtatttaatgagtaacaaattaatgtactaaatggctaaggtagtctagttatacaggaatcgtttttagaattattttattaatagagcctttgttatacaaaatggaaactttggctactttcagatgtgattaggcacctgtttcttcaggaatgtgaatattgatcagtgcattaaagtttctctgaatctagggcttaattggaaatacattgtcataacagagtactaaaaggaagcaattgagcggatccaaaagtacatacagttggctttagtctttatctaaaaactaagcacctccaaattcaaatattcaaatacgtggatttcatttacagtcctctacagagtgatcattggtaattatgaccaagacccttgcgtactgcaaaagccaaaaacgtctgttgagtagcaataaagatgaaacataatttaaaaggttttatttagtttaagtatgctgtgttaacggctataagaacagaagtaaaacttgtcaagtaaatactgtgaacagttattttaaggtgtttataaaataagagaaactttgagaaaaatgcaagaaaattttgtggtgataaaattgaaaacaaatcacctgatttgggataagtctcttctatctcttttctgtttgttcattctctctttggctgtgtcttttaagcacgatgtggcttacccttaaggccagatgggctcagtagctagaatatgagcctgaggacactcagtttcagaatcaaaaatcaaaggagattggtgagatgtctgtatttgaatctaagtaacacagtgtttattgtggcatcttattatataataggcttattagagtttggtgaatgataggtatgagcattctttcttgaaactcttaactatattcttaatatttgatatgttgtactggcttctctttgacatgttctgttcttttttagggggaggggatggggtgagggaggcaatgtctcactcccaggctggagtgcagtggtgcaatcacggctcactgcagcttttacctccctgggctctggtgatcctcccacctcagactcctgagttcctgggactacaggcacgcaccactatgcctagctaatttttgcctttttgtgtgtgtagagagagggcctcgccacgttgcccaggctgatcttgaacttctggcttcaaatgatcctcctacctcgacctcccaaagtgctgagattacagacgtgagccaccaggcctgggttgacatgttcttaaatttgctttttatatttcagaaaaaaactggccgggcgctgtggctcacgcctgtaatcccagcactttgggaggccgaggcgggtggatcacgaggtcaagagatcgagaccatcctggctaacatggtgaaaccccgtctctactaaaaatacaaaaaattagccgggcgcggtggcgggtgcctgtagtcccagctactcgggaggctgaggcaggagaacggcgtaaacctgggaggcagagcttgcagtgagccgagatagcgccactgcactccagcctgggcgacagagcgagactccgtctcaaaaaaaaaaaaaaaattgatgaaactatattcaagcattatacttcttaattatgtagattaaaatttgttacaaacagctaggcaccacagagtgtgcttgtagtcctagctactagagaagttgagtggagagcaaggagcgttgaagccagcccaggcaacataggaaaaccctatctctttttaaaaacaaacaaaaaatttattagaaacagcatgcattatagtacctgacacctaataggtgtttagtaaatatttcgaatgaaattgagtttcttttctattattcatgctcattctttaagcacagaatattagaattggaaagggagaactgtccattttgatgagtatcaccagtcaaggtgttaccaaaaaaagaaatgagagggaagcacgtgcaagctcttttttttt

SEQ ID NO: 31737 - DNA, 2300 bp, Homo sapien
ggtggtaaaaaaaaaattggctacctaaatgcccaccagtggaaaaattgtgagttatgctgtagacatatgaagtaattgttctagctttaaatcatcttatcatagaatatttagtgacctgaaaaacatttgtcagtgacttgtaaatgaggaaacataataacaatgaagttattgctagctgctgctgttggaatgtaccatttgcaaaaattgagaggaaaccttaataaatttaaaggagaaaaaaaatacagaaattgcaactggatctgacattttttttttaactgatagccctacatcatcaccctgtgccaaaaatgtggaattctgtcactaagtttgtagtttcttctcatgagaaattggtttcttaatttataaagttgacgttccaattttgtatgtctggttttatttgtaactcatttttattatctcataaacatctcagttatactcttaaaatggggagcctgttgactttggcacatctctgtaggggtgatggtgaatttatttgtcttggggtccagaagtgctagagggccagtgtgtgcaccagacgtagtacctaacttgatttacatctgttccttactccagaaccctgatatgagttgaaaagaattgatgactagcagtgagaaagaatggagcccttctctgcccaggcccagaaaacttgggggcagatatgagagttaagggaaatgtggttatgaaaccacaggctgaagaccagcacatggtttaccttagaacagttatttaatctttcttgtatccaaatactggtattacctagcgttaaagacttacccctgattagacagatctactcaaaaaacctactgtattcctcttctatgcgaaacatgctgggtgaccaagagatacataacctattaaagccttgagaaggaacagattcagtcagaggggatgtagtaagttaaaatggtgttatccactcactagatgtatgacctatttctgataaatacatcaaaatactactttctacatcaaaatacaactaataaaatagaaaaacggacaagtatgaatgatggttcttaggctacaagtggcctgtaaacaagaggtggaaaagttcaagtctattgtttgcccaagaaatgcattattagtgagaggtactatgatctctcactgccaaagggatgattagccattggtggtttttaggggtttgcagtatgtgatgacttgacatttggtagagctgtccttattagttaaaggtgaggatttagcctttaatcactgattgccaccttttcaaataagagaagctcttaaaaaaaaaaaaagcaaaaaactttgccagatccccacgtgttattatttcgatatatccatatatatatggatatgaaaatatttggaatattttcacgaaagctttttaaatggttgtatgttattaattgaaacattgagtatatttgaaaaaagcgtgtttcagatactggtcaagatgttttgcattagagacaatagttgattacatagtgaagctaaaatgtcatgtcaattaaaatgttgtcttaatactatttatgtaaataaccctttgaaatcgaaaactagattcaagttattttgcagtaccttgatctgtctagggaggggagatttctctctaaaaatcagacaaatggtttggctttagatcttaggggtggtttactgtattggtgagagataaacagctagaattatattaatgtttccagttttagatttaattttcccatttacccaattatttctcacaagtttagaaatacagtagaaccatcagatgttagttactagtcatttgttcttaacaaataacttagatttgcaatttttccatctgtagtacatgaattctaaaaattgagaaccacacaaaaaagctacatttcaagccatagtctgcaaatcaacaaccttttcaaaaatttgcctttttattgtccagcttgggcatttttctgcctttcagcttgttacagagcatcagcataagtaaaattacctctaaggtgtgctgtttcagctcccaaagatattcagtgctttgatttaaatgtcaatggcttcagatggttaacttttatttctcattccagatggattaattaatgggtgttctaatatgttattgtattctttaattcaaaaatctatttcctatctccacctcacccatccttaatttctgaaatggggatgcattttgtaatggataaaaatgtacttatatatttgttatgtct

SEQ ID NO: 31738 - DNA, 2300 bp, Homo sapien
gatctgactgaattgggatccatgatggcagagtttcctctagatccacagctcgcaaaaatggttattgcaagttgtgactacaactgttctaatgaggtcctatctattactgctatgttgtcaggtaatagagggaaaggaacaaaaaaaagcccagctcttcaaagtttgggtggacttcacttttgtttttgttttttaatttttagtatgatagtggattttatagatggttttaaggaattaattttgttttctaaataccttgtaaatagcttcgtaatgacatagtgcttacaaaagtaaagtaagtcattgtgcacaaaagataagtaaagcattggctctcttgagtgctaataaaaattgcagtaagtttgagcacagttgtaactgaattctttggttaaaggtccatcactgctatctttgtggtttttttgttttttgttttttactgcaagtacaggaagaactttgctctagtacttagctctattaagtgtgcctgtgacaaactgaaagctatacattaagttgagccttttctatatatgtactccaatggcacccgaacaaacatgaatttcaaacttcatatcaagtaaatagaaatagtaatgtataattttaggcttaaaatctaatctgataatggtattcttttacaatggtagaaaaacttggtaaaagaaacatacctaatatataaaatcgctaattttgtaaaattggaccattaagctaaggaaataatgctgtttttagtaacaataaaatgtaatccacaaatgaatagtaacttggaaattagattttccctaaaggagaagaaatattgttaagaaacaaatgaatagctattcttacagctaaaaatagaaaataagttcttactgacgattaaaatattctctgctactagttttagcacgggagagaactgactccctattgctgagtggtttattgaacttaatgctgcaaatatttcaaaatattctgtggaattaaaggataaattgaaaaaaatttaaatgtaaaattatggcttagtttagacgtatggtatattctaatggtgtgaattttttatttaagaagtagctaaaatgttttcttgcagagttatgactgatcagactcagagcagatgggcagggcagtattgagtcactttaattaaattgtagcttcatttgcggaggtggtggtaggttgttgtctgcctttcttatatgttgttttatagattctcccagttgtacttctcccaagattttagtttttagagaaagtgtggggcaagaactaatggattgtgtacttacttgtctatctgcctagtttttatttctctaggttctcttatcagatatacttacatgattactgttgtttgagtttagaatattagctctttaagaagtttgttgttgtgatgtagttgtaatcttccaactacatctcagttttatttgtaattaaaaaaaacttatttttatttattacaaataaaaacctttagtttgtcaggagaatgagcatttatgtgcagcaatgtaaatggactgtttttaaatggtccatttataggaaaagtgttgaaataagaggcaagtaagaagtcagggaataaaaaatagtttgctgagcttgtaatgctttgtttgacattaaaatagtttttgaagttttgaggtcctgatactaacagtgcaaatctagaggcctttgagagcactacttatttattcccacttaactctagtggctagttcacattaaaattcacagctgtgagaagtttgtgtgcttttatgaattaccttgcttcaattaaattaagcaagagttttaatatttattatgatcatgttttgttgtcactatttggctattttggcatctttttaaaggggaaactgtatgggaaagagtaatatgatactgtattttatcttgttgttgattattcccattatcttctatccgaaccgataatttatgaattttttcattgacaaggttttaagagcttttaaaatgtgttgaaaaagtcccaagctgttaagtatttttattttcatactgcttttatgactatggaattgctaaactgaattaaggaaagttgtatttcaaaaaatgtagtacatgctttgtaacaatttaaagttttatgtgaattaatattgaggctctaaacaaataactgtagttacatatcttgatgacccttgatatgattgtttcagactaattgtcaacttttgaaatattggactttgctttta

SEQ ID NO: 31739 - DNA, 2300 bp, Homo sapien
tttctgttgacactgcttaactgaaaccatggaaattgcgagttcagatgagtgaagactactatacgaatttctttctgcagttgcgagttttatggacagtagcaaacactgaatactataaagatagttggagaaaaatggtttctctctagtctagcctacaagtatttatctctactgagacagtgtagaagtaatgccaaaacaaatagctcaggaggcagcagatttttgttttctggaacgaggagactgaggcatttttaacataaccaataaatgtttttgttctttgctaggataacacctatcctgagattttgcgttctaatttaggatcagttgtgttacaattgaagaaacttggtattgatgacttggtacattttgattttatggatccaccaggtatgacttatcaaaacacatttttatcagatcttttaaccaaaattgactcttagtgtttttctccatcctatttaatatatgtattaaatacattttgctttttccatccagtatgcatcaagattaagtcttacatgatagcattaaaactaaaaaaggtgacagttatatgagcacattttttttttttcttcaaaagttattatgggggggtttgggtaaattgaattatcctctgggcatgaaaatgtgagaattcctaagttttctttggggaaaaacagtttgataaacacattgatgaattagcaattatttaatgtatttcggaagaagacagttttgcctacaggaaaattttgcaatgtttttatgattcattgtttgctagatctgtataattgaattggatgacagtttgagtttgagtttggtccactgcaaaatgaaaaatgagattgcttataatagtttgtactttgtcacatttttgcttgcttaaggcaccgtgtctaatagattgtcttttaccactagctcctgaaactctgatgagagccctggaacttttgaattacctggctgctttaaatgatgatggagatctgactgaattgggatccatgatggcagagtttcctctagatccacagctcgcaaaaatggttattgcaagttgtgactacaactgttctaatgaggtcctatctattactgctatgttgtcaggtaatagagggaaaggaacaaaaaaaagcccagctcttcaaagtttgggtggacttcacttttgtttttgttttttaatttttagtatgatagtggattttatagatggttttaaggaattaattttgttttctaaataccttgtaaatagcttcgtaatgacatagtgcttacaaaagtaaagtaagtcattgtgcacaaaagataagtaaagcattggctctcttgagtgctaataaaaattgcagtaagtttgagcacagttgtaactgaattctttggttaaaggtccatcactgctatctttgtggtttttttgttttttgttttttactgcaagtacaggaagaactttgctctagtacttagctctattaagtgtgcctgtgacaaactgaaagctatacattaagttgagccttttctatatatgtactccaatggcacccgaacaaacatgaatttcaaacttcatatcaagtaaatagaaatagtaatgtataattttaggcttaaaatctaatctgataatggtattcttttacaatggtagaaaaacttggtaaaagaaacatacctaatatataaaatcgctaattttgtaaaattggaccattaagctaaggaaataatgctgtttttagtaacaataaaatgtaatccacaaatgaatagtaacttggaaattagattttccctaaaggagaagaaatattgttaagaaacaaatgaatagctattcttacagctaaaaatagaaaataagttcttactgacgattaaaatattctctgctactagttttagcacgggagagaactgactccctattgctgagtggtttattgaacttaatgctgcaaatatttcaaaatattctgtggaattaaaggataaattgaaaaaaatttaaatgtaaaattatggcttagtttagacgtatggtatattctaatggtgtgaattttttatttaagaagtagctaaaatgttttcttgcagagttatgactgatcagactcagagcagatgggcagggcagtattgagtcactttaattaaattgtagcttcatttgcggaggtggtggtaggttgttgtctgcctttcttatatgttgttttatagattctcccagttgtacttctcccaagatt

SEQ ID NO: 31740 - DNA, 2300 bp, Homo sapien
ggccaactcatcattttaatttcagttttttcctatacatatgtaattatgataaagtgtaacttataaattaggcacagtaagatattaacaactaataataaaacatttataacaacatacagacagtcttgacttacaattgtttgaccagattttttgacttcacgatgggtttatcggtatattaactgcatgttcaacttacaacattttcagtttacgatggctttgcgatggccatcaccccatcataagtcaaggagaatctatactgtaatagaagctatgtgaatgtggtctttctctcagaatatcttactgtactgtgaaagcaaaaccagggacaaagtagggactatggtacatttaggatagaaagttgtactgaatatttcacaagtgaaaaatatactcatttttctttgtgttgactttccaatgtggatttggtacaaaaaaataaaaaccctccttaccaattgctggctgggtgcagtggctcacgcctgtaatcccagcactttgggaggccgaggtgggcagatcacttgaggtccggagttcaagaccagcctggccagcatggcgacacctcgtctctacgtctctactaaaaataccaaaattagccgggcgcgtagccgggcgtggtggcgggcgcttataatcccagctaggagggaggctgaggcaggagaatggcttaaacccgggaggcggaggttgcagtgagctgagattgcaccactgtcctccagcctgggcgacagagcaagactgtctcaaaacaaacacacaaacccctcatcagttgcaatatttaagttgcatttaatcctagcaattgcagtcctgagatttggataagaaccagagtatggtcttccagggcagccaaaccaagccattccatgaacaacagagatcaccctgctgcagatggtccacagatcttttcttgtgcatttcttctgggaacaaatgcaactgaggaagcagacatattctagggggagagatccacaaaaatccttagagtcatcttgccccacctccttgttatggctttaggtacagcccttatggctaggagatgtaaccttcctcagcctttgcgtctacgtctacaaaataacaactaccttgcagggtgttatttaacactgcgaaagtgcattaataggcacagaaaaacaaaaaacaaaaaagcaaattgtgccctcactgcgaattctctgtattctagttaaaaacatctatagcttgggtgcatggtgtccgtgctgggcaagaaaagggcaaaatagatcatgacaagccttaacattttctcacttcagtttcctcactgcaattgatttttttttttctttcaagtcggagtcttgttctgtcgtccaggctggagtgcactggtgtgatctcgtctcaccgcaacctccgcctcccaggttcaagcgattctcctgcctcagcctaccgagtagctgggattacaggcgtacgccaccacgcccagctaatttttgtatttttagtagagacggggtttcaccgtgttggccaggctggtctcgaactcctgacctcgtgatccacccgcctcggtctcccaaagcgttgggattacaggcgtgaaccatcgcgcggcccctcactgcaactgagggtagcgcagtggccgcaagttccagatctggagttactaaatagctgggttccaatcccggctctgccacttattagctgtacgatcttcattcgtttctcaacctctctgggtctgagattcccttaaagccggggtaatagaaatgaataggatttcctaactaggactagactttctcaatttcttgactcagaggggcaaggatagcctgaaatggaaagtgaaggccttcaggttcttcctaacagccgctccgaggaggggaaagctacaggaagagggaggagacccaagaaaggtcggaccaatgaggcagcgggcgggacaggagttcccgcctttgggcgtcgtgcgcgcgcacctcgctcacacgcacactcgcacgcacgcacgctgcggaagcgcgcgcgcgcgcaggcccagccctcgtcgccgccgccattttagctgttggttccggccgcaccgtgtgggctgtagtagcgggaggggtgggggtcctccagagttaagtggctgtcctcgactgtgcccatacagcagccagctttcttccttaataactgcccgttcgaagagtgcgaggatgtccaagcggcaccggttggacctaggggaggattac

SEQ ID NO: 31741 - DNA, 2300 bp, Homo sapien
ctggttttcagccaggtgtggtggctcacacctgtaatcccagcactttgagaggctgaggtgggtggatcacgaggacaggagttcaagatcagcctggccaatatggtgaaaccctgtctccactaaaaatacaaaatttggctgggcgtggtcacgcatgcctgtagtcccagctgctcgggaggctgaggcaggataatcgcttgaacctgggaggcagaagttgcaatgagccaagattgcaacactgcactccagcctgggcaacagagtgactccgtcaaaaaaaaaaaaaaaaaaaaaagattggtctttaaacattataaccattcacgcctcacttggctaaacacaaaaccacatccacacctcagcgaccacgaaaccattcagcacagcttccttaactgtgagctgtttgaagctaccagtctgagcactattgactattgttttcaggctctgactagctctagggaatctcaacaggggtgggaggaaccagctcaaccttggcgtagtaccaaaatgtggccaatccaggctttgcataagtcacagcagcgttcaccagtgcccgggccttttctgcaaagttacagacaaattgggctatggttctggaatggaaagttcgtcaccccgaacagccggctgaatgtctacctgtaacttcttgataccacctgcttgctgtaaacttttcccttaaaaacaaggtttttccaagggaaaacaaggttgaaaccaaaaggtttatttgcaaataccctgggttttcccagaaagaatttcaggcagcttccttgccctttggcctcattgcttacaagtgactttttcctttgctgcatgtgctgtgatatttttctctttctgtctccctttttctttttctctttttctttctttctttctttctctttctttctttctttctttctttctttctttctttctttctctttctttctttcttttttccttccttccttcctttctttctttccttttttctttctttctttctttccttctttctttctctctctctctttattttttttcagggtctcattctgtcgcccaggctggagtgcagtggcacacaatctcggttcactgcaatctccacctcccaggctaaagtgatcctcccacctcaacctcccaagtagctgggactgcaggcatgcgccactatgtccagctaatttttgtattttttggtagagacaggttttcactgtgttggccaggctggtctcaaactcctgacctcaattgatccacctgctttggcctcccaaagtgctgggattacaggtgtgagctcctgcgcccagccatgctgtgatagtttttccttggtgctagttccctttcttaagctggaattccatctcccacttggtcctttcagagtcccttcttttgatgcaggcaagaaatcctaatttagcatcacttgtgattataattaaggtgctgtttactccctcttccagatcattaatgaggatgttaaatgagaccagaatgaaaccgtgtccccatggcattccgctagacaccttccaacaacttgacactctgccatttgctgtttcattaccctttgtttaccttgtgagctcaggcccttgcttttgaaggaggcagaaagcttactatttctactgctgcatagatgccacttaaagggtggggctgttaaaacctggcagattgtaaatgcatccttttgagtttgaattaaatgtggattatgaatagagcattgtcagtaaatactgttgctctccctcctctcagatgcctttgtttgctcttgactttctgcagctgttgtctttctgggagcagagaagggtagctgtttgctgtatgcaaagatattgcttggatcagcttaactacaagtgtaaagttacactgttgcatgtgaaagatgtggtagatggattgcattcatggctctagtttttctctcctccccatatccatgccctttactgaagtaactttgcagtacactcccaactctgactctgccaagccatgtgactttctttgacaaatgggattttagcagacataatgcaagtgtaagcttggaaaaaagcactacgtgtctgcttgcactcctgagcctccaccattgctgtgaaaacatgcctgggagagcctgctggaagacagtacccagagcagcgccccagtctctccagttgactagccaggaccagcctagatcttctgacaactggatgaccttcagatatgtgagtgaaacc

SEQ ID NO: 31742 - DNA, 2300 bp, Homo sapien
ttcctattcataataagaatgatgcttcttttcttcctgcgcaccctgccagtgaggatccactttttcctgttaaccagatgtttctagataaaattataagattcaagattgtactatgcagttccctggttttactttaattccccggggggcttctgggagaaccctgggcaggcgaaacatactgttagtttttcagatgtgtttgaagtaatctggttgggtaaatagtgatcacacaaaacctggctttctagggaggttaacctgaaaccttaattgttttcaaaaattttctcagggtaaccactctatttcctggtggaatttaagtctatcagttttctgtacacatgaaaaggaagctatttacaactggcattcctgtacgaaatgtacaaagttctctagcagagagctcttccacgtgggaagagtgcttttcaacgcacttcctaaaactggtgcttgacaatgctcatttgactttccagtgtattatacattaacaaatgtgaaaagaataagaggtcaattgttcaatgtctcgcttgcatggcagtcactgatgttacagagatcactgtgaaatgtgaactcctctgactcctctgttacttgtttctaactttgttttcatcttctcattaggttaggtggtagtaaagcataatgattaagaatccaagcttaggaatcaaagtcctagggttgaatcttgactttgccattttctacctctccaacctggggtccattaccttttcttactggactttattttcttataaacaaagttgccaaattaatatccaccccacaaaaagtattgcaagcattaaatacgatactatatgagaaagtgcttcataaagtgttcagctgcaacttcagaaaactcaacctaaacaccttaagcaaaatgagaatgtatcgactcatataatgaaaatagagcatctgaacccatgccagtgggttcagatttcactctaccattttttttttttagagacagggtcttgctacattgcccaggctggagtgcagtggaatattcacagaagtgatcatagcacactatagccttgaattcctgggctcaagcaaccttcctgccttagccttcctagtagctgggactacacatgcgtataccactgcactgagctctcactctacttttattccacagccttctgcattggccttatcctcagacagcttctcccttagtggagcatgatggctgcaataactccagccttttttctccagtttcaagtccagtaagaaagagaggatgcatctctttcaacagtcccagtgaaaagtggcattgcatctcattggctctgaaggtggatcatccctgaaccagtgcaatagtacgatttatcatacctaagccacaagctacctctggagcaggagatgaagtcaacaccacctgctggactgaaagtatagtggtttctcagaaaggaaattgggatgttgttaccaaaggaagagggaatgaatgttgccatggtggggaggttgggggcggtggcgagaaaaaggcagatttcctctagaatgccatcaaaatgaaagtaaatctaggctttagcacaagtcctagaataccagaacggagacgtgctttcttggaccttaaacgaaataaaattaggccaagtgaagcaagtgccatttaaaatagtagctatgaatgtatataattaggatttcaagaactgaatgaaaatataaatgttttaaaaatgggaagaaagattcacaataaggaactagactgttgcagggtgggggtggggtggtgggtggcatggggaactctgaaaactcattagttgaggataactacgcctaccaacagaatgcagaggtgcaagactgagctactggtgcctgagttctcagcgggccagaaggaaggacggtagggtggaagggctggagtctcagttctgggaagtctccctcttatctcgcagaatgcctgtccctggataaagatcattagtttgagtttttccaagatgattctaggaagctcctgctggtaactaagtcacccatcctggggtgggatccagagatttagattttttataagctttcctgccaccgaaacgggtgtttgggacctcacgaggccctgttcattcttcgtcgctgcgctccccactctgtactggatgcatttactgacgttgttgtctccgtccccagagtatgaacccccaaggtgactcatgcagctgtgggtgcccggcatacagcatggt

SEQ ID NO: 31743 - DNA, 2300 bp, Homo sapien
gcactgagctctcactctacttttattccacagccttctgcattggccttatcctcagacagcttctcccttagtggagcatgatggctgcaataactccagccttttttctccagtttcaagtccagtaagaaagagaggatgcatctctttcaacagtcccagtgaaaagtggcattgcatctcattggctctgaaggtggatcatccctgaaccagtgcaatagtacgatttatcatacctaagccacaagctacctctggagcaggagatgaagtcaacaccacctgctggactgaaagtatagtggtttctcagaaaggaaattgggatgttgttaccaaaggaagagggaatgaatgttgccatggtggggaggttgggggcggtggcgagaaaaaggcagatttcctctagaatgccatcaaaatgaaagtaaatctaggctttagcacaagtcctagaataccagaacggagacgtgctttcttggaccttaaacgaaataaaattaggccaagtgaagcaagtgccatttaaaatagtagctatgaatgtatataattaggatttcaagaactgaatgaaaatataaatgttttaaaaatgggaagaaagattcacaataaggaactagactgttgcagggtgggggtggggtggtgggtggcatggggaactctgaaaactcattagttgaggataactacgcctaccaacagaatgcagaggtgcaagactgagctactggtgcctgagttctcagcgggccagaaggaaggacggtagggtggaagggctggagtctcagttctgggaagtctccctcttatctcgcagaatgcctgtccctggataaagatcattagtttgagtttttccaagatgattctaggaagctcctgctggtaactaagtcacccatcctggggtgggatccagagatttagattttttataagctttcctgccaccgaaacgggtgtttgggacctcacgaggccctgttcattcttcgtcgctgcgctccccactctgtactggatgcatttactgacgttgttgtctccgtccccagagtatgaacccccaaggtgactcatgcagctgtgggtgcccggcatacagcatggtgactggaatggatgagcacccaataaacatttgttgcaggaatgcaggaggacgggcaggccagcaagcaggctgcctggtttttcccacatgggcttttctgggaaagaagagcttctatttttggaaagggctgctatgattgagaaaagttcatggcagcaaaaaaaggacagacgtcgggagggaaacactcctagttctcccagacaacacattttttaaaaagactccttcatctctttaataataacggtaacgacaatgacaatgatgattacttatgagtgcggctagtgccagccactgtgttgtcactgggcgagtaatgatctcattggatcttcacggtgggcgtgcggggtggacagcctcacacccccattttacagatgatgaaaaggaggtgcagggagtggtgcagctgcttcaggcgtacacagataggaagtgacaaggctgggactctgcagcctgagtgtgtcatcacgacccacccgctgctctgctctcataggtatgacagcacagctctggagcaaatgccacgcacatttgcaaggtgcccatttccatgcagcaaaaataagtcaataagttattgacttacagaaaagcaaagggcctctcaataaagaggtcattgtacacctctccaaacaggcgattttctttctcatttttattcccctgctgtgtgctgaaggtcactggctacaagccggtgaagtcgcggaatggaatccttggcccgaaaacccaaaaatgggaggggcagaggaggtggggacagagcgggaggaggtggaggcgaagcaattctacaacccggggaggtctggcctgcttttcctccctgaactggcccaatgactggctccctcacgctgaccactcctctgggctggcctcctgcactcgcgctaacagcccaggctccagggacagcctgcgttcctgggctggctgggtgcagctctcttttcaggagagaaagctctcttggaggagctggaaaggtgggtgctaagttgaggttcattttgttcttctcggagtgtgcttattgagtctgaagctgggttggggcaacgggcctcttcttgggaacaaattggatcatcttcttgggaaggaaatgtactttccctggctgctctgaggg

SEQ ID NO: 31744 - DNA, 2300 bp, Homo sapien
gaccagaagctttagctgcattctagccccacctttttttctgctgttctctagcaccttagtttgcaagccccctaggacagggaccatggtgtgcaatgttattgaacttccccaggatgagtgctgcagttgtatacaacaggcagaaaaccaatgtgctgactagtatactggttccttttcttagctcctggccagccagtccgttgtaaaattttctttagattatgatgccagggactattgctttttgaagggctgccagggagagttcaagccattcaggcccttcatcagttgtgtcaccatccatttcagttacctgttgatacctagcaaatcgccctaaaacttagtggcttaaactacaactacttatttagtatgtgatgctgtgagtcagctagttgagcaaggctcagctggatggttcttcggctggtctcagctgggctcactcatgtgcttgtcatcagctgtgcgggtgggggtgggggggcgtggagggggcggcaggcaatggcctcactcacacatctggtgatggttgactgttggttgggaatcctaccttaaccagcaagctattcggagcttatttacatggtttccaagagcagaagcaagagttaaatcctaatgcacaattgctttaaaagcctttttttttctttttttttttttttttttctggtaacacatgtacaaacgttgctttggtcaaagcaagttacatgactgagcacagagtgaaagagacagtggcagggcaagggacaaagaaggggaatgattgctgccattttgcaaacagtctatcatgtgcaaaacaaggccaagaacaaactttcaaggtgatacttcattcttagatttccaagatgctagagccagaagtcctagttgagtccctgtttctccacgtttcaggcctcagtttccccatctaataaatgaggataacatccatttcacagggttgatccaggatcaacaggggctaaaaattataaataaatgttggtaatgatgcttccacaactgtacaatgggttcacaacttctcaacctacttgctcatctccacacacagcgtttctgcgagtacagagggctcactattgatagtggtccaagaggggattttaggtgtcacaggaacagcaccttgaatacgattgacttatgtgtgtgattcaccttccctctgtcattctctttcagtctttcctcttaggagaagtctcagcttaatgccaatgccttccccttttgctaattattttattttttgtaaagagggggtgtgtcactttgtggccgaggctgctcttgaactcctgtcctcaagggatcctcctgcctcagcctcccaaggtgctgggattacaggcatgagccatggaatgccaccagtgccaatttgtctttgacacctctctcaacccatgctaaccatctccctcagagtttttggccctatttagaattgaataatgctttattttcaatttttacatttgctttctattaatgacaaatgatacgttaaaaaatatataagcaagcactaatagtttaaaaaacaatgctaagtatataataaaacgtggttcattcattcttgcgttcaacaaatattcgtccaataaatatatgtagagcatctcctatgggccaggatcttgccaaaggcacatctgcgaaccaaggaaacccctgccctcggggagcttgcattctaggcgtgggagtcgtgatggtggtcggagaaggactggatttggggatttgcttcttgcgggggacacaggcctgcccgtggggcccgcctcccgcgcggagagcgctgaggggtccggagtgacctgtaggctgagaccctggcttccccttgcctagaggccgggcaggaggcgcggagcccgaggtcgcggggctgagggcgcggggcgggcccggcggggctcggctgcggcccgggctgtgtctgcggccccggcggccgcgcccctcctccctttccctccggcggaggctgacgtggagtcaacagcgctggcggccgcgagaggcggcggcgcagcggctcggaggcgccgggccctctcggggccgcgcggggcccgggcggcggcggcgacgcgacgtcgcgaggaggaggaggcggcgggggtccaggaggccggccagcgcatggaggaggaggccatgaacggcgaccggactgagagcgactggcaggggctggtgagcgaggtgaggccgcggcgccggccaggcgggatgggccgggc

SEQ ID NO: 31745 - DNA, 2300 bp, Homo sapien
ccactgacaatgaagaattgttctgcctgaatgctgataatgcttctattgaaaaccgctgctttcatacatgcaaagagcttagaacagtgcctggctcacaataagccctgaatgcaagattattattattatcgttactatgcagtcaggtccagacttcatctcctagcatatgaacgctccatagtcttaccccagtgcttttaccaagaaaccacacacacacacacacacacacacacacacacacacacacacatacccataataatacatatgggcatatgggtagtttctatatcttctatgcctattatgtttgtgcatgtgtgtgtacagtgcctgagtgtatgtgtgtgtgtgtgaatatctatctatctatctatctatctatatatatatatatatatatatatcttggggtcttcatatatctcatttcattgctctgcaaatctaccttgagaataggagagtgtattagtccatttttacactgctgataaagacgtacccaagactgggcaatttacaaaaaaagaggtttaatggactcacaattccatgtggctggagaggcctcacaatcatggtgggaggtgaaaggcacgtcttatatggcagcagacaagagaacttgtgttgggaaactcccctttataaaaccatcagatcttgtgagacctgtccgctatcatgagaacagcacacgaaagacctgctcccctgattcaattatctcccaccaggtccctcgcacaacacgtgggaatcataggagctacagttcaagatgagatttgagtggggacacagccaaaccatatcagagagtaactataattagttctgttgtacagataagaaaactaaggccagagaagttaagctgcttgcttaagttcacacagcaactgaggaagagctacaatttcaaccttctttgctagagattagagtttactatccataaatctggaagccctagcaataccaatgttataggtatcatgactgaagccagcccatcttccactgccaaagacctgccaagctcttccttgggggacacaccagaagaacaattctccctgtgcttgggcccgaggctcaccatacggtttcactcctgtcctagaaatgagcttggagccggtgacaaagagaaacatcccagtgcaatttcagtctcaacaatgacaactgatgatgcacaatagtgggatctggcctgtaatcagtttcaagctatacttagccatttaagcgtccattctgctcactccagagagtgtgcgggagagtcacacacccctcagcttcagcttctggctcatcaccgcagagcaccatgcggaaaaaggacccctttgtgatagcaccgtaaattacagcccaggcaatctggagtctcagctagagtggattcttctgtctcctaaaagaaaaatctgttttaggcttaattacagtctgtcattacctgcaatcttataatgacccaaagtccctggaaaatgataataataattaaaaaaaaagagagagagagagagagaatcgattcaaatatgaatggaaaaagccagacaaatgcagggcagggaagtgctggtagcattcttcagaaacaactgtgccatgaggatcagagctttacaatggtaaatacttattctggctccgttgtcaatttaccaggcccaagggctcagtgttaactttactcactttctgaatctttaatctcgttgctgtagaattcaccttataaaatgcaggagcagctcccaagataaattgatgctgaaaatcagacgactgagatttaataggacaatgcttctcagatcccgcgaggacgcattgaacatacgaaaagtgttcagtgattgctcttagtatgttagtaaggagatgctgaggtttatcagaagacgccttttaaatcaagttttctttgtcagttttcacggacaggactttcaggtgcagccgaccattgggagctccctcttgtggccatatcaggaatggaaatgtatctcttcccaccacccgacttaaacctccaaaagcaaaactgaggccaactgactcaagctggtgaatccgcgattgcgtactagagaagggggccttagggaagtctcaaaatgctacgcttaaattttcctggagtccagatgtccttctgaatccactaaaccttgtgaagcgatgtgaacgtcaggtaaaaatcctttcttttcctgtttaactgcctcgttatttatggacacaattactttatatta

SEQ ID NO: 31746 - DNA, 2300 bp, Homo sapien
gagtgctctgtctttcagagatggggtcccaagaggaatgcttaatcctaccccagcatttcataggccaacacaacgctgtgtctacacaaacagaatcatgggcagaggtgaagcgattatccattttcaggcaaggacctcctgtagttaagaaaaggaagtgaagggattgatttaaactgaccgagataatgtctgtggaaggagctgatggtaaaggtttctgttattcagactagtcttcatattgatctgattcattgggaagtggcttgtctcttcttattcctaccccggggaagatcctgggcaactgtgctatgcctcactcctgagagtcagggtttgaagtacaggtggaggcagagtttgattacccaccctgcatggcacttcctaaaagaaacctaggcctacttttgttcatcttttgcccgtaggagcctggtaaatgggacgttttcagaaatcaaggaccgaatgttttcccatctgccttctctgcagctgctgtgagtatgggaagttccctctgcacaatggggggccctgaggtgccatccttggagggccgtctctgcctctttggtatcagcccttcctaaagtaccccagctccgtgaggagaccgtggctgcctcttggtgttaatttaccctgtgatgtccccagcaaagcactgaggctccctgctcagctctttccttagttcgatacctgttttcttcagagactttattgtagatcccaacacccagatctagtaaatggggaggtaattgcattgactcatgacctgaaagtcacctaaatgcactgtttcccaaacacctcagtttaaaagaaaacttcattttaaaatcttaatgttactctggaaataggagtgtttctagtttgctgagaacttaaaccagtcaggcagcatcctatgaacttacgtgcgtaattttatttcatcatcacttcatcggtatgatgaaggcatgcttatgatcccatttgatagataaggaaactgaggttcagggaacttaactaacttgtcccaaatcagagccagattctagtccagggccaaaagcccacactcctaactattcctcatcccatctcctctctgtgagcaatgctcaagtccctgtggtgatgctcatgttgtgccctgtaacccaggctgggtaatgtgtgctgatgaaaacaaatgtccaaaaagtagttttcaaaagcaatccagtgacaggcaaagtaagagtacacacctcattctcttgatctgtgttggtttcttaaatttgagatgagactgaaattaaaacaagcaatgtgctatagaaaaatttggataaatggaatataggagagcactattcatcctcaataaacatactcttgatacttttgttcttgaaatcttatatgcctacttttaacattacacttaacattttaaaatctgaggcctcttagaaattgcagtgctattaaaatatacttttcatataatagaaatacaattttaggtattcttttgccagtagacttgggtgatgactcaaatagaaaactacgtagtaacagtctcctgaaagtttcttaaacaaacttttttttttttttttttaactattgttatgggtccagctgcatgactttggtcaagtcacttagcttctctgggcttttattttcgtaaaaatagatttggattagatctttttagatctctaattttatgattgcttgtgtaccataaagcattcactggctgtttagtcgtgctgagcattataatgttttaaagtcacagctatcagatcatatttactgagacacacagggaagaaaggagtagagttctggagaggacaagaaaatctggtcaaaaggaatccacttgccatcgtctctaagagcaggctgtgagaatcaggtttttgacaacaaaatgtggtctccttaggctaagaagagctcatgtttgcccacagatcaaaacgtagcaaaggaaagagaaatggctttaccatgtgactcaagttttacatctctccattggaatctgtctcttactttcagattgctgaattctaactcattcacgatcatccgggatgatgcttttgctggactttttcatcttgaatacctgtaagttttgtgctttgtctatttgctgaacattcggtatcttggtagaatttctggattggtttctgtgctggaacagcatctctgcaagggtttaggggtggagaaactggagaacaccccattctcttttcagcactgacctt

SEQ ID NO: 31747 - DNA, 2300 bp, Homo sapien
ttagctatgccaccctgcccccaggctctcactcagaggtgagaaatagattttcttttcctgggtcagcagggagtgctctgtttgagaagcctccgttcctctgctctataaagcagtagcccatccctcttaagggaaacatctttcaggtgcacagcacacacatccacgattgtgggtctgcatgtctgtcgccctcccaggctgtggtctgtgtcctcagcccctaacactggggcttgctgagtaaagtatttgtaaatgcatgcccacacagcagcgagggttagacacagcagccagttgtggagtatgatctccctggccatgtcctgtgtgatcttggacaagataaaaacttctctgagctcaatgttcccatccataaaatgggaggacccatttctcaggacagatgcaagaattaaatgatgataaatgcaggctggtttgtactgatgccaggtgctttttacatagtcaccagcagggaatgtctaactccctccatgaagttgcctacgcaaagctctctttcaattcctgaacctcttttggtcagtctgtgacccccttgtagccagtggagttgctcttttagggttgtctgtccagctagacttttagctccctgaggacaggagctgttcctttgttccctcccacagcagccagcctgataccgtcctcatggatcttgtcaatggatcaccaacaataattgctgaagaagcaatagtatgattcctacttttgcattcgatactgacttttctgagtaggttttagcatctggcatgcttttccttggtttgcagctcgacagtcgtgctgtgattcccttctcccagcagttcaggttattagccattactttgtttccgctttggtcattttctttgatttcctcagccgcacattacctgtgttaagatttccgctcattgcttcaaacttaaggagttgaagaggggctcaggagggcccagttaaggtagcccttcaaggctccgagccccatcctgcccagccaggagctgctggaccatcagccagtcaggatgctttctgggcgtcagcagcctcatcaataaattaaggatataagtaggacctgcctcaaaaggttagaagattaaaagtacagtggctagaatgtatcacaccctcaatctctacaaaccctcctctgactggggcgggtggggtgacccgtgggcagctgagcgaggggaaactttcccgggctttccagctctttagcaggcagcaggcagggcccagagcgccgggcgtgcaggctgcagcggctttgcttccccacgttcctcccatgggaggactggctggcttcagtaacccctggtgctgtgggagcgagagccagacctcactgccccaccgcagaagacaagcaaagccatcctcgctgaccctaccggcagcatgcacttcaaaattaataaaggctgctccaaagtctctcctcttcaaagcacccagggctgcctccctccccagtaatcaagccggttctccacactccccgctccgactttattgatttgcctgaaaggaacccagtgccctccccagattatacccctggaggtattgcaggcatcggatcctccaccgctcagtcaggccccgacgggggtctccgccaggcttggcccctcccccaaggtcacccaacttttccctctgtccccgcgcccggcccggggcgagagggggtggcgaggtgggggccgggtggggcgccacggggccggcgctggccccctcccccgcggggcgggccccgccatgcattattcattggccagagccgggctgcgggcgcgagtgctgatgtcaggcaggcgcgagtgcggcgggcgcagcggcggcggccgcccagcagcccgggctcgggtgggggggcgccgagtgggggtggcggccagcatgctgctcggctgcggctcggcctcccacacccgcggctccctagtcctcgccagcagcggcggcggcagagcagcgagcggcgcccgcgtctgcagcggcgccgggtccgagcgcgcggcgcggcggtgggggtcggggcccgggcggggagcggggaccgggcatggcgctgcggagaggcggctgcggagcgctcgggctgctgctgctgctgctgggcgccgcgtgcctgataccgcggagcgcgcaggtgaggcggctggcgcgctgccccgccacttgcagctgtaccaaggagtctatcatctgcgtgggctcttcctgggtgcccaggatcgtgc

SEQ ID NO: 31748 - DNA, 2300 bp, Homo sapien
tcattcaaaaaaaaaaaacactacaaatgttagaaaagaaatatggaaagctataaacaaccttaatggattttgaactcttacaaccagatatgtttattagggtaaccgttcctaagaaaacgtatagcctgtgttagtcacccagaacctgacagggtaacccccacttagtttttactctattgtctttgaaaagcacctgctgagataaaattgtttccatctccctgttgcatttggcttacatatccattagagcagggaagaagtggtttacaaactgacatttgataatctaataagataaatactgctgccattattttgaaccaaaaataaataaacgatgtatctcctgtactacttaaaaaaagatacctgtaatgacgacgagcaaccagtgcggatgccactctcccttccctttctcccacaccacaattgcctaagaaattgttgctgtccatgattgcaagttcatgtaaaaagagttcaagtgtactttcatcccagccattctctggacacttgcccttaaaaaaaaaaaaaaacttatgattatatttaataaaactaccgttctctagaatactacaggaatacagtttttctttttaacgtgtattttgccacgctgcttgttttctaaaattcaagcataaattcaccactgtatagagaccgcaaagaggcaaaacgtttgtacatttgattacaattatttacagatttcgagaagtgatgataaatgcatacaatgaggtttactgagatatttaaatttccgtaagtgaaactaactgaaaaccaatacaacacatccccagtgaagatgcttcaaaccagggcgttacgactggggcggtgggacgtggagaagggcggtagttgtcaaacttcagtgaaattttggccacgcgctgtagctcactcacgcctgtaatccgagcactttggaaggccaagaatggccgatcacttgaagtcaggagtttgagatcagcctggccaacatggtgaaaccccatctctactaaaaatacaaacattaaccgggtgtggtggcgggcgcctgtagtcccagctactcgggaggctgaggcaggcgaatggcgtgaacccgggaggcggaggctgcagtgagccgagatcgtcacactgcattccagcctgggcgaaagagcgagactctgtttcaaaaaaacaaaacacaacaaaacttttaatgaaattaaaatacatgaacgctggcaggagggagacctgtgaagttccgcggaaagctcgtggttcgagttagcatacagtctacaaacaccattatgtgttctgagtcgttgagggttggtgaaagatggaggtgcgaactttgccctttccgcgaataaaaaagtacactgggactttccctcacttccgcatcccgaagttagaaacagcgggactcaaaaccccgaccccaacaccccctcctaacaacaccatttggctttcactggctttggcaaggctgagaaggcacagaccgcagtcggtcagctagggcaagccaagctgagacagacttgggactagtctcaagcagcgaagagctgccggtgaggcagcaccagcggggacgcccggcggagccagagccccggggtcgcggcggctggggaggggaccgacagctcggtaccttctccagaagcagccgtatgaggtgctcatgcgagcggcgggcctcacagccctgccgcacgtaagccggcgacaccagccgctctcccgccgcgaagctctcgcggttcatgacagcggtggcgacagtggcgaataagcgggagcactagctccacacgccagacacacgacggaaccagaatgcaactcgccgcctggacggtacggcagcgccttgggacaaaaaacaaaacaaaacaaaacaaaacaaaaaaaacacttctcgttcgtgcacatgcgcagaccttctcagatggcgctccaggaggaagttggcgtatttgagcatgcgcgagggagtccgcgcttttcgctgacttttggcaaaggaaggactgaaattagccccgccccgctgcggctgattcgtctagttaaaccctggtgttcctgacacaaacttcaggaaaggattttgcacttgtgcagaccgggcgagcagagtaagaagcaggtacgtgggtttttccaagttctgtgtttcagtcctgttggatggttgagatctgtgcagggtctgtgcttccgccttattcaaactgtcagatgccagaaccttcgatctttacttt

SEQ ID NO: 31749 - DNA, 2300 bp, Homo sapien
tttgcatgtgattgacaaagcagctttgaaggcttttccaaagaagaagttgcaaaaatagttgcattttgagaataggaacacaactttccaaaagtttgaaaaatactcattttagaaagtatgctaaattcttgttgttttgtggtttacctttctgtttaaagtagttaaatgctctatgtcattcaacaaatatttatcaaacagctattatgtatttagtgctgtgctttgaacacagatattggtatagcccttgtgaaccaggagttcacagtctagttgagacagaaaattaacaattgaaatgcaattcaacaaataccataaatagactgatttatattaatagctggatgccatgggaacatgcagtagaaacagtgatgagctggtacatgttgaacaactgacttctaggggagtgggttggagtgtaagggcctgattagcggtgtttactgatttccatggtgtaaatgctcccaccatggccaacgtgacatcatcaaaagaggagttggaagatgtgcagtagtataacattacattgaatttccaccatatagataaaatgcatgtaaataacctgaagagcatagataatagtaaaatgtaaaataattaggaagtgacaaattttgagtatttttacttttgcttgtaatataatttttgagtggctgtatttgaaaactagctcacaaaattactgaacatttaacaatcagctcttgcaagtgggtgtgactcagtgcaaatggacaaaccaccaggtgaaagcaatgtcaggaattactgtaggctcacataagatgaagattgtaaggaaactggaggcagggatctccagcagtgaacctctaagttgttgaactgttacagcactgccaggttcctatgccggctgtgcagaaacagaccagtattccgacagcaggcttgcagcagagaaagttttaataatcacaagttacaagccaggaaacaggaagagttctcaagcttcaatccatttcatcaaggggttctaggcaaagttttttaaggggatttgtggagggtgaggggctggaaaatttggggttatcgattcgttggggtaagggagatgaaatcattaggatgtgacaattgcattcctccatgaatcagctttttattgggccttccagacaagttggcgtccttagttttgttggtatgcgggacctaaagaagcaatgcaaacagaaagcttatcttctcataatgtcttagattttatcttcagagcagaaaaagaatgaagagtcttgtgacaagggccacattctcctggggtagtaagtagcaaccagctacaagaaagtcggccacactgcaagctggcttaataacagcagctgtaagcctagttggatttttttcccctccttaatcaattttacaaaatgttcttggggatagtttcagaatggtcaaactaattcattaattcaatatcaactttttttttaggccctactttattctgggcactgttttaggtgcccgggggaagggggcaccgcagcaaaaaccgaggtcctgccgttaggttagagagtttacattcatgggtatgggtgtgtgtgtgtgtgtgtataaacaaacgtctggcatgtcacgtggtgagtagtaagtgctatggctaaacagtagtgtcaaggggaaaatgagtggggcactgctatttcctatggggttgtgaggcagtaataagtgtggaaatgtatcaaagtaaagatcgaaggttctggcatctgacagtttgaataaggcggaagcacagaccctgcacagatctcaaccatccaacaggactgaaacacagaacttggaaaaacccacgtacctgcttcttactctgctcgcccggtctgcacaagtgcaaaatcctttcctgaagtttgtgtcaggaacaccagggtttaactagacgaatcagccgcagcggggcggggctaatttcagtccttcctttgccaaaagtcagcgaaaagcgcggactccctcgcgcatgctcaaatacgccaacttcctcctggagcgccatctgagaaggtctgcgcatgtgcacgaacgagaagtgttttttttgttttgttttgttttgttttgttttttgtcccaaggcgctgccgtaccgtccaggcggcgagttgcattctggttccgtcgtgtgtctggcgtgtggagctagtgctcccgcttattcgccactgtcgccaccgctgtcatgaaccgcgagagcttcgcggcgggagagcggctgg

SEQ ID NO: 31750 - DNA, 2300 bp, Homo sapien
atctcaaaaaaagaaaaaaaataagtataacagaaagtcaatggtggaatgaaaatgaaataatcagaattattgaattaatccaaacgaaggcaggaaaggaggaacagaggaaccgaaaaggttaaagcaaataaaacccaaattgcaaaataatagatctaaatccaaccacatcattattacattaaatgtaaatggaccccaaactccaattaaaaggcatttacaggccaggtgcagtacctcacacctgtaatcccagcactttgggaggccgaggcgggtggatcatctgaggtcaggagttcgagaccagcctggccaatgtggtgaaaccctatctctactaaaaaatacaaaaattagccgtgcatggtggcaggcacctgtaattacagctattctttctttaaagcggagaaggcatcagggaagagggttgtaggtggtgaagcaaatggttacatttttgctagactttaggtagtgcccagtaactctatgctatgcataagataaggtgaatattcaaagaaaatggagtaaaggaagttaattatacagatatctcaggtgaaggaatgattgatcttatccttgttctgcatctgggaagataagcttgtaactgaatttatccatgtgaaatttaacagactttagttgtaccagtttgatttaggttgcagacttaaagttatacaattgacacgtccttgttttatggaaggatatacatcttgaaaggtttaagggccagtaaagaatttactatgattaatttgttgaggacagtcatcctgagactgagatgcataaggcttttttttgcattttgaggagggtctggctaacatataaagttttaatacaactatgggaagtaacagctatccatttgggaaaagcattgtagtgttgagtgacttcagtctccaggcttaactctccctttgacataacaagttgggggtggggggtggttctgagatttttattttcctttacagggtcaaagaggaaatcataaaggaaattaaaaactattttcagctgaaggaaaacaaaagcacagtagcaggccaggcaaggtggcttatgcttgtaatcccagaattttgggatgctgaagcaggacgactgcttgagaccaggagctcaagaccaatctgggcaacagtgagatcccatctctacaaaaaatttaaatttaaaaattaacaggatgtggtcgtgcacacctgcagttccagctactgtgtcttctacagtttaaagctgagaagatcccttgagcttaggaggttgagactgcagtgagctatgattgtgtcactgcactccagcctggataacaaagtgagaccctgtctcaaaaataacaaccaccaagaaaaaaaaaaaggagaattcagctaaagcagtgcttagagggcaatttatagccttaaaatactagcattggaaaagcagaaagatccagaatcaatcatcttctactctaagcaactagaaaaagaagaggaaatcaaaactcaagtgagcaataaagagcaaaataaggcaatggaccagaaaacagaaaatcaatggaaccaaaacatgacattttgaaaagatttaaaaattgataaacttctagctagattagtcagaaaaagaaaacatacaaactgccactatcaagaatatctgaacaaagacaaggtccctgccctcctggacgtctactggaggaaagaaatgtcatacaattaaatctatagttacagattatggtaaactctgagagagaattctgtcagggagaagccgcttttggttgcaggagggcacctctttgaaaattactcaccttcccgccctccactgggagtaaagcgagctgtgcccagcttctccccgcgctcacggaagcaggtggcggccccaccccacctgacccctcaaaagccccgccccctgttcactcccacgtgccccgctgccgccgccgccgccgccacgacccttctgcgcaggcgcgggggtggtgcctggcggaggcgcgaggtggggcgcggccggcggcgaggcgggacaaccgctgggcgggcgccaagcgtgcccgtgcgctggtgaggtggcgtccgttctacccggtcgctcccgttccgcgccatgcagagcccagtctctggcacctggctgctctgatctggtctcagcgcggagggagcagagggagtccatggaggatccctccgagcccgaccggttggcgtccgcggacggcgggagcccggaggaggaggagg

SEQ ID NO: 31751 - DNA, 2300 bp, Homo sapien
ttttatcattttgttttagatatgtgacttatgaagaatacttagctgtttttttaacccagtctgagtcttttaataggtgcactttgtagtttaagtctcaataaactactgatacgcttaagcttttcctgccctcttatttttttcctattaaacgtgaattgtaatttgttcttttttgcttgtcctgtcttttattgaactgatttgaaatgtcttggttccattttattattttctcctaatggtttggaacctttatgcaaattgcatttgtaaagggtttaaagggtacatctaggaaattttaccaaacatgcagttggggattaaaggttggagcttgaaaaggaattggtagtggggatatagtttttatttctttttctttttctttcttttttttggttttctgggatatgagagagaggaaatagcttttaaactgtcatcttgttgatggaagtcatggtagtgtttgctattactgaggaaaatcacagagaacaaacactattgcctagcacaatgccaggtacataagtattcagtgaatgttttatgaatgcttaaataaatagagaagagaaaggactaagtgtggaatcaggggtaacagtgacattgaaagaggggaggaaaaactagcaaaagagagaaggagtagcttacaagacagaaggtaaacttagagtggtatctccaacaccatagaggagagaatttcataaaggagatgatagaaaacagtgctacatgctacagagagattaggtagcatgacaactgcaagtgagcctttggacagacccttgggtctggtgactggtggccttaggagagagtgtttagatagtagtactagaagttgagtgttgggattaaatgtagaggcagatgaaaaataagggcctttcttctatgaaattattcagggaaaactaaaaagaaaattggacatatctacaaggagatgtgagccaggggaaatgctttctttagaatgaaaagtgaccttcctactgtgtgcaatgagatagatcaagaagtgagagccaggcgctgaggcgcactcctgtagtcctagctacttgggaggctgaggcgagagaattgcttgagcccaggagattgaggctatagcgaactatgattgtgccactgcaccctagcctgagtgactgaggaggaatgactccaaaggcagatttcttcttcagggctttcaaagtggtaggatccaccaaagctggggattctcattggatatgctcacagtagctctgtggatgatcatgtcaaaaaccttacactcttgcaggaatctgaatatgcaccctctctagaagattatacctgtacaaatctctctagtcctggcgtagtttagatttaatggtcttcttgagggagaattagagatagcttagagtcatggatcttttgtctcttaaaatgactcacccatttacctcctaatgatttcaaagtttagaacatcttctgtgtacaagtaagtggtcaatttctgatgatttgtagctgtggaggctaggcagacctcagctgtggtattcaatctgtgcccgggtgcggtgatatgcatctgtagttccagctacttttgaagctgaagtgggagaatcccttgagtccagaagttcaaggctgcagtgagctgtaatcttgccactgcactccagcctgggtgacacagtgagacccattatcttaaaaatatataataataaaaacaatctggggctgtgtacaaagtataggtattcatcagtttctgaactgaggaaccagatagactgaggtacatttagagctatttgagatagattcattatctaaactcttactctttactgtctaaaactcagagacattactagtttactacctgaattgactgtccaaatctgagtaatttggattgcagtgggtagttgtactctgattaagttcttatcctgtccttttttggggagaacctaggagttgtaggaaagaaccgggaaaaatgtaagtctaaataaaccatttcctaccactgattaggagaatgcttttttctattagatccatttcactgggcttggcttcctcaagcaaaagttcccttttctgaagaaataagaaatttgattctaccatatatttctgacatgaactttgtgcaagatttatgtgaagatctctatgaactttttaaggtaagttaatgcttagtttgattattgcagaaaatgaaatcttaaaatagaagagactgcttaatagagctgatt

SEQ ID NO: 31752 - DNA, 2300 bp, Homo sapien
gaggttgcctcacagaatcagcattatttaaaagagaaagaggaaatacagactcagtaactctggttttacgagttacaaattcacttgcaaattttataaacaagtcttttaagatcacaaatttgtacatctaaaacaaatttgtaaataaaagtgctagagttcatgtgagtaggtagttaggtcttttagtttttattctgcctagggcactgtctcaaggggtcctgagaatgtgtgcccagctagttaggtcttgagatagtgtccgagagtatcatcatcatagctgtagaaagtttcctatctcaaaagaccagacatgtgcagataatatacactgaaaaagtgttctggacaacttgaaaaaggggacactggtacatcaaagatacagatgctactggtgcagatggagaatttgagtaaaaccattacatgaaatgtgaaagaaaaacagccatgtttttacagtaataaaccatagcactcaatgtgtgaagttaactaggcacatgccccaatggttctttaaataacataagagactatttcgtctacaaccatagacatgtggctgcgtcttgattactgcactataagacttgaaattgagtaggctgattcctcccacttcattattctttttccaaaattgttttagctattttagttcccttgcctttccatataaatttcagaatattgtctaaatgtacaaaaagaatctggctgggattttcatagcaattgtgctacacctgtataagcattaaacctggggagaactgatatctttactatgttgagtcttctgatttatgaatgcagtatgtttctgcatttgtttattctttgattttttttttttttttttaagacggagtctcactctgtcacccaggctggagtgcagtggcacaatctcggctcactgcaagctccgccttccgggttcacgccattctcctgcctcagcctcccgagtagctgggactacaggtgcccgccaccacgcctggctaatttttttgtttttgtatttttagtatttttagtagagacggggtttcacggtgttagccaggatggtctcgatctcctgaccttgtgatccacctgccttggcctcccaaaattctgggattataggcgtgagccaccgtgcccggctattctttgatttttaaaaaactttaaaaattgcttatttattttagagatgtcgtctcgctttgttgcccgggctggtttcgaactcctggattcaagcaatcctccctccttggccccccaaagtgctgggattacaggtgtgagccactgcactcagccttgattttttttaatcaagcattttggagtttttagcatacataaagctctgtacatatttcgttagatttacacctatttcatttatttgagtgattgtaagtggtattctattttttagtgttcttgtgatcattgctagtatttagaaatccagttgatgtttgtgtgtttatctcatatcctgcaaccttgctgaactcagtttaaaccggaggtgttttcctgatagattctttcggatttttaaaatgtggacaatcatgtcatctgcaaatcaggacggttttctttctttcttatgtataaatgtcaatgagtatgcaactatgatgtgcaactttcagcattgtccaaaagttacagaggatgatgcagtgactgtgactttgaaaaacaaagaatgatccttaaatcacagctgctgcagccatttcagctatttggcagaggtggtaatgctgccttttggacctacaatacaaccaagtctttgttcgaatcatctcacttcctggctatattcttaagaaaggagggtgcttcatgcgctgagctcatggcacaggtcccgcaagtgacctgcgagccccaccgctaggggccgcttaggtgcagcccccaggtgggcggggactgcgtttcggggcgtggcctccgccgcggcagcccccgcccaagctcctcctaagcgcctgggggcgctgtgggtcgctttgggtcgcgggggcgctctttctcagcattcttgtttcgtactgaggctttcgggacggcggcgggaagatggcggcctccaggaatgggtttgaagccgtggaggcagagggcagcgcagggtgccggggaagctcgggaatggaggtggtgcttcctttggatcctgccgtccccgccccgctgtgccctcacggtgggtcagagtctgggctcagcctaactgccgggcgctgagggtgtga

SEQ ID NO: 31753 - DNA, 2300 bp, Homo sapien
acgctgctaattattaaaataacagtaacagtacttaacattttagtatatgctatgtagctggcattgtattaagtactttacatacatcatcttattgttatccagtcctatgtggtagaaattattacttttaccattttacggatgaagaaactgaggctcagaaaggttaagtaacttactaaggatacccagctagtaagcgagagacacatagtttgaaaccagaccgtctgactatagagcctctgctcttaaccacagttaatgggaagaggataaaccagtgctgtcccttacattaaatattcaccatggatgctcaatcagttacagacagtaatgggtaactgagtagaaatacaagcaaagaagttgacagtgtcatgacttggttcaagaagtcataataagtaaggatgtgtctcagattttttttcagtctttttaccaggttacaaattcccaaggatgatgtgagtcatatgtaaattatgtgtaataaaatagttggagttcaaaatcctattgagataacaaaaaggtttctatattatatggaaaactgagaaatcagcaacgcagacattaagacccagatacataaatggggaaaacatatggacagacggtacaaatacagttaagaaatatagaaagttccaccttataagtagtcaaatgcagatttaagtcataatgtgatatgagtttttcctagtaaattagcaggaatttataaaatgttaatacccaaaggtggtactctcatgcactgccaatggctttttaaaatactgtgttaccatggaatactatgcagccataaaaaatgatgagttcatgtcctttgtagggacatggatgaaattggaaatcattctcagtaaactatcgcaaggacaaaaaaccaaacaccgcatgttctcactcataggtgggaattgaacaatgagaacacatggacacaggaaggggaacatcacactctggggactgttgtggggtggggggaggggggagggatagcattaggagatatacctaatgctaaatgatgagttaatgggtacagcacaccagcatggcacatgtatacatatgtaactaacctgcacattgtgcacatgtaccctaaaacttaaagtataataataataaaataaaataaataaaataaaataaaacactgtgttagcaaaacaaaataattcaatcagtaaataaatattcctctttcctggcactgatttagtaaatatgaaatgcatatactttctctattatattgaaaagcatattttattaagctagcctgcgttagacaaaaaaaaaaatttgtattacttttttttttttttgagacaaggtctggctatagcgtcccggctggagtatagtggtgtgatcttggctcactgcatcctccgcctcctgggctcaagccatcctaacacctcagccttcatagtagctgggaccgtaggcatgcatcaccacgcctggctaatttttgtattttttgtagaggcaggattttgccatgttgcccaggttggtctcaaactcgttagctcaagcaatctgcctgcctcagcctcccaaagtgctagaattacaggtgtgagccactgtgcccggcctgtattaaatacttaaaaaaaaatcagctacagaagaaaataaatgaacagctgtcaagcagaaatgttgatttagtattctccttaaaattattaaccatgagggatgtatcttaattgccaacccattgcaagcttaaattgcataatcatctgtcagtaacctgattgtttatgtataacctcctggtacataggaacatgtgtgttttatatatgagtattctttggttttactactggttaattaaacatgggaaaatcacttaagtttgttatttattcactgttacagattccctgaaatttttgcaaattattctttatttcaaaaaactaaaaaatgaaattttttaaaggtgtgattttattgttttaaaatttagtttatatttgtctactctatagctgtgactgggcaaataactctgtaattattttacaggtattcacagttttatatggaagatagcttttgccattataatatgtttaaccatcatttctttgatggaaaggtaagagctgtgaccattatctcattgttctcttattgtggaataacagatttcagagtgcctcctttgttctttttctaaattccctcaaggtcaaattgtggctgttctaccatttactgatatttatttttgt

SEQ ID NO: 31754 - DNA, 2300 bp, Homo sapien
gggaagacaaaagattggacacccctggtctatagcagcataaaactctgctgtttcctgcccacatctggaactccacacttaggctgtttcctttgctgtaaggcttagaaaatttatattctgtgaagacttaatgtgcaggtggttatactctgtcctttgcagtacggtgtttatgcctctgggaacagtgattttcacgtgctgtatgggtgtttgtattcaggtaagttccaggaaaatggacattcaatttccgtaagaaggttaatgtgcatagatactagacccccaccaggtgatccattataactgccccaaaacactaacacctgaaaatgcattttgtgaaaaacaaaggcaaatgcatttttaccttagaaatgttgattctggaagagttgggggcacttggtaagttgtttgtggcaaaggcaagggctgcaaagcccgtgacaggaagcagggtaggtataaagtcaaggattaagaacagtacttggcacaaaatagttacttgatgctgaatgaattagtctccctccgtcatctacttcccaggggctagatccagacagaggtcaagaagatggggcctgttgaaagttaaaggacctgccgtctgtttcttctttgaacaagtgaaaggtagtaaaaagtagatggctttctaccataggttttaagtttaagaaccctaggatggtactgtcacattctcttagggaggtcatagctgtgggaactgtcaacaggttgactcatttaaatgtgtcctacataaagcaacatcagatgagttctgatttacaagtctgccaggctggcctgtgagcctctgggcagagttcccgtcccatgcattgctgtagcctcagttcctccacatagtaaatgcccaagtacctatagaagaaatcgtgtgtgagcccacactctttttttatattttagagacggagtctggctctgttgcccaggctggagtgcagtggcacaatctcggctcactgcaagctccgcctcactgcaagccccgcctcactgcaagctccgcctcactgcaagctccgcctcccgggttcacgccattctcctgcctcagcctccccagtagatgggactacaggtgcccgccaccatgcctggctacttttttgtattttttagtagagacggggtttcaccatgttagccaggatgggctctatctcctgtccttgtgatccgtccgccacggcctcccaaagtgctgggattacaggcgtgagccaccgcgcccggccctgagcccacactctttattcgttatgacggtgctgcaactaccaataagttgtgagggttaaatgggatgagatgtcacagtattatttgcctgttagggaggttttagggcacgcgcctcttctctccaaattggaatcacccaaagagttttagtaaatactgggcccatccagggttaattttcttctaattggtttggggtgctgcttggacagggggacttttaaaattctatactgacccaccaggactgacatgagaactactcgcttagtaactgttagaggaggcgccagctgatcaggacctaaagttcatattctttttcatctccccgttgtcgctgaagcctaccccataaacccctaccgtccctttgcccacagcagagaatttccgggaaaacgggaaaggtatgcaagcatgcccacacacgtgcacacacgggttcccaaaagacctgcgtgtggccgcaggggcctgccccgcccttctcgggccctttcaggtcccggcgcccagcgatcccaccagcacctgggtccggcgcgcggctccctccctctccgcgcccctcggggctccctgccccgcccgcgtgccccacccttcctagctctgccccatcgctgctccctgccccgcccacgggccccatcctacccccacctcgatccgcccctcgctcctccctgccccgcccaccgcgccccgtccctgtccgccccttctggctctcagcacccccaagaccggtgcgcgccccgcccctcctcctcctctcgcgaggcagtcccgacgccggaagtgcctggagcgcgcgacagcggcggggcggggcggcctggaggctgtggcgcgcggccggcagagggaggggagaggccactggggccgtgttagtctgccggtggggactcttgcaggtacaggcgcggtcggggctcctcgtggagagccgggggctcctgccggcctctgactggggtgtcgttgcagggccgtcc

SEQ ID NO: 31755 - DNA, 2300 bp, Homo sapien
ctttgcttaatttttctgtagataaatataaagtatttaaaaattttattggtgctttaagaaaaaaagtgaattgtttttgtaacatatatgctcctcattgctttttcttttcccccccagacagtgtctcactcttgtcgcccaggctggagtgcagtgcagtggtgcaatctcggctcactgcaaccttgggctcactgaaaccttcacctcccgggttcaagcaattcttctccctcagcctcctgagtaactaagactacaggcgtgcaccttcatccctggctaatttttgtgttttttggtagagaaaaggtttcactgtgttggccaggctggtctcgaacgcctggcctcaagtgattcgcctaccttggcctactacagtgtggggattacaggcgtgaaccactgcacatggccttcattgcttaattttgtccctacataaatataaaaaagtacttaaaaattccctaggtggggcatggtggctcacgcctgtaatcccagcactttgggaggctgaggtaggtgaatcatgaggtcaggagttcaagaccagcctggccaatatggtgaaaccccatctctactaaaaatacaaaaattagccaggcgtggtggtgggcacctgtaatcccagcttctcaggaggctgaggcagagaattgcttgaacccgggaggtggagtttgcagtgagccaatatcgcaccactgcactccagtgtgggctacaagagtgagactccgtctcaaaaaaaaaatccctgaaagcagataacttagagatgacagttgtttctgttttggtgaacatcttttccaatatttcccgataaaatacatacatgtagagatctatatataattttatcaaaagacagttatttggtgcataccattttgttgtatagctttttcttttttttcccccccctcactttttcccatgtcagtgtggatagattgaccacattaatgttaattgcgtactaacccactatatttatatattgtaatttactaaacctgttgccctttggtggatatttagatggttttcagtttttggctttgataagcaatgctgtgtaaacattctgaacactgggaagaactttgccagtagctccttagattaacacccaaaatggaatttctggaaatgtcttaaacattctatgctcattctgtagtcattttgcttggagtatatgtagaatatgtgtaagattagaggacttttataagtaaagttatgagatcttgcactaaatcattcaaaaacatggaatctcaaagataaatcacaaaagtgtgcgttaaaatgtttataagtagttgtattattcattttttaaaagtctcatgtttttggacagtaaaatgtgttttttgttagataatgatcatttcaagttttaaattgtttttaagtaagaaggctgggattggttcacatctggcaaagttgcatgtgatggtgatatgcagtgaaactcactgccctctttttggaaattcttaaattcttaaattgcacgttaggaagaaataatgacttgtgtggagaaaccatactagaaaattcagccacactcaaaggaagatttatgtgtgtttaatggcctcgtttcccaccatcgtttagaaacataaaagaggaataaaaagcattccaagaacaaagcagatggaatcattgcttaccttttagacatgtgataacatataattgtttatttgttgaagcctcttttgtattttctgcttgacaacagggtttcaagtctggaaactttgatgtgtaagacgttaagtgtgctacgtgagaaagtagtagatctcctataaagtttgagcacttgaaaataagcttagttaatgtaactacaatatatgcaaatatttctttttttagtttttaaaatattgaaggatgtttaggtcaaaaattgccatgatgaagatgcacttaaaagagtaaaactgggcaataagggaaatacccatttatttttctcaattgttacactaatttattctgattgttttttcttgttttagttttggcctttgctcttgctgataccaagaaaattgttttgtgtgatgtagaaaaacctgagagcttacactctttttctgtggaggctccagtttcctgtatgcattggatggaagtgacagtagaaagcaggtaattagaaaaacttatgtagtcatagggtattcatgagatttttattttttgaaatggaaacttaggagtatctgagtattgggtgtatg

SEQ ID NO: 31756 - DNA, 2300 bp, Homo sapien
tacatgaagcataaatgaatttcgtgtttagacttgagttccatccccaagatatctcattatgtatatgcacatattccaaattccaaaaaaatcccaaacacttacagacccaagcattttgggtaagtgaaactcaacctatagcaatttctgccacttgtatttggttgctgcttctgtgaatgaatgaatgaatgaatgaatgaatgagggagagaattctttgatgccaagaactttgcatatagtccaaattctttttcaaggcagaacctattatgtattgccagagagtcttgaggtcagtaaggagatgcattggtgcaagttggctattgaatggagggaggataaaggtacaggagacgctacttatttactgtatttaatcaggatgcccagggaataaggcaggatgtctggagagggtcagtggcagtgcgtcaagagtagtggcacctggaccctgttgctattttggctattattgatccagggaactttgccaggctaaaaataggtcctgtcctcttttatttgccccacatcttacgtgtttgaataagaaaggcctgatcttagctacagacctaatggaactcactattgagttccataatgaattctagtgaggaaatatcagtgaaactgttttcttacactgcaaaaatcaagtgctaaatacttgatctgtgtactttctttagggtacatgggtcagtattgtgtggtgggtaaaagttggtgctctgaaagctggattttctgggttggaagctgctctactacttcgtagtaacacggctgagagcaagttgcctaacctctctgtgccatagtttctcatctgtaaaatgaagatggtaataatgctgccctcaaaaaactggtgtggagattaaataaattaatctacataagcacttagactaatgcctggcacttagcacagaagcagtctgtaggttagtgtctgagcactttttactcagtgtttctgacaacaaaatgagagaaatttttttcctcctgacaccaaccaattttgacaccaacggggtgtcctacaattcaattctgacacgaattacagatagttagcgcagacctcacaggataaggatgcagtcccacaagactgccctcgcgtcaaatgtcaggtctctgggtccccacatctcttgggtagccatgcttgttgtctgacttggctataaggttaaggtcaagagttcccagaaccttcctccctttcaggttggataattttgctagaatggctcacaaaactccgggaaacatataatttttgtttaccagtgtgttgtaaagaatatgactcaggaacagccacatagaagtgctatatcaggcagggtatggagagaaaggtgcaaagcttccatgctctcccagcacctggacatattcaccacccagaaagttctctgaacctcattgtcccagtgtatttctggcggtttcattatgtagacatgattgatgaagtcattggccattggtgattgaactcaacctccaagcccctctctcttccttggaggctggcgggtggagctgaagtttccaaacttctaatcaaggcttggtctttttggtggccagcccctatcctaaagctatctaggtgccagccaagagttgcctcattaaaacaaaagatggtagtcctagcactttgggagggtgaggtgggcggatcacttgagatcaggagttcgagacctgaccaacatagtgaaaccctatctctactaaaaattagctgggtgtggtggtgtgcacctgtagtcctgttactcgggacactgaggcaggagaatcgcttgaatccgggaggcagagtttgcaatgagctgagactgcaccactgcactccaacctgggcaacagaatgagactctgtctttaaaaaaagaaaaaaaaaaatgttcctgtcacctttatcactcaggaaattccaagggttttggaagctctgttctaggaactagaaacaaagatcaatgtttttctgtgataacatagcatctgtcaccttgagaacttaaaatgttaatgtgattgtagttcattttatccagcatggctttatctaagggagggcctacaaagcacagtggaagagggtgggcattagagtcagacttgggtttgattgacagaactagatacttagttattttcacactgggcaattgcctaaacctgttaagcttcattttttttttcatctgtaaattggagaatatggtgtttacttcatatggctattg

SEQ ID NO: 31757 - DNA, 2300 bp, Homo sapien
gttaagcttcattttttttttcatctgtaaattggagaatatggtgtttacttcatatggctattgtaagcaataaaaaaaaaggtattttaaacacctagcatagcaggtgttagtgctaaattatatattactttctcctgataaagtaaccttttaaaaagtaaagagcttatttatatagagctagtttccagtctcttgttttagagacttaaaaaacagtactggactgctgttgttgtttcactgtggcaaagaatagaagaatgaattttatttcatcatatatttgatggttcccaaatcattccttgcttcttatagccagcagaaacctacagttggattttggtgagtctaagtttgtagtaagtgagattgtttttagtgagctgtcagcgggggttgatgaaaggcagaagaccatggtcgtttttaatgaggttgtgtgaaaatccaatgaagtggtcagtgaaaattctacctcgagataaactgtgcagactggctctaacagtagattattttcttctaattataagtttgctatagcttcttttatttttgtttctgtttttgtttgaaaccagaaagtcctttgctgtttccttattatcctcgaaaatcattgcattttgtgaaaaggcggatggagaatattattgatcagtgtttgcaaaagccagcagtaagtttgaaagaaatgcatgtctttgtgtaggagcaatagtgtctacagtatgtggctcacttatgtaaatgatcttaatttttagaatgaactatgaaaatgttgatagtcaactgtttttgattaacaaaagtaacaatttcatatggttcaacctaatactccaacttaagtttcttacacacgtgtgtgtgtgtgtgtgtgtgtataaagattactgaaggtgttggcatcttgagtattttatttgttcccagaagaaattcattgtaaacagtcttagttacagagctgatgtgtctctgcttactactgaaggatgtgaatgaatggttgttatgagaccagagggaggtggtcttaaacctgccatgtgcttagcaccaaggtccttttcagctcagaattttctctttttccttactgttacaattgtcattaacgtttcttatgtacaaggtttggtgatgtaggcgatttttttaccacattcgaacagtgatggtcagtcactttctgtagagtatctgtgtgcatattaacgctctaattatattttaaaatcttattttatataggatgtaattggaaaatcgatgaatcaagcaatctgtattccattgtatagagataccagaaggtaattctgtttacctattggatggtgtaattccgcagccaatttaaatttttctcatttctttttcccttttattttagtgaggattctacacgtagattgttcaaatttccttttctgtaagtatatatttcttccctatcttgagtgaacaatacaattttgttttatccatcaatagttaaaaaatattatgacaattttttttcttaggtggaataataaaacttcaaatctacattatcttctttttactattctagaagattcactttataaaatgtgcatcttaaggagacatactgatatttctcagtaagtattaatctgaagtttgaatcaaagagataagattttattatttgtaagaatgaagcatacagccttccagcatttcagattttaaactactttgtgacttttagatgtgtcatttaattgttagttttcatgtcattaaaagggtaacactgaattaggaagttatatgatcttgttttagattatttaatttttattggcatataatcattgtaggactttttttagagttaggaaaaatatgacagctcaggatattatacttcattttttagaagttaaaaacttccgaaaaactaaaagttaaagaagttttaactttttagaagttaaaaacttctaaaagtggctgccttatagaaatgatttttgcctagggttaagtatgcttttcattaaacaagaggccttgcctaacagagacttactttgaaattgaaagtagaagttctgaaaaataaatcatatttagaacgccattggtagcttaaaaatggttttaaacctgaatttgaagaaaatgttgagaccacgatgtaaccaaaaagaaataattgggttatttctattccaaatgtctttggtgactgtgtgattttaaaccaaattggtttatctatctaggcatttaaacaagttctcagt

SEQ ID NO: 31758 - DNA, 2300 bp, Homo sapien
ctccagactttgtaaaaaaaaattatataaattacaatcccaaactagaatcagataccatccctgatctactaccaagatctatacacattaagagaacaatgttcgggattgaacctgttttgcctttttaatcggaacacaaaagggatacctttttctttctccaagtttttgaaattttggtctccctcctacattcactccttgttgaaagtaatggaaaggcaattaggtctgtgtcccaaatgaaagcccacagtcaggaggggattctcattgaggtgactgtcctgttaagacctgctcctgtgaacccccaagcacagggcagagcaggacatgaactaagagccaggctttgccgaatccgggtcgagttcaccgacagcagtgtgtgcagcacgcttcctcctctgcaccctggcagtagagcccttcctcattgtaaagccaagtggtgtctgcagtccgccttgcccagggctggaggcagagctgagcttggtgaacaggtgccaggggattcctgtcatcagtggactatgctttagaagctgcttgttgcaaaggtactggttgatcattgtctgagagttggatctgaaggccaacacccactagcaaaaccatcatccctgtaataacagcaacccaagcagatttgatttctccagtgaaggttctagatgagtctaatcaaggcttcccacccatcttctcccaacaccagagtttccctgtgaaaacgatcatggttaactcgcactgaatactatttatgtgccaagtaccattccacattctttacatattttagctcactttactccaacggggaccattattcccagtttgcacataagcaaatggagccagggaaagcaaggggcagaacagggaactgatttcccggagtttcggcccagagtcagtgtgcttagccaccgccaacaccagccccagagctctaggctcctggaagtcgtgctcccgagtccttccccttgcacagtggagagaactcgatgttggaatgaaaccagctaattccagtagggtgcttccgctgttgtgaggagctgggcaactagtaagctcactgagcctcactgtgctccactataaaaccaggagagtgcgcagcagaggagagggtctgggtttcagaataagaagcaggttttcttcctgctcagcaaatcctgggtaattgtatcatatcccctaaccccttaaacctcagctagagagggcgccagtcttagccccagggaaggctttcgtgtgcacattggagacaaagcctgcccagcagtgcccggcacagaactggggagctgttgggataagcatgggggtggactctccctgggacagatcctatctcacagcagtttggagaactgttgtatacacacgcaggtgacacgaggcagagcaggatgtgaaacgagcgcagtggtttgccaaacccgcagcaggcttaggacggagtggtgagaacagcccccttccttttcctcagcttgacggtcccagcctttcccattgcggacctagagcccagactcccagggcagaaagcgccccacagactgataaaggtgaacaatccaggctttgtttccaagggctttatccctgactttccaactggcttttatctgtgtcttcacgtctctgacctcttgagcctcacaggagctagactagaaggttcaagttcttgaggagaaggcaggggcgggagagccccacttgcgggaatctcgtgcggaccgagtcggggcgggagagggcgcgcaccagccaggctagggcgcgcggggcgccgaggggcgcggggccgtttggggccgttcgggccagttcgcgcggcggggcccgtcggagcttttctctcggcagcctggctggccgcgcgtcttctccgcgcagcgggcgaagtcgcgatgggttcattaaggcggcaggtaggcagtgccccggcggcggctgcggcaggcggtcctggaatgtgcgaggggcgtgatgacagcggccagcctctttgcgcaacaccttcgccatatatacccggggcgctgcgctccacctggccgccgcctccagcccagcacctgcggagggagcgctggtgagtaccgccgccggggcaggggcgcttcctcgctctttcaaggactttgattcacttaattcttgcaaatacctctcggtgctgacttcaaggaacttggctggctttgggccgcagaagtgaaaaacacaaagctctccacaatgttcaagttgtt

SEQ ID NO: 31759 - DNA, 2300 bp, Homo sapien
aggcactttcttcagattcatagtgaggtgcagagtgaggtgcaaaaaaaaagtttaagaattcacttgcatagaggataaaaactacttctttagaggataccagcataggtaactttagcctgcctccaggctgcctttctaagcttgctaatggtacttttccatcctctagtgctcactgttcgggctgccatccccattatcatgggggccaacattggaacgtcaatcaccaacactattgttgcgctcatgcaggtgggagatcggagtgagttcagaaggtaagaggctcaaaaccagcctttgcgacatcagctctattgttcttggccacgctgttgtaactgcttttaaccagccaaagatgacatgcttatcaggttcattcctggagttcctagaagtaaccacagggaggtatggctagggttggatcacatactcaccagctgattagactcagctccctgatcggcagagcagggataatactatctatcactactgagttgttgtaggattaaatatacaacccagcaggtgagtgttcagagcacccagcacattgagttcactaaataaatgcaaactctagctagaaacttagccgctgggtggcggaattgaagcaaggccagttagaagagtaggatttattgggactgggcgtggtggctcatgcctgtaatcccagcactctgggaggcccaggcgggtggatcgcctgaggtcaggagcctggccaacatggtgaaaccccatctcttctaaaaatacaaaaattagccggccgtggttgccagcgtctgtaatcccagctactctggaggctgaggcaggagaatcgcttgaacccgggaggcggaggttgcagtgagtcgagatcgtgccactgcactccagcctgggtgacagagtgagactccatctaaaaaaaaaaaaaaaaataaataaatactgttttgtttggtcataattataacttatttaaacttccactttcggtcagctcaacccatgccaccttttctttgttcttcacttacaagttaataaaaaacaaaacctagtttctgcgtatgcagaaactctgaaactagagcaggtagaatgctggaaactcttttctttcaaaaaggttaatgtgaaaattaagtgtttcttagcctcttctagctagttttttttttttttcagtttttttttaaaaggtaagctgtttcattgaagacataaaaatccagaacagagttttttaaatctggagataagatggaatcgaggaggaatctttgaacctcctcagatggatgcaaaatgttttagccttgtttcccatggaaactattcatgtttcatcactttcaagaacttaaaaaaagtttaagaattcacttgcatagaggtctttttaagttaaatttttttattgatacaaaatatttttacacctttctgggaaacatgtgatattttgttacattcatagaatgtgtagtgatcaaatcagggtatttgaggtgcccaccgctttggggatttatgatttctatgtgtttggaacaattgaaaactccagcatagagggctttggttgccttcatactggtccccacctttccaaaagaaggtagccttcaatatacatgatacaaaagtgcccttgatgcaattcttcgaaacagtgattgctgagctaattattccagccgtaacatgcttgctggcccgcagcttcttcatctggccaatgggaatatagataccagccactttggggatcgatatgagagaacaaaaatgagattgtgtacatgtgcacacttccataggtgacacctagcagagggtggcagatgatacaggtaatgacccacctcacatggtgcccacttgcttagtgactaatctggctgtcggggtttccctcccatagagcttttgcaggagccactgtccatgacttcttcaactggctgtccgtgttggtgctcttgcccgtggaggtggccacccattacctcgagatcataacccagcttatagtggagagcttccacttcaagaatggagaagatgccccagatcttctgaaagtcatcactaagcccttcacaaagctcattgtccaggtaacttagctccttcagagagagaaggagactaacttcctacccacaacatcccctacctgagctgacagatatagagtgtctacaacactattctgggcctggcatggtggctcacccttgttttcccagcactttgggaggccgaggcaggtggattgc

SEQ ID NO: 31760 - DNA, 2300 bp, Homo sapien
acttgggaggctgaagcaagagaatctcttgaacctggaaggtggaggttacagtgagctgagatcattgcactccagcctgggcaacagagtgagattccatctcaaaaaatagaagtaaaaattaaaaaaaaataaatggttttatgactacatgatagcatgctgccattttgctttctgaaagggctttccatttaatacctcaccgatcagtgtttaagtagagaaggatgactgaaatctttccagcaagtggatgctttcatgatttaattttgctaattgaataatgatatgttgatactttcttactgtttttaacttgcatttacttaattactagtgatgatggacacttttacatatactagcttgtgataatttactttttacattttcttttttgtaaattctgtattcttattctttgcctatttatctgttggaattttgacacttttgaaaatttaaaccataattagttctttatatatttatctagcagataaggaaccttaagctattacattgcatacgactattcccctactctattttcccacttattttaatcttggtattattccattgattagagactttaaaatttcataaagctggctgggcgcggtggctcaaccctgtagtgccagcactttgggaggccaaggtgggcggattaactgaggtcagaaggtcgagaccagcctggctgacatggagaaacctcgtctctactgaaaatacaaaaattagccatgcgtggctgtgggcacctgtaatcccagctactcaggaggctgaggcaggagaatcacttgaacccaggaggcggacgatgcactgagccgagatcacaccattgcactcaacaaaacaaaacaaaaaatcataaagccatttttttcttttctcttaatatctcaaattttaagagtgccttcctttcaaagagtgcagaaatagtctattttctgctgttgtgtgagtgtgtgtgtgcatcttaaagatacttaacgcttcatctatttagaggttattcttggcaccatggtggagtttaagatttgagactctgcaccctgtcctcttgtgtttgacgctccagctctgccactttccagctgtgtaaccttgggcaagttgtttaaccactctgtgcctcggtttcctcatctataaaacagggaggataagactacctatatcgatttgttgttatgaggattaaatgaataaatataaaaagcagaacaatgcctcgcatatggcaagcactcaaaacgtgagctgctggtatttttatcatgattgcgacatacgatggttgtgaaagtcctggagtatgcaacctggtaaatgatgattttcatttagattgcggtcagaggcaaggtcagagggaagatataagccattagatgtgatcgtgtcataagggaagcacaaatcaaaaccacagtgaggcaccatctcacaccagtcagaatggttattattaaaaagtcaaaaaagaacaggtgccggtgaggttgcaaagagaaataacacttatgcactgttggtgggagtataaattagttcaaccattgtggaaagcagtgtagcaattcctcaagacccagcaatctcattactgggtatatacccaaaggaatataaatcgttctgttatgaagacacatgcacatgtatgttcattgcagcatgattcacaataccaaagacatagaatcaacccaaatgcccatcaatggtagactggttaaagaaaacatggtacatatacaccatggaatactatgcagccataaaaaagaatgacatcatgtcgtttgcaggaacatggatggagctggaagccattatccatagcaaactatgcaggagcagaaaaccaaacaccacatattctcgcttagtgggagctaaatgatgagaacacatgggcacatagaagggaacaacagacactacacctaagggtggaggttggaaggagggagaggatcacgaaaaatagcaaatatgtactaggcttagtacctgggtgacaaaataatatgtacaacaaacccccataacacgtaacaaaataatctgtatgacaaacctgtacatgtacccctaaagttgaaacagaagttaaaaacaaaacacaaaaaacatgatcctgagttctttcaatggcaacaatccagtttaattggtcaagttctaatggtaagtaccacatcgtttattgcttgtttcttaatctggccacctgctcggcttgtgatggagggtgtgcattc

SEQ ID NO: 31761 - DNA, 2300 bp, Homo sapien
tataccgtggtaatgaaacatctcaaactgcagtggcttaaaataatgccagtttatttctcactcacactgcatgtccaataggggttgtcaggggcaggccatagttgtcacagtcccttaagagtccaagctgacagaggtttccaaaaccattacagtcgggccatggccatagcgccttaccagctggctaacgcttctgcccacaagtgggatatttcactggccaatgcaaatcacgtggcccctcttgacttcaagttctgccactcacccagaaagagggaaagccacaatatttatgaccagctctaaagagtaccatcaggtgcactgatgcatccatcagatagaaaaacaagatgcaccctggggtgcaggggaaattagacagcgtccagaagaccatgaactcagctaggagagcaatagaaagtcatttatggcttgttggaccaaaaggatcaaccttgtctcttgaacatctcttgtctttggatggacttttaagaggtacgagaaagggcagacggctggggaagcaccctctctgcttccctgctttgatttcactatgaagaggagccctttgtgggagcctgtgaaggctgattgcaccaggaggaagcctccttcccataggaaggatttagttttggcttagtgctccctgtgagtgcagcaacatcgggaagagtctctggggctgctaaggaggctgaagcccagagatgggaaagggaaagaaaaaagaaaggagtcacaggcattgacaaagcagacagtacaggggcttttttttttttttttttttgattcagggtctcactctgttgggcaggctgaagctcagtggcgtgatcatagctcactgcagcctcaaagtcctgggctcaagtgatcctctagcctcaacctcccgagtagctggaactataggcatgtgccaccatgccatgccctgctaatttttaatttttttgtagaaatggggtcttgctatgttgcccagactggttttgaactcctggcctcaagcaattctcctgcttatgcctctcaaagtgcaggaattaaggcccaccacacctggcccaagaggctcttctataacaggtctccctcctctctataggggtcttcctcacatttcaggcgatactttgctggaagttataagtattggggaggaaaagggaagagaacgagatgagaggagaagcagaaagaaggaaggaaaacaaaggacccatgtggaactagaatgttaacacacgttgctctggccacgttcctgggcatatgtccttggtctgcagtctttctagtacaggaaggaattccaatgtatagctctgggaatgactctgccagagccatttcctgggtgtgccagagcttgcattaacttttctaaccataggcacttctttcttcctttgttcactaagaagtctttgttcagcagcttctatgacctgctgagctctgctgggttggggggctaacagacagggacaaagataagtaacatcttgaggttcctccctcccaagagcttccagcctccagtctgatgttggagccagccatgtagacaaatgataagatgagagatcagtgctatagaaggatgccctaatgatacagatgtgcagagacctccatgccaatcgctgggccaaaagaaagggcaatacctcccaaaagagtgccatttgaggagttctgattattgacgaagttccagctagccctggtcctgggtacagtagatacacacacacacacacacacacacacacacacacacacacacacacacacacgaaccatttctggcttgcattaagggcttgtatttacataagtccacattcagggctctggcctccagttggaagataaagtgtatctaatccttggttctcaatctaaaacatcgtaaagtaggtttgctctcccacctttcaaaatcttgtgttaagcattatacaggaaaagtcattgttctaaattgctattatctttaagcaacgattggcccagatgctgttctgggggcagcaaggtgtggccaagaatcccgaagcagcaattgagtggtacgccaagggcgccctggagacggaggatcctgcgttaatctatgactatgccattgtgctattcaaggtaagaatcacttaattcgtgctgaaattgtgcaattcttatcagactcctgagcagtttcctgtgggcgggctggcaaacagggagtcgataactgaagaaatttagtatatgcttctgtc

SEQ ID NO: 31762 - DNA, 2300 bp, Homo sapien
gacatgttgcagctccttggagacctttaaaaatctttacactcaagataaatgtcctggggctgtgttaaatacaggatcctttgctttcagtgagtgaaaaagggcacttcatccatttctagacaggccttggggggatgattggtgtaccagctaaggaacagtgtcagtgcttgccagaacaccagttcttcaagaacaggtgctccttaccaaattcttgtaattactctgcctgtgagaccattatcccacatcactttttagctaagtgaagtcacttggaccttgaagcaaagtattgctgcatccagcagtctgtcatcaaaataaacgccataccagacggcttcatttctggttttgaatccaaatttattatgcaactagtctaacatttagaattacattttcatagtgcattagtcagggttctccagtgaaacagaaccaatgggattagatatatataggaagaggtttcttacaaagaattggctcatgcaattatggaggctgagaggtcccacagtctgccgtctgcaagctgagggccaggaaagccaatagtgtaattccagtctaagcctgaaggcctgagaatcaggagagatgaggccataaattccagtccaagggcaggaaaaaaaccaaaacaacaacaaaaaaaaaaacatataaaaaaccctgatgtcttcctgcctcaagcaggcaggcaggcagaaagcaaaaagggaccaatttctctttcctctgcctttttgtcctattgaggccctcaagagattggatgatgcccattcacagtggagaaggccgtctgtgtagcttacctcaccagttcaaatattcatctcatctggaaacactctcacagacacatccagaaatgatgtttcatctgggtacccgatggcacagtagagttgacacaccaaatgaaccatcgcaataagcactgctaaatgttccctgattgcttttcgttttcaaatttgcataggtgattgtgtatgcgtggtttggggaggctcagactgttgagatgtgcccaaatggttccatgttcccttccagttatttgcttatgatgcctctggcttacagatgctcctgaatgacagcatgttttcctgagtcccggaagcagtccccacaagggtggaataatgaaaacagcctagtcccatctctgccacgaagtggctggttgaccatggacaatcgacttcccctttctgggcctctcttttcccaactgtgagatgaggtggtcagaccagtcaatctccaaagacccttccagcacaaacattctgagagtgtgaggatgggacatgggcccgccatccagaccccgtgtccatcgatgatgtcactgaaacagaacaggggacttaggatggttggctggtgcccaaaaaggtgctgcaatagaagtcatgaaagatccccgtttgtaccaggaagaggcaaaagtcagggcattttaagctatttgacattaggaagggcagctagctggaaatttgtaaaccaatagaaagctagattggcttttttcccatttcattttattatttttttaaaaaggcaagttaaatcccagcactttgagaaaccgaggcgggtagatcatgaggtcaggagatcgagaccatcctggctaacacggtgaaatcccatctctactaaaaacataaaaaattagctgggcattgtggtgcacgcctgtagtcccagctactccggaggctgaggcaggagaatcacttgaacctgggaggcggagcttgcagtgagccaagagtgtgccactgcactccagcctgggcgacaggccaaggctccgtctcaaaaaaaaaggcaagttaacatatttctggaatggctaggattgtatataggaattgggcctgacaacctttcagtgttaggattttatgaccctatctacaatctcatgaacgctttgtcaatttcttcctaacagggcatgttgtatagtttggttggaggccaggggagtgagaggctgtcttcaatgaatcttgggtataaacactaccagggtattgacaactaccccctggactgggaactgtcgtatgcctactacagcaacattgccaccaagacaccccttgaccagcacacactgcaaggagatcaggtatgagagagaaaaaaggttgggaatggttatggccctgtttacctgctttcatgaagtgtctgcccctgtggttgcttttgtagttggccttcagaggttgaacataatcaaatggagagag

SEQ ID NO: 31763 - DNA, 2300 bp, Homo sapien
cctgtgccaggtacttgggatcaaaaaagcaaaagcagaaccaggaggtaggcagggaagagttccagaagctagtaactggaggatgccttagagctggtggaggtggtggctgcatccttccccacagctcagggtctgccagcacaggcacagtgtccccatctcagggacacccaacccacccatgtacccccaggcaccagttcccgctcattgacaacgtgtcagcattcacaatttcatctgtgggtccttctgatctcaacttccatttttagcatggacctctgcaaggaaattgcccttaaataaacccatccccagccttcccacattggatactcttctgtgttcaatcctgatgaagggctgataagagtgagtctctctcgttgcctcctgagctttaaaaaaaaaaacattttgccgggcgcggtggctcaagcctgtaatcccagcactttgggaggcctaggcgggcggatcacgacgtcaggaaatccagaccatcctggctaacacggtgaaaccctctctctactaaaatacaaaaaattagccgggcgtgctggcgggcgcctgtagtcccagctactcgggaggctgaggaaggggaatggcgtgaacccaggaggcggagcttgcagtgaaccgagatcgcgccactgcactccagcctgggcgacagagcaagactccatctcaaaaaaaaaaaaaaacaaacaaaacaaaacaaaaaaaacccacaacattttaatttttcacggaatgaagaaaaaaagaaacatcatgttggacatagtttttaggcaggtgaaattttagtcaagttgacatttaacttaacatttacatcaacgttatttacatgtacatttacatttaactcacatcctaagttaaatgtaagtcttaagttaaaagttaagtcttaagttaaatgtaaatagtatctttgcaatcctatatggccttttgtaacacagcatctagcatagtgccttgcacataatggaaagtaaacattcgttggctgaattaacaagagatatgaataacaaagatagactttagaagactctaacagtacatctagggccataaaacttgcttgtttgggcttaaatgatgatcagcttatagattcatgggagaattatgtaaaaggaagcatcatatagcttaaagcagttgtgtaaacaagtctctatccgcgtggtaaagtacttattaaggcaactgattgacttttcattgagggtacgtgcatcagggtgactgtgaactctggctttagtgacctttgaagcagggctcactgcttggctctgcctcttgccagcctttgtaactttagacaagttattcttctccaggcctcagtctcttcgtgtaaaaaatggggatgctgaaaatagtaccgaccttataaaagtgtaccaattaaatgacataatttacataagacacttaacccagtacttggcatgttgtaagctctcaataaaagttgactcattctttttatttggagacccatgagaaaaactggggacaaaagatgtctagaaagcatctaaaactaaggttcttttgctcaactttttagagcagtacctaagaactgtttgtgagataaaacacattcttctttagggagtcttagagggggaaaaggtccctctggaagtttcagtggtcctgatttggtgatgagttacactgagtaaattactctcttgaggcgatttctaagctacatacagcacatcatttccccaggatactaggctgtcatatagtgccaaagaaaaagctatttacagaatgacaccatggcatccccaaagggtttcatttacctccctggaaggtggtatattttgaggcactgcaggaccgaccatatcaataactcaggtgatttaattggcttttcctctttttctaaagccacatcgatcccatggtaattaattgtgtgtgctctgaattgtgttatttacagtgccaaggaaccaaaatgaatctgtatcagaaatcggtgggaagatatttgagaaggctgtaaagagactctctagcattgatggtcttcaccaaattagctctatcgtcccctttctgacggattccagctgctgtggataccataaagcatcctactaccttgcagtcttttatgagactggattaaatgttcctcgggatcagctgcaggtagagtatttcattgctccattaacatcagtcacttgcattatatttgcaaagcaatgctctcgtgcccctggtag

SEQ ID NO: 31764 - DNA, 2300 bp, Homo sapien
ggacccctgaagtactatcgccttcgcagtctgcaccccgcccaggtgagtccaggggatcaggaagattgcggtactcctgggtgatgggtgtgggcctcaggggtgtgccacccagtgtaaataaaagtttacccaagccagaccatgcatcgcctctgtcatcagacatcattaatattgaggcttttcccccagcaaatgcaataaaaatttctgttaacatttggttcatttagtactcataaaatggaaaccattgacttcctctgttttaataactactagtttaattatagagtagattttcatcaggctgttgcctatccagcgattaagctaatgaaaggagagaatcttagttatttggtaaaccttcttttatataatattatttaaagtatcagaagagatactgtagcaaattaaaatcttggttccattggctgctctcttcagaaacacaggccttcagctcacgctggggtcggttggcagcagttgtatggatcgaaaagggcattgtgttcagggctgaatcctctgcacagtgccttccacatccataacccgcccccgaatggaactgtccaacgcttccagccaacacagctggactggtcgggggagagggctatttccctatgagggagccttcagggcacttgttttctgggctgctttaaggagatcaagaaccccacctgatacctgaaagagaaacattctgtcattcccttcaccctgtggggtttattctgagaaaaacaggggtcactaggcaaagtcataatcaggaaaaatggggagtcctgctgcccatgggtgatatcttacagcctctgtgagacacttttgtgaaaagggaaaaaaatgaaatagtcatttgtgcaacaaatgcttattgagaacctactgtatgccaggctttgaactaggtgttgagacaagcaagatggataggtttaaaattgttttgaaggttgtccacaataagaaatctgcttaatatcagccaagcgtggtggctcacacctgtaatcccagcgctttgggaggccgaggcaggcggatcacttgaagtcaggagtttgagaccagccaacaaggtgaaaccccgtgtctactaaaaatacaaaaattagctggacgtgctcacttgaacccaggaggcagaggttgcagtgagccaagattgtgcgactgcactgcagcctgggtgacaagagcaggactgtctcaaataaaaaaaattaaaaaaagaaagaaagaaatgtgtttaatatcatgaacagtacatatacatatgcatacatatattcacacataaaatggaaacaaaattattctaagaatacatacccttgctatattcagtgcacgctgatattttgtgttctactttatagaaacaaaaaacaccaccaaaactctggaggttcccacccactgaaataactgtgtgaccctctaatgggtcccagcctctattttgaagcacactgagctaagtcccttgttcctgaggcgctccctttcgggatcttaaacagggaattcatgaaagaatacagtacatgctttaattcagatgtgtttgggagtgctgaggcaggaacggatacatcggcccgtaagtgagatggggtgagccactaggggggcctgtcctgaagccatggccttgcagccagctcttggaggttgcagaagaggggaggagggctctctttgatgcagcaggcacgtcgtgggtacccttgcatcttttcgtgggaattgaagggggaggtgagtgtgattttctagggacagagtgcagccagagaaaagaagagggaagagtcccagtctctgggaaattctgacatttaagaagctggacacaaagagaagctgaagggaagccatcagagctggcatgtccttgaattagtaccaatgaccttgctttgcaaatccagagtggatgatatgtgtacaaacgagccacctggagatgtcaatgggagaacaaagtcaacccaaacacatcctcctagaggtggatggatatttgatgacaattgttgttcatttgactttcttgccttcttgtagatttttaatcccctccttgagaagcaacttgctgaacaaatcaagttatattatgaaaggtgtgctgaggttcaagaaatagtatctgtgtatgcatctgcagcaaagcacgggggcgagagacaagaagcatgtaagtgttgagcttcaggggagctgttttaagctctgtgcatttacataaacacatgtttggcttc

SEQ ID NO: 31765 - DNA, 2300 bp, Homo sapien
cccctgaactggccgacaattttccttccatatacattaaaagcatagtctgtattttgacctgatggaaaagatatagacaggatctgggacaaagccaccaaatcttttgttcccttggacactcgatagaataaatgttttccacgtcacacagaagaatgttaagtgctttgtttctgcagaagtggaacagagatagtgggagcatctgtcaaaacccccaaaatgctttaatgtggtggcagctggctgggaggagcaggagcccagttccctaaaagccaatagttctggaaatggaggagggctgtttgaaccagcgcgttaacatcacccaggagcttgttagaaaggtacattctcaagtccctcccaggaccaactgagtcagaaattctagggctgaagtccaggaatctgtgttttaacaatccctccaggtaattctgaagtttgagaaccggtggaataaggccagggaactcacacaaggccacagctcttaggtgacctaaaaaaaagtggacgacagctgaggagccaccatgcctggtgtggccaggcctgtactgaagcagctgagggcgcgtccacgcccgtcaaaccatcccgggcaccccgtctcaccaccagcctctccccgacgtctgttgtgacttgacctatgctcgtggcacagggaaagggctgtggcctctcaggctcccaggctattattagttccaatccgcacaaatctaccagtgctaaagggaagcttctgcgaactttggaaggtggattaactgtttcagagcagcagctgcgggcccagatagttgtcggagccgctagacacagccaagcgcttccctgaaagccaaggccggcggcgagctggtggtcccgccggccggaggcccctccccgccaggccgcagaacccgggtcggagagcagccagtctcaacctgcgtccccaaggccgaggatgtgtcctggttttttaaaaagctgtttgcgcacttccagggcctcacccctttcatttggggctccagtattactgtattgacctaattaattcatttttttctcagtccaaagtggaagccggagcacagggatgcaaatcaaatacaaacccgtcctgggtgccaatactctggacaattaaaacaaagagcgcagtggtggcggtggcggcggcaccacacaaaaccctcgggaaacatccagaacgtgccgcgaaccagccggcagggtggggcgcagcccggctgcaaacatgccagcaaggaggcagtcccaaccccgcaggtggacaggtggaggttggcaggggtcaaaatccatcctgaaggcctgggagccgggcagctgcgcggcacaactccagggggcacactcgccctgcgccctgcgggaatggcgccccggccaaaaaagcaaccagacaaaaacccattgcacgggcgggaactggtctgtgcgacccgcaaaaggggtgggtgggagaggaagaatgcggaagcgaggaagaggatgggaagggagaaagaggaaagggaggaaaaggagaaagtgaaaaagagagggggtttgggagcgcgaggggagaaggaagagggagccggagggagaggagggggatcgcagagagcaggagcgcggaaggggggcgggggaggagcagagagaaagggaaaggggggtgcgccggggcccagcgacccgggcggggggtggcggcggccaaggggcgggacccgggtcggtgcccacctgcgtgggcgcccgctgctccgaggggtggaagcccgggggccagagggagcggccgggaggagggctgggcagggaggcagaggggagggaggggacggggacggggaggcggggaggagccggcgctcggctggggctgcgggggcggcgacggcgggagcggcagtggcggcggcggcgggtccggaggtggcggcaggtggccccgcgcgcggcggccggcccggccgggggcgggcgggaaggtggcgcctcgggcgggggccggtccctgcaccaggtgacctgttccggcccggatccgggcggcctcgccatgcagcggcgcggcgcggggctcgggtggccgcggcagcagcagcagcaacccccgccgctcgcggtcggcccccgggccgcagccatggtcccgagtggcggcgtcccccagggcctcggcggccgctctgcctgcgcgctgctcctgctctgctacctggtgagcgccggaccctgcccgggtcttcccctccgcgcggggccccggggac

SEQ ID NO: 31766 - DNA, 2300 bp, Homo sapien
ggaggccaatctccccctggggccttcgacttttagtggagtattaaaacttaatttaaactgatgaattgtaatggtgagatttcaagcccttccatgggacaatgggaagatatatttctttttaaataaagggctttcttctgaaatcagaccacgccctttcaatgactgacacaaactgctggagagacgcaaaagtaagagctgattctgtcttctggatcaaaacgtcccactcccccgtgaaaagaaatcttgactttttctctccccctctccaacacaggatgaagcagttaatcccaccacctctagctcaggatgagagagcaactcacacatccctcttagaagaccaaactctggccggttttctgcatgcctggtgctccttgcagaaacagagccttcctgcctacctctggaatcctggggcctcaggtggtgcccagtccacagtaggaacacaataggagatgagtgagtaggggagaagtgagcagttggatatggcaagttagaaacagtccagcctccagtggggcactctgcttacctacacttaggtaaacccaaatcctcaaagctcacaaggccttgaaaactcccaattccatgaatcctgattacaaacaaccccgaggaaccatttagctccccgaagaccaacagaatctgtgtacaatgtgggaggagagaaactccggagcgtggcccaggaagacaggtggcaaccctagaaatgctgcaatgcctgttgaagccccttccccctgaactggccgacaattttccttccatatacattaaaagcatagtctgtattttgacctgatggaaaagatatagacaggatctgggacaaagccaccaaatcttttgttcccttggacactcgatagaataaatgttttccacgtcacacagaagaatgttaagtgctttgtttctgcagaagtggaacagagatagtgggagcatctgtcaaaacccccaaaatgctttaatgtggtggcagctggctgggaggagcaggagcccagttccctaaaagccaatagttctggaaatggaggagggctgtttgaaccagcgcgttaacatcacccaggagcttgttagaaaggtacattctcaagtccctcccaggaccaactgagtcagaaattctagggctgaagtccaggaatctgtgttttaacaatccctccaggtaattctgaagtttgagaaccggtggaataaggccagggaactcacacaaggccacagctcttaggtgacctaaaaaaaagtggacgacagctgaggagccaccatgcctggtgtggccaggcctgtactgaagcagctgagggcgcgtccacgcccgtcaaaccatcccgggcaccccgtctcaccaccagcctctccccgacgtctgttgtgacttgacctatgctcgtggcacagggaaagggctgtggcctctcaggctcccaggctattattagttccaatccgcacaaatctaccagtgctaaagggaagcttctgcgaactttggaaggtggattaactgtttcagagcagcagctgcgggcccagatagttgtcggagccgctagacacagccaagcgcttccctgaaagccaaggccggcggcgagctggtggtcccgccggccggaggcccctccccgccaggccgcagaacccgggtcggagagcagccagtctcaacctgcgtccccaaggccgaggatgtgtcctggttttttaaaaagctgtttgcgcacttccagggcctcacccctttcatttggggctccagtattactgtattgacctaattaattcatttttttctcagtccaaagtggaagccggagcacagggatgcaaatcaaatacaaacccgtcctgggtgccaatactctggacaattaaaacaaagagcgcagtggtggcggtggcggcggcaccacacaaaaccctcgggaaacatccagaacgtgccgcgaaccagccggcagggtggggcgcagcccggctgcaaacatgccagcaaggaggcagtcccaaccccgcaggtggacaggtggaggttggcaggggtcaaaatccatcctgaaggcctgggagccgggcagctgcgcggcacaactccagggggcacactcgccctgcgccctgcgggaatggcgccccggccaaaaaagcaaccagacaaaaacccattgcacgggcgggaactggtctgtgcgacccgcaaaaggggtgggtgggagaggaagaatgcggaagcgaggaagagg

SEQ ID NO: 31767 - DNA, 2300 bp, Homo sapien
gctcagcttgggtcatgtggccaggaggatgcaactacattaggtgttcaggactgactcctaatcaatactaacctcaagactgagtcctgggtgccaaccaatccctgtgacgaggaagcttggtcaggcccttatgcttaactttcagagctgggaagaagtaggatgaggatggggagtcctaggttatctcatggaccaagagtgggaaaagagtgggtcccagaaagatacttggggtactattcacagaaaaaagggaagtggccacagggctgataaaacgacgatgcccactacacctgggtattttctttctttttgttttttgtttcttttgagacggagtctcactctgtcacccaggctggagtgcagtggagcgatctcagctcactgcaagctctgcctcccaggttccagctattctcttgcctcagcctcccaggtagctgggactacaggcgtgcaccaccacgcccggctaatttttttgtatttttagtagagacggggtttcaccatgctggccagtctggtctcgaactcctgacctcatgatccacccacctcagcctcccaaagtgctaggattacaggcgtgagccactgtccacagccctcacctgggtattttctatcgtgtgatataaagctggtgtcacagttccctctgtgctatgaagtcttctgtcctcatcctaacaagctcctgtaagtgcccgaggagcagctgccacactgcagtcatctgtcttcctcctctgaatttctgtagcccgcaggaccataacacgtgtcggcagcacgcaatgtcggtcattagttatctttttatggatatgttctatctcttcatctatgcgacaggatcctagagagcaggggtcacatcttattcatctttgtgtccccttagcactctgcctggtgtttggggcatggcagatagtccatgaatctggggagagattgaataactgatttacatgcttctagagccacagaggtagacagtagcttgatgcaactacaagattacaaagaaagaggaaacctgtcctctccaagctattttgaaacgcttgtagatctgttgtggcctaaataatgctgctagggtcaagacagatatcctctttgctccccaggcccagctgctggcatgattcctatttataaaggcatggaggcccaaggaatctgtgtctcagctgcccagtatccctgggcaggtcatagtcaggcacagcccacttgtaagggcagtgtggtgcagagggcggaggatggcaacttgaggaggaggaaacaggtatctgttctcggtggcccccacccagacaatacggaagcgccccgtggccccatggatgggaccggatgctggctctctgccttggccaaggcatcccagcacagggaacagggagagaggatgggatggagggagagaggatgggatggagaaagagagtagctcggatgctgaaacaacgttcctcctaggctagtcttggtgcagaagccccgcagctccggttttagaatcccccagcaggccctctcgggccagagatttgcccctttgtctctgatacgtacaaacctccctcaagaaggacgagtgactcgtccaaagccgcgcagcggagccgcggttccctctcctgtaaactaagcagactgataaaaggattaattgcgcgagcgacagagagcatctggcgcacggcggacagtcgctaattaagaaattaacgggggatggacgagaaagctggctggtaaagaaggcgatggtaaaggaggtctggagggtgctgagggaggaaccgggccgaaggaaggaaagtagacagaacagggcccgcgggaatcgagtgcagcaaaacagctccaacctcaatccaacgccagcgcccggcccgcacagcacggaatcccggggaaggcggagggcggggtccgaggccccgcctgtgaccccacccctttcctggccccgcccccagccttgaggccccgcctctgactccacccctgtctctttctccgctccgcccctcctcctcgtccctccctcaaggcccggaagcgaaagcctctccacctcttccgagcggggtcacggcccggccgtcggtaacctggtttccgagagtgccgggcggtcggcgggtcagggcagcccggggcctgacgccatgtcccggaacctgcgcaccgcgctcattttcggcggcttcatctccctgatcggcgccgccttctatcccatctacttccggccccta

SEQ ID NO: 31768 - DNA, 2300 bp, Homo sapien
aagaagggaggaccagttagggaacttccttaaaccaggtgggaaataagatgggttagactaggctagtagctaaagaggtgtgacagtatttggaatgtgagtatattctgaaggtggagccaataggattttccgtccaattgtatcttgggtgtgagaaaggaggcaaggactccaaggttcttgacataagtggaagaatggagttgtcctttcctgagatgggggagggctgcagatggagcatgttttagggcaaaaagggggagctgttattccctttgtggttaccatggcttcccaaggtcgctggggctctcagaaggccatgattccaaattagatcagtggtctggactaggccatgactgaaataccttcttgggatgacagctccaaggaatatgtgccccaagggctttgtcctcctcctgagctatcctgttccaagccagacttgcactgagatattgcaccaaatggttttaagtctgtttttttgtgtatataatcaataggcaaacacaaacacacacacacgcacacacacacacacacacacccctaaaaccttgaaaacaacttaaaaaccagggtttcctattagagaactcactgtcctccaaatatcaaaattcaattcaactctacatttgcggggctgtgacgtgagcaggaagacactggttcctagataatgccaggctaaggctggtatagaaaccacatcagggccaatctgaaacgtggctgattgaagaatttacgtaatcaggaactcattggatgaatgatccaaaaggaagggctgcatttaaaacagtagtcactatagcacctgccgcagccatacgtaaaatggaatattgcaataaaaatacggaaaggtgacggaaagcaaaaaagccatattagtgggaggaaaaaacagaaactgatttgtaagattacttcaaaaggctaagaagagactgacaagaaattttaaaaatcgtgtccttaaacgggagcaagaatctatacaaggcaacaaggcgagagcgcagagctgtttatttatttatttatttatttttctacccagctcacagggccagcgggtagattagaaagaaaacaaccaattgctgccaggcgcggtggctcacacgtgtaatcccagcactttgggaggccgaggcgggcggatcacgaggtcaggagatcgagaccatcctgactaacatggtaaaactccgtctactaaaaaatagaaaaaattagccgggcgtggtggcgggcgcctgtagttccagctactcaggaggctgcggcaggagaatggcgtgaatccaggaggcggagcttgcagtgagccgagatcgcgccactgcactctagcctaggcgacagagcaagactccgtctcaaaaaaaaaaaaaaaaaaaaaaaaagaaaccaattgctaaagtagagtagctaaggaatcagaacttgtttcaaagtaagcgaagtagtggccagactaggtgactcaaggcatgactcaaacccgactctggaggctgtctgtcagctcccggaggcggggggcgcggtgtctaacacgttttaggaaagtaccaggcttgtggagggcgacaggaaacctccccgggagatcggcctggggctcctcctgccctagagcctgacctctcactctccgtaccggcagcgacttccaacctcctggcttccccttcctccgttcgaggctccccacccctcgtcttccatccagcgtcacagggcgtgtgcgtgttgtgtgcgagacgcgggtctcctcccccgccgccctccgccccgtgctcccagccacgcgccttcccgccccgcctccgcggcaagccgctcccttcccaccccgcccgcgcccgccgcccgccgcccgcctcccgggcacgcgctgcacgaacggcgcccggagctggtctaggcaaacacctgtcctgccttggctccgcgagatttggggcgaaagcttaggcaacaggggcacgttctcgcgaggtttaggaaatttcccacggccgtgttgtgtctgagccgagtagtggaaggcggtgggaaggaggtgtagcgtgagactggactgcccgcattgggtacatgcgcagtgccgctcgcgcgggccgcgccaatcctgcagcgccttcaacaggtttcgggcggcgaattccagttctccgggttttggggctccctgcgggaggcagtgctggatctgggaatctctaggaaaggaaagagcaaaggaggggaaagatggggggctg

SEQ ID NO: 31769 - DNA, 2300 bp, Homo sapien
cggtggctcacacgtgtaatcccagcactttgggaggccgaggcgggcggatcacgaggtcaggagatcgagaccatcctgactaacatggtaaaactccgtctactaaaaaatagaaaaaattagccgggcgtggtggcgggcgcctgtagttccagctactcaggaggctgcggcaggagaatggcgtgaatccaggaggcggagcttgcagtgagccgagatcgcgccactgcactctagcctaggcgacagagcaagactccgtctcaaaaaaaaaaaaaaaaaaaaaaaaagaaaccaattgctaaagtagagtagctaaggaatcagaacttgtttcaaagtaagcgaagtagtggccagactaggtgactcaaggcatgactcaaacccgactctggaggctgtctgtcagctcccggaggcggggggcgcggtgtctaacacgttttaggaaagtaccaggcttgtggagggcgacaggaaacctccccgggagatcggcctggggctcctcctgccctagagcctgacctctcactctccgtaccggcagcgacttccaacctcctggcttccccttcctccgttcgaggctccccacccctcgtcttccatccagcgtcacagggcgtgtgcgtgttgtgtgcgagacgcgggtctcctcccccgccgccctccgccccgtgctcccagccacgcgccttcccgccccgcctccgcggcaagccgctcccttcccaccccgcccgcgcccgccgcccgccgcccgcctcccgggcacgcgctgcacgaacggcgcccggagctggtctaggcaaacacctgtcctgccttggctccgcgagatttggggcgaaagcttaggcaacaggggcacgttctcgcgaggtttaggaaatttcccacggccgtgttgtgtctgagccgagtagtggaaggcggtgggaaggaggtgtagcgtgagactggactgcccgcattgggtacatgcgcagtgccgctcgcgcgggccgcgccaatcctgcagcgccttcaacaggtttcgggcggcgaattccagttctccgggttttggggctccctgcgggaggcagtgctggatctgggaatctctaggaaaggaaagagcaaaggaggggaaagatggggggctgcaggtaggaggagggggcgggattcgggcccttcaccctgctgttccatgcccggtggggccaggtttgcccgggggcttccgggatcaggccgcctgaagcgcgattcgggcagccggcagcgtcctcggctgtgccaggccctcgggtggcccggttccctgtgcagtagtggtctcaacacacacctgggctcacacacggtggtggctgcgatggggtcttagagaggccatgcagcacgcgagcggcaagagctttgatcgggtcctctgggcagactcggaggtgggagaatgtggctctcaattccaaggcagttttcccttctggagagaactactccgcgctctggcgtgtgtctgcgaggtggccattaggggtgtctttgctagaggccttggcttgacctcatttcacacccaaggagaacgctaaggcgagagagctcaactgcaaaagttttccgcttgaggagctctggaagggcctcctcattagcatgggggggtgtaatgaatgaagacagtccccgacgtgtcacttgcccgaaccccagacatctctggcgctcctgcaccaaacgccgagattagcataaaggaggcgcccagggaacgtttgaatgaatgaaaatagctgggaacccagagtgagcgggaagccgcttggaaaacacccattgaggaggtgtttcatctaggcctgtgaaacgcagcccattttcccaggacccctcctcccttctcctcggccccgcctcctgacccctccattcctcgtccccgtagtaatcccctccggttttcctcagtctccacgtacgtccctcaaagcgcgtcctaaaacccggataaccggagcgctccccatggaccacacggagggctcgcccgcggaggagccgcctgcgcatgctccatcgcctgggtaggtttccagggaaggcagcgagcaggatcccctactctgcgggcggcgcgaggcgtctggctcttcgcggcggcggcgaggggaaagggagcgcgggggctgggtggaatcgaggagtgaggaaaaagggaaggggcgggggagagggaccagggaaggcgtcggggggaatctcgcgagggttggagttttggcgagagtttgtgg

SEQ ID NO: 31770 - DNA, 2300 bp, Homo sapien
ctcccgggcacgcgctgcacgaacggcgcccggagctggtctaggcaaacacctgtcctgccttggctccgcgagatttggggcgaaagcttaggcaacaggggcacgttctcgcgaggtttaggaaatttcccacggccgtgttgtgtctgagccgagtagtggaaggcggtgggaaggaggtgtagcgtgagactggactgcccgcattgggtacatgcgcagtgccgctcgcgcgggccgcgccaatcctgcagcgccttcaacaggtttcgggcggcgaattccagttctccgggttttggggctccctgcgggaggcagtgctggatctgggaatctctaggaaaggaaagagcaaaggaggggaaagatggggggctgcaggtaggaggagggggcgggattcgggcccttcaccctgctgttccatgcccggtggggccaggtttgcccgggggcttccgggatcaggccgcctgaagcgcgattcgggcagccggcagcgtcctcggctgtgccaggccctcgggtggcccggttccctgtgcagtagtggtctcaacacacacctgggctcacacacggtggtggctgcgatggggtcttagagaggccatgcagcacgcgagcggcaagagctttgatcgggtcctctgggcagactcggaggtgggagaatgtggctctcaattccaaggcagttttcccttctggagagaactactccgcgctctggcgtgtgtctgcgaggtggccattaggggtgtctttgctagaggccttggcttgacctcatttcacacccaaggagaacgctaaggcgagagagctcaactgcaaaagttttccgcttgaggagctctggaagggcctcctcattagcatgggggggtgtaatgaatgaagacagtccccgacgtgtcacttgcccgaaccccagacatctctggcgctcctgcaccaaacgccgagattagcataaaggaggcgcccagggaacgtttgaatgaatgaaaatagctgggaacccagagtgagcgggaagccgcttggaaaacacccattgaggaggtgtttcatctaggcctgtgaaacgcagcccattttcccaggacccctcctcccttctcctcggccccgcctcctgacccctccattcctcgtccccgtagtaatcccctccggttttcctcagtctccacgtacgtccctcaaagcgcgtcctaaaacccggataaccggagcgctccccatggaccacacggagggctcgcccgcggaggagccgcctgcgcatgctccatcgcctgggtaggtttccagggaaggcagcgagcaggatcccctactctgcgggcggcgcgaggcgtctggctcttcgcggcggcggcgaggggaaagggagcgcgggggctgggtggaatcgaggagtgaggaaaaagggaaggggcgggggagagggaccagggaaggcgtcggggggaatctcgcgagggttggagttttggcgagagtttgtggaagatggcgcctgttgtgacagggtaagtctgagggaatcggagcgccgggaaccgggaaagttgcgggcgtctggcagctcacggcgggcagcgggttcgggggccgcggcgcgcttggcgttcgggggcccgcgggggcggcgtcgcgtgcgccgagcgcggcggcggcggcgtgtggccgtgcgctgccgctctgcgctgccgtggctcaggctccagcgcgtgagggcgggcggcggcggcggcggcgaggccggcgggtgcgggcgtgagtgcggcagggcgcgcggggccctcgggcgccgtgcctcccgcgcgcctccagcgggctctgcctgggggccccgtgcatctttgttcctcgcggccgttgtcgccgcttcgccccgctagtgcccccggccccgggcgctttgtctttcaccgctacccgctgcgactctctacccccggccctttgtttcgccgccttgggcgctttgtccgacccgtggcgtcccgcatcccctctccatctcctcccctccgctgtccttcctcccgtgcccctttgttgtgccacactcttgtcgttagcccagtgacctgccacagcccgggcaccagatttctgccttaattgttcttccattgtctttctcctgtgggtcccctctcacctttctgtatggtcctggatcaccccccgaggctttgtctcccccatccacgggcttattctctcggcacccccttcctctcccgtcatcggttgatttatccacaacccacggt

SEQ ID NO: 31771 - DNA, 2300 bp, Homo sapien
tctttatctttattcattttgagacagggtgccaccgtgccgcccaggctggagtgcggtggtgggatcacggcccattacaacctctgcctcctgggctcaagcgaccgtcccacctcagcctcctgagtagctgggactacaggcatgcaccaccatgcctggataatttttgtgtttttcgtagagatggggtttcaccatgttgctcaggctggtctcaaacttctggacttaagcagtctgtccaccttggcctcccaaagtgctgagattacaggcatgagccaccaccctggcctgtttttatttattactatgattggctttatcttatttttgccttctacagagcaaaacctctcaaagcttttaccaaacttttgatttttaaaaacttagttaaatgtataatgttcaagatggcatctaaattttcttatatagctttgctatgagaaatacaataaactattgcagtagttttgtctgctaccgaggctgtctgtgaataaaattttaaagataaaaacctagaagtcattaactgtttcctgagtagcatttgctctgctttttaaaaggaagatacaggagaggcagttgaagaaacttgtttagcttaattttaaagtggaatgttgatcctttaaaaaatataattcgatactttagatacttatgctgtgtttcagcatcatttatcttatctggaaaaggacaataatttagacccctccctgattcacagggatcaagagaataggaaagattttagaattgttatatataatataagcagtagcattttgaagggtctttgctgtttgtaaagtgctatatctctttatcttttcagttatcagaatttaaattctggtaaactgacataatgccttgagcattttctctagtacctttaaattcagttcttctggtgatacatatgaatcgtccttttgggcaaagttaaccattttaaaaatagttctttaaagtaatgcttatataatctctttctggtttaagatattttataatcatccagtttgtctatcattgttttcctcaatcttataagtgattactctagtgttcagctatataaagaaaaatattttatgcactattttgagaagaactactgctaaaatcttttacataatttcttgaattctgatagctttattattattttttttttggagaaagtcattgattttttttaactgtaaaatttattttaaaagttactgctgtaacgttgagtgataattccatgatacagttgtagagctatgtaaaacaagaaaaggctgtttttttaaatggtcttttaaagaggatacaatagatgacaatgtttgtgttctacagactttataaggaagactttgtacttttccgaaatcaatttcagtaatttttatagttgataatttttagagttggttttatcagctatcccttggaattgttttacttattacttaaaccatggccattctgagttttaggtactacataaacaaacaaggttttgctgctgttaaaactttacttttctttcacagaactattgcacagccaaaacattgtatatatctgactcagacaagcgaaagcacttcatgttgtctgtaaagatgttctatggcaacagtgatgacattggtgtgttcctcagcaagcggataaaagtcatctccaaaccttccaaaaagaagcagtcattgaaaaatgctgactgtatgtatgcttttcttatttatccccaactgccaccatgaattaataagacagactcttttttaaattaaaaattgccttttcaatagccaattaattctttactaatatttttgtggccctctttattgtctctctttttttaatcgtaaatcgacagtatgtggtctaatgaagcagttcttaaccagagttggttccttaatgctcccagggacattctggggaaatgggagattttctccttctgttgttacagtgactggagggggtgatgttggctttgggtgtcttgagcctgtggtgctgaattgaatgtcctgcagtgtccaaggtagttcccattccacaaagaattgatctacccacaatgtcaacaagtacccctttgaaaaacgctaccaactaaatgggctttggcaggccttcctgagaatctaaacacaatttttaatgtggttgctctggcagagactgctgtctcatcagcctatttttagactaccaaacaagtatgtttgaattataaatttaacctccacacccatttt

SEQ ID NO: 31772 - DNA, 2300 bp, Homo sapien
aaaaagaaaggagggagggagggaagaaaggaaagaaagagagagagaaagaaaggaggaagggagggaagaaaggaaaggaaggaaggaaggaagggaaagaaagaaagaaagaaagagagaaagaaagaaagagaaaaagaaaggagggagggagggaagaaaggaaagaaagagagagagaaagaaaggaggaagggagggaagaaaggaaaggaaaggaaggaaggaaggaaggaaggaaggaaggaaggaaggaaggaaggaaggaaggaaggaaactaatttgcccagtatttcctagcaggtaaccagtgaagccaggatttgatcccaagtctgtctgatgccaaagcctgtcctcccaataacatccacagcttctccagtgtcccttccccttcttgtttctgtgactaaatgccccaaaccatgtggtcttcatggtttcaaagaaaagaggcaccactgtctttccagccccacactgacagtaaaaatgcgttagttcctctgtgtctggcagagactcagcaagatgtagcatgcagctctgccagtggaagcattgtcagtacacaaggagccccacgggtatctagcaaatggaccaagtctcagcacagccaagcagggcgtcagaaacgcaggtttcacagccattgtcgtctgctttccaaagggtctgaactgaggacataatctgtgcaatggaggttgaagggctttccagcaccacagagcttcatggaacacccaggaccctgagatggcccccctctctgatctcacgtcctgctgtttgcctctcactcactcctacttctatctatttgtacctcaatggggccacactcattcccacctcagggcctttgcacttgctgttacctctgctaaaagtgctcctccttttgcctgggagaagctgtcttgggatcttcacaagactttgtccttcttgtggttcagtctcagatcacagtcccctccttaagagacctctcctgactaccccttctaaatcagcagccccaggccaggtgcagtggctcacgcctgtaatgccaacactgggaggccaaggcaggaggattgcttgagctcaggagcttgagaccagcctgggcaacatagcgagacctcctctcttctaaaactaaaaaaatcagctgggcttagtggtgtgtgcctgtagtcccagctactcaggaggctaaggtaggaggattgcttgagccagggagcaaggctgcagtgagccatgatcgcgccactccactgcagcctggggaacagagcaagaccctgtccccgccccccaaaaaatcagcccctaatctgtttgtatacatcacatctccctgctttactccctttgtagtacttactacctgaaataattctgctcattatttgctgacatgctagaaaagtgcctggcaaatgattgactctcaatgaagatgtgctgaatgcaaggcttcatgaatgaagaggaaatctcactaacgtcttttgtaataaggacccaggtacctatgttcaaaagtgcctcaatcctagttaacaagggcagagaccacgagaaacaacactgtgtttagtagcaacttaacaaccagccagcagttctgtccacacacacaccaccgggcatggttccaaagctaaaaaggcactaattgcttttctataaggaggtagaacacagtccctccgtgttctttaggcctgatggtctgcattatcggatctgttaccgtgttaattgttcctgtctcacacagccggtttgggctttcttctgcatatgtctgggatggtgacgggttcctatatagaggagtactggggaagcctctgtgtgtgtgtgtgtgtccgtgcatatgtacacatgtgtgtaaaaagcagccacacgctgagaatggttaacgggtagccaggctgtctgtactcagggccctaagactggcccaggaaagggccgggggaggtggggcggggtgaaggtggagcgggcttggcttgtgctcactgccttttccacaacaggagtacaaatgctggagtgagtgaggtgaactcaagtcgcctttaggaatggctgaaaaagcccacacctggaaatcactccctccctgctcctccacggcaggttgcatctgcgagacgcttcggtcattagaggaatgagccgggagtgagcaattcaccagctctccagcacttggtggaaagcagcaggcaaggatggatgtggttgacagccttcttgtgaatggaagcaacatcactcc

SEQ ID NO: 31773 - DNA, 2300 bp, Homo sapien
ttttgcttggacatgctttccgaattagagccaaacttcgtaattgttgctttaagcttataattgttctcttctttaacaaaattatttaagtctccatctgtgcaaggaatagttctgggcactttcacatatgttgctatgtttatttagttactttccattcccttgtcaatagtactgggcattatttttatttaattatcacagtttcaatatttaatttattaatatatattaatagtctaatacttggtacatttgttcctcatactgtctccttagttggatattttacactcttgatacagagaagaaaatgaaactgatagggaaagagactcatgcaattcccagggtacatactaggaaggaagccagaatgttttctgactccaggcactatctatgccttttcttctgctctacagcttcatccttcccttcaacgctctactaatcttttcagctgaagcatctttatctctttggcagctaatcactccacttctttcaatctcaaagggactgttatggtagtgctctctctcctctctctgcctcttctttctctctgttcaaagtgaggtttgtggtgggaattcatggatgggtggacagttgagatggaaggactataaagagttgacaatatctacttatctgcagctttgagaaattctgagttgtgagagaatgttttgtagagaaactgcactttagagagtctgtcattaattgcctttaagtgctttgtttctttcctggctgcctctttctaaacttggtttgataaaccaactttaccaaattatttagaatttgtacttatcatcccagtattctggatggtggtgttataaatgtcagagtgctgtgcatagaggcccgggtccagtccctttgaattcatattatttcctgctttagtcctttgctattcagaatgtagtctttggaccatcggcatcataatttcttggacttgtcagaaatgcggtttaccagttctcaccagagtcctattgaattagaatctacatttgattgaatgagatctctttgtttctagttagtctagagtagcttttgcagcaatcttggtttgttttcttaaaatcctacttctgctttgcttaaaatatgcatatacacatttgaactcaattttgattatttttgtgaggttattctaatgtatttttcactaggccttttttggggggggaagggaggtgccgttggcctttggggatgtcattcaataatttaagtcagttacttttagttctgctaaaaatcttttgtgcatttccttgaaggcaagaaccatattttattaaacctttgtgcccacacagttccttttatgtaaatgttcaataagttgaaagctgaatgaattatgaataaatgcttgaatgaatgaatatacggaagaggatgaatctagacggtaaattcctggaagacttggacaatgtcttattcatccttgaattgctaatgctttgcagaaaacctacaaataatgcctgttggttaatttgtagttgttagatgagacgagattgtctacttattcctggtataagactctagagaatagaaacgagagaaaatgaagtaaaatggagtgctatggtacagtgctaggcaccttcacgatttttacctcagctaatcatcacaacatcctgcaaactgggtgttattttacagaggcggaaactgtaacacgtttacgcaggtagtgtcagagcctaacaattcgtggttgtaattcgcagtatcattgcgtgccacagtcctgtttctgcagaaattgagaggtggaagagaatgatcctttatatagtaaaacgcacaattctccgtgtcccccttgtgcatcagaggcgctgtggctctgaaagaatgagctttcttgcctttcaaccatagacaaggcaggaacaacggtgtgaaaagcgtcctccccgccccggtctttttccgccggcggaacgcagatgctgtggccttcaggcgctgaggggaccagagagggacggacacaaggctcggcagttgcctggtaacgcccgctggaggagtcccagtgtaataaggtcccggagaagtgtcactggccctgagtgggacccggtagcccgttcgctccgcgccggcggcctgtccccgcggcttggcgggctagggcaggggaaatgttgcaggaggagtcggacctctctctcattattgcccagatagtccaaaagctcaagggctccaatttgtactctcagctggaacgg

SEQ ID NO: 31774 - DNA, 2300 bp, Homo sapien
gagagcaggttcatgttctgatactaagcactttctgaatttatgagaagaaaagtagttctctgccttggggagcattggctaataatttttagataattaaaaactgccatgatatacattcatactaaatcccagcttatgttactctccagtatcaaagggtgaatgttgaccatgaaaataatggtaacaataaccacaatttattattgcttattattggtgccacacgccatgctaagcattgggcctaggtcctccctagttctcccaatatccaccaaaagaaactgcttcacatgagttaaaactgaggctcagagtggtgcagggactggcccaaaatcacatagccatttgaaatgttagaagccatttcagatctaggtctttttatctccctacccactctagctattattttgacatggcattggtagtttttacaatccaattcaaaagtgtctctaggatgacaaattcaataaagggaaaaagtagggatagcctaacatttctcccaaatagttgcttctttttctttttaaaattaaacttttaaaaaattaaataaaagtaagatagaccttgctgaaatatgcaaaggacttcagagaacaaaatggcacccaagaactgtaagagcacagcgttgttttggcaggatgaagtccaacaatgtacatagaaaagataaccatgtcaatagttagcagtgacacaagttaactattactacaatgacaatgatgacgatgatgatgacatagttattcctctcaagaagttctctgtctagtggaggaagtattcaggtaaacaaaagatcatagtacagtgtggcaaaaataatgcacaaagtgtgagcaggactagaaaaagaactcaatctggatgggcaggtgtttgggtggggaccacggcattgcatgcacacacagacgtacactgtgtgtgtgtgtgtagagatgactgtaaatacaactgcttgtctgttcatatatgtgaacaggaacagattcagtttcagacaactgctgcttttatcattccttttctttgtgccacatagcactggggtctttaggaactttttagaaataccactttggctgctattgaagagtattttggatttgtattccactcaccagaggcttccattgtaatacacaggggtaggcaggcagaatggaaagaaaaagaataatggtttcttaggaaactgaacactacatttcctgtgattacaatctcaaggctaaagctccatgctcattacaggattttcttgacagcagtgtgtccctgtcaaaaggttttgaaagagtttgaaattagggtttctttgggttccaggaggcactggctcaggactttggcaaaagacccttcatctgctgacatttcttgaatggcctcgtttaagcctagccaccttgcctcttgctcctgggacgtggctgcccataaaagcagggtgagtgctcagtcattagccagttgtcagtgagtattcaatgtcgccaaagtgctgggctaggctttgtgagggacaccagatcccagttcttagagcttccagtctagttaaagaagtagtaccagccgggcacggtggctcacacctgtaatcccggccctttggaaggccgaggcaggtggatcacgaggtcaggagatcgagaccatcctggccaacacggtgaaaccccatctctactaaaaatacaaaaaattagccaggcatggtggccagtgcctgtagtcccagctactcgagaggctgaggcagtgcctaaactagaaaaggagaagtatttcactgggccaacatcggggggtggtgctgcaaacacagtgtcacaggactttgaaggtgggagagagctgtcttgctgcatgtaggtttttggggatgggcaagtaaatggatagatagccagttgaaaggatggtagcatgaacaggtgggtggataggtgggtgggtgggtgggtggatgcctggatggatggatggatggatggatggatggatggatggatgggtgggtggaaggatggaaggatggcagccagatggggccgaatggccggttgatgaatgggtgggtgggtgcatgagtgcagcagcattacacagtatctttgaagtcaattagacaagagttgctcttctgccatttactagctacatgacctcaggagatttaattaaccctttcaaacacaatcgcctcacttataaaataggagtgataatacttgccttgcaagcttgttgagaaaattgaa

SEQ ID NO: 31775 - DNA, 2300 bp, Homo sapien
attttctcctttctgttcttaggtttatgctgtgatgcacagtgacacgtacctctctctgttcagcaaggttcattccggctattcatttaacagctggaaagttctatatctgtggcaaagatgatctgcggtggagggtttattcctggcccctggccttcctggccttggtcttttgagtgcttgccggatccctagttcctttccggttccagtagtgagaggaataaacacttaaaactccagtccaatacactctcaatgtcaataccctccctatctttaaaagaagaaaaaaaaatactaaatcatctttgtttaaagaatcctggcccctgtgatttgttaatttgttcgtggttttatactgttactactgtaacagtttgcactacaccatttagcaactgattactactttgtattagcctctaattgtttaatgggtgtacattttatctccttaaaaagattgtaagatgccttagtcatgggactgtgctgtttatctcatagccctgactgctgacttaattgcctttttcaagtgtctctcttgcctaaccctcaccactcagtactctgcctggcacatactaggtactcagtaaacatttaataaatgaaatgcctcctggagagcaggaacaagcttgttatttatattgttctggtcccctagcagaattatcttctctggtgggcactcagcactctggtgtgacttcatcgctgtgcctttcagcaggggaaatataatctcccggttgccctataaagaattgccacctgaacactatgcccacaagaagtctgctgagaaataactgttgatagattgacttagcctcaaagacatccttgattcttttctaaagtgtgcatctgcccttccacaataaacgatatttgtggttatcttggccaggctacctaagaaatactttaggagaatgtaatttgagtatcttcttggcttgagaaagcaagcaaacaaaccaataagcagaatgaaaccaacaaaacccaatagcaaaaggatcttcgtgtttaataaccctatctgcaaattttaaacaattttgtgcccctgggagaaagaatgcctccttgcgtgtgaatttccagggcttttaatttatagtgacagtacattcaacacttccttttaaatttgaagggaggtggccttaaaaatatgctggcaactagtttggatgagaaagattccggttctttatttattcaaaccaattagaccaggtctgaacaggatttacaacagagagcagatcttgggtgcacaagagctttgcttcattccaggttggcgaaaacaagtcaagtctacatcattgttctgtcagccggttcaggatacagcacagagtcgatgggatgggggtgggaaggtgatgagttcaggtaaatgtacctaggagagtcagaggctaaagtaaattctcttaaataggccttttcagtggctgctaaatctcgctcatttcccatgaattagctgtgggatattggggacaacttacttcacatttctaggtcttagtctcttcattcgtaaaagggggtaacgataattttggagttatagcatgtaaatgtgtaaaacggttagagcaatgcctggtacactcacacatagcacgcgctttgtgaaatgtttggcaagtaaataaaacgctaagctatgctaaccgcgtctaaacagccagccacttgtaagccccacctatattgaaattacggggacgctgctgttttccgattgcaagattttcctgatccatgcaattactttcgctgccctctacgaggctgaaactcgccctcaggatgtgggacgtctggactcttctctccgtccccttgtagccccccactccccctcgcggtggtaccgtgaatgagggagaggtacacgtcccccttcttccccgcctcctatcttcgcggctcgctaaagcgttatcagccgccccacggtactaccgtccgtctaggaacgcctccggggcggggctgggatgccgcgcacgcgcagtacagcagcgccgcgcctgcgccgtggagagcctgagggaggcgggggattggtatgcgagcgaatgtgcgaggggagggaggcgtcccggcggagcgtggtactacgaccagcgcgggccggagggggcggggggatgcgccgcggcggcggcggcgcgggagctggggttggtgtttggcggcgccagagcagcggatcccggtctcgccgcagcagcagcgcgggtgtcgtgcac

SEQ ID NO: 31776 - DNA, 2300 bp, Homo sapien
ctctttgtatggtatctgtagacataagaactagttacaagaatgtataagaaaatgtattacatattctatagatagttggcctacaacagtccattatgatgtttcttttctgtgacattaaaaccctttacatttgctaaaggtagccaaaactatgttttatgttggctgtagtggttatcttaaacctttcgctgtgttttctatactctgtaattcttactgccaaacattatactaaggctgtcttcacctgacacataccacctcatttctttcaggcctatgtggccttccctgacaccctcacccactcaggtggaatcatttttacctctggactcatattgaatctcgcataaaattttgttatgtattttcttttttactacatctcattgtctttcttagtctattgatagtttgctattaattcatgcatccatacctacatacattcattcagctattatacaaacatttatcaagcttctacttttggcaagtactacattaggctttggggatacagagatacgacatagtctttgccttcatgcaatttgataagtgtcatgttaaaggtgtaagggaagcattatacgaaagtacctgtggagaagataaaggaaggcatttcagagagggaatgttacagttctttgctctttaaggttttatagaagcctcataggagttcctgtaatttttccatacttagagagtactgatatctttctatacaaaatgtagtgtttcaaagtagtctttggaatcgtacatatttgggtttgaatccttgccttacctattactaattatgtaaccttaggcaagttactcaacctctcacaagtatcttcacctataaaatggaaatactattataaggttttcttgagtattaagccattggtacaggacccagcatatattatatgcctgtgtttattgtcattgttattattattagactttgtgtaatgaaatctttactagcatcatacttggttgttaagaaatcttagttgagtactgggttgcttgtatttacagtccataataaagtgattttatttccttattttacctgtgcctcctacgtgctttcttcatagctaataaaatggtttagtacttattattatataaattcctctacctacctacctcaatccatgaaggctttttatttcccacttgtgacttcaatgtactttgttcaatttttaaacagttaaacattagaatgttaaaagtatagattttttgatacttttaaagaaaatcaatatgatctaaattgaaaacttaattgttttttaaagtctgctatagatgttaaattaagttacttatggttttattatcctttgtgaaaggataataagtgacagaagtaattaatgactataaaatattttcaactttaggctgggagcggtggttcatgcctgtaatctcagcactttgggaggctgaggcgggcggatcacgaggtcaggagatcgagaccatcctggccaacatggtgaaaccccatctctactaaaaatacaaaaaattacccaggcgtggtggcacgtgcctgtagtcccagctacttgggaggctgaggcaggagaattgcttgaacccgggaggcggaggttgcagagagccgagatcgaaccactgcactccagcctgggtgacagaatgagactctgtctcaaaaaaaaaaatttttttttcaactttataaatttctaaatcatagtaagtcataacagaaagtaaccttagaaaaccaaaactttttcaatgtagctactaaattattaacatacaggagtctttctacagctaagtttgcactgaagaggtttttgaaacatgtaacaaattattaaatcacacatggatgagctccaacagtgatcatcaataatatgtaaagtgttaaatgtgttgctcaaatatttaaatttgtatactagaaatattttcatttaatatatatatatatgtgtgtgtgtttttcaaataaacaggatagcagtgcacgaaccttcatttatgatctcccagttgaaaatcagtgaccggagtcacagacaaaaacttcagctcaaggcattggatgtggttttgtttggacctctaacacgttagtattctctctcactcagaggatgatgtaaaagaatatcctgatcatctctgtgttatttaaggaaagagaaaaataagatagtaggcctctaagaagaatcatctattacctgtgaaagaagtgtaatactaccttaaaagat

SEQ ID NO: 31777 - DNA, 2300 bp, Homo sapien
agagaatagggctcacagttgaaggagaacctgaattgaacatctcagtgtgaggcagaaataaaaaatgcttttgagattgtagctttcagcagtacatttcttcccctacaggtggaagggtgaaggtgtacactctggcaatgtggagaactgagagtctctgacatagagcatgctacatatcacactacacaaacatagccaaaccccagacttgtcagcctaggaacttctgtagaactcttttatgtcaccaaacttcaaaatatgtttctgccggaggcctgggcatttaggcagtttttcactgtgagctgtatctctttggagcattaaaataatatattagctatcattgtgtctctgttcgagagagccccgtgaaaattagtgtgtactgactgggctaaatcaggaaatctgaatagtgatttctgtgttttgtatcactgaaggcagtaggccctggctcctcactctttgttttagacataaggctgggggttaacatcataccagtaacccccatatctctggcatatagacacctaaaactgaataattgttattactatttaacccaggctttatcagccttagcactagtcactctttgggctggatagtttctggttaagtctttgtcatccgcagaggggacacagggaggaggttgtcttgcgcactgtagggtgttcagcaatacttctgatgtctgcccactaggtgccagtaaccactcccccaagttgagacaacccaaaattgtcaaatgtctgctaggggtgggtgaggaattatcaccagccttgagaaccactgattaacctaacctaattagttatatagctgcctccttggggaaaatacattttggtgagtgatcaggtttataagtgtgagagaaacgtgacagctgcctagcttgactgaaggaagggagttgggatgatggtggtgatacttttgatgactcccttcaccccacagaggaccattctggcagcatatgattggaggtgctgttgctttttcaagggtccccatgactttgaccactccttctcccaccagcaggggcgtggtgtgtctatatgggtttacctctgcccttctataagtctagtatatcaaagagttacaagaagcacagtcattatttgaagaaagaattttaaaaggctagagcttgtgcatgggaaagagatctccaatttttggttttgttttagatactacttaaaaaatgtctttttgtattgaggtcctgtcatactcaaagattaatttaatcatctgtaattcttttaataggcccacctcataactggatgaaagattttatcctcacagtttctatagtaattggtgttggaggctgctggtttgcttatacgcagaataagacatcaaaagaacatgttgcaaaaatgatgaaagatttagagagcttacaaactgcagagcaaagtctaatggacttacaggagaggtaagttcagaaaaatcataactcatttatgtaggcaaatacaatttgtaaaaaaagtgatatgggcatgtgcttaaatacttacatttaggttattatacacatcaggaatagatgcatatttgatttcacatttttagaaaagtatacttttataattacagatttattataaatgtgtatacttgagaataaatgagtagaagaacagtggaggtaagtcaaatatagtggaattagatgtgtagttaaattttatttttaacttgatttaaataattaggaatttttgaaaagctttttgcggaagagtatttccctgctttccctgtcatttgaacccaggataaccaaaatagctgtatagtaagttgcctgatatttgtattaaccaaacttaaggctaatgaaaaatgctatgatttctgattgaaatatgtatttaatcgcttgacccagtattcattattttgtaaaaaaaaataaaactggaaatttttgtgaggaatttttatttttattgttctataaggcttgaaaaggcacaggaagaaaacagaaatgttgctgtagaaaagcaaaatttagagcgcaaaatgatggatgaaatcaattatgcaaaggaggaggcttgtcggctgagagagctaagggagggagctgaatgtgaattgagtagacgtcagtatgcagaacaggaattggaacaggtatttacattaaaaaaaaaatcacttgtaaagatgttaacattgccactctgaggagccaggtcctgtttttcttcagtttcctacatttagtt

SEQ ID NO: 31778 - DNA, 2300 bp, Homo sapien
gagaaatgacaggaaagcaactccctcatggggttgtcaaggaaagaattgttgaataattcaaataacagatttgttcatttctaagccatttcctgccccagctttggaaatctgcagaaaagttctggattaggaattatccaagacctgatttcattgctgccaagggatcagttgaagggacaagctccttcaggcggcttggggaaattaccatagtttgaggtcacttacagaatgttctgggttggcaggccctaggttgctttttccttgcgccaggaaaatatagacagggccagcaccacatctctgaaaataaaatgtactgagttctcccgggtagctcagcattaggtatggcagctgccccagcagacttacttgttcttgttttgtttgttttctttttttttttgcagctgtatctaggcatgggaaggggtaggaactggtggtgaaactcatgtaggttatgagtccaggtgaaagtaatttggctctttttaaggaatttctgcaaaagtttagaggtcctaattgggaaaagttatatttttggataatctgcgaaatccgtttatccgtatcatccctggccttgttatcacaggtcactgagggttggctatacttgtttcttatctgccccaagaggacctggcgaggatttattatctcttgccactaaatccctgaccatatgtgtatcaatttaccaaacagccttatatgtgcttggggacatccctcagagatggttcagtcatgagagcatttcataagtttttactattacaaatactacctcacatttgataagcttttacctttatttttcaggctaatcttacagttattatatttttatccacaaaactcttcaagggaggtaaaagtgttattaatgtccccatccctgacagataagaaaactaagtaatggagaaatgaggtgattttccagaagttattcatgtcagagctggtcctgaaacccagatctcttacagaaattcaaatattcacctttttctactcttctttgcaaatgcctctactattattgattgaatggtaaacactttgaggaaatgggttggatgaaaactcttgctttgttggacattcttacttgaaaagtccatcagacttaaacaaagaccagcttattttgaatcttaaaaaatgtaaggctactcaaattaacctgaagagggatttgtgttttttagcaatttcagatgccagtcactgtgacaagtgcttcttattcattacctgcactaatgctggtgagatgtttgcaccagcatctgtttggttttaagctagatagtgatatatagatgatgcctagggcagtgcacagctaccaaagtactaggtattgtaagtttcttggtttgaatacaaatacatacttgtacatacatactcaagagataagctagtttaagtaaaattcaatagatattagttgaaaatcactcattgttctgggcactgaataaaacataatctctttccttcaaggagtttgtggtccaatgaaggaaacaggacactgattaaaatatgggtaaaaagactatgagctagcatccatgtggtagaaatagtctataagaaggtaggcttcccaagggcaggagtccgtatctccagaatttagttgcttcttaaagatttggtgaatgaaaaaaaaaatgaatgggtgaataaataaatgttctagggaagcatgtaggaaagacaattgagctgttctaaaagagttgtgggaagtttcatagaaattgatgggtgagcttcatattcaaatataagtaagatttcagtatataaagttgggaattcttggcaaagaaaagagctaacagaaatatttgcaagtgcacagagcattttggaattcaagggatgacaaataataagtcttgtgggtgggatttagacagctggaagtgatgaagtggaagtctaagagaataagctaaagaagtaggaagtaccaaactaaggctttgactcatttatgccccagggaggcatcatgtatttataagtagaaaatcagcctctaatttgtgctttagtaaagccatctcttgtgtccgtgtaggagagtcctgaggtggagaagggctgggatcaagccaaccactcacccacttaagaagtaatgagatctttaattgccttttcagcagtaatgggggtggaggtgggggagtaaattccaaaatcattagaaaagtagaatgggttgagtttgttgactcattagatgtggg

SEQ ID NO: 31779 - DNA, 2300 bp, Homo sapien
taagagaagagcactataactatttttccatgatttcttgaatataacatcaaaagcacaggacacaaaagctaaaatagacagaagggatgactttgaaaaccttaaaaccttctgcacagcaaataaaacaatcaacaggatgaaaagcaacctatgaattggaaaaaaatatttccatatcatatagctgataaggggttaatttctaaaatatataagaaactcctacaaccaattgcaaaataagtaactcaatttaaaaatgggcaaacagcttaattaaatagacatttctttgaagaagccatgcaaatggccactaggtataggaaaagatactcagcatcactaaccatcagggaaattcaaatcaaaaccacaatgtggccaggcactgtggctcacacctgtaatcccagcactttgggaggccgaggcaggtggatcatttgaggtcaggagtttgaaaccagcctggccaacatgatgaaaccccatctctactaaaaattagccaggcatggtggtgggcgcctgtaatcccagctactcaggaggctgaggcaggagaatcacttgaacctgggaggcagagattacagtgacccaagatcacaccactgaactccagcctgtacaacagagtgaaactctgtctcaaaaaaaaaaaaaaaaagcaacacacaatgagatatcaccatatccctcatatctgttaggatggtcattatttaaaaaaataaaaacccaaaaaccagaaaatatcaagtatctgtgaggtggtgaggatgtagagagattggaacccttgcacaccattggggagcaagatacaggcactctatggaaaatagcacagaagttctttgaaaaatctgaaaataaaaataccatatgatccatctgtctcatttctaggtatgtatccaaaataatttaaagcaggatctcaaagagatatttgaactcccatgttcattgtggcattattcacaccaatcaagaagggaaacaacctaactgtctgtcaacagatgaatggataaagaaatatgtgatatatatacacaatggaatattatttagtcttttaaaagaaaatcccatgatttgtttcagcatggataaactttgagaacattatgctaagtgaaataaaccagtcacagaaggacaaatacttcaattttccacttacatgaagtatctaaagtagtcaaactcatagaagcagaaagtagaatgatggctgccctgctatggatggggaaattgaggtattatttattaatacagtttcagtcatgcaagacaaaaaagttgtggagatctgctgtacaacaatgcatatataggcctggcatggtggctcacgcctgtaatcccagcactttgggaggctgaggcaggcagatcacttgaggtcaggggtttgagactagcctggccaccatggtgaaaccccatctctactaaaaatacaaaaattagccaagcatggtggcaggtgcctgtaatcccagctactcgggaggctgaggcaggagaatcacctgaacccgggaggcagaggttgcagtgaatagagatcatgccactgcactctaccctgggccacaagagcgaaactccatctcaaaaaaaaaaaaaattaatgcacatatagtaaataccgtaatactgtacaatccacttacaaatttgttaagagggtagatcccatcttatgtgttttttacaattaaaaaaaagaaattatgccagcaagagtcacatacctatgcatcgaaatgtacagtcaacaaattacaattggataaaccattttagataaggcctgcacctgcaacctagaatgactaccactttgtctcagtgttatcactgaccagctgtgtaaccatgggcaactttcttgcctagtctgggcttcagtttcctaagtaaaatgactaaaataaattaactctaaagttgatcctaacaaagttttatgaccctgagtttctggtttactcagcataaccttcatgataagaagcaaagttagcaaccaactgtctttagacagacctaattttacattttcatgtagctcattgaggcaatttcttccctaatctattcctttgtgctgaacttttttaagtttgacactctagatatccgtctgcctcaagcaaaacagttgacagaaacccatgaacccatcatgccctgattcataggaagtaattactaataatcctaattctggttcatagtttgcttgtcagtaattacagctgcagttgaat

SEQ ID NO: 31780 - DNA, 2300 bp, Homo sapien
gaaattgcatgatcgtggctcactgcagcctcagactcctgggctcaagtaatcctcctgcctaagcctcctgtgtagttgagagaccacaggcacatgtcacaatgttcatctaatttttgggtgttttgctttgtttttttgtagagacaaggtttcactgtattgcccaggctgttgaactcctaggcttgagggatcctcctgcctcagcttcccaaagtgcctgaccagagacacataatatttactcaacatttatgcattatcaactatgggctttgcaatgaccttgtttgagtaattctcagtggccagatgtgaagtaggttttggtcttccagtagtaatctatttcatcatgttaattatttagatttattattaggctcctgccagagtcgtttttgggatttcctcctggagcctaaagatttcctattggccgtttgtcattgtcaaccagtgcactgtctcattctttggtgtgattatgaaagtcctaattccttgttgaggaaaatctctaaaaggatctcataatggatcagaagaaagaaactgaaatatcttgaagcccaatgagggtcaaaaagttcaaggggatactttcacaggtgtgtgcaatgtatatctatctatctatctatctatctatctatctatctatctatgagagatctatgacagtgtattctgtggcttcattgtttttgtggagtcagaataattcagtagatgtcaagtatttacacatcctaaaactaggcgctcaaatatctataaaaaatcatgtaatggatgaaactggaaaccatcattctcagctaactatctcaaggacgaaaaaccaaacactgaatgttctcactcataggtgggaattgaacattgagaacacatggacactggaaggggaacatcacactctggggactgttgtggggtggggggaggggggagggatagctttaggagatatacctaatgctaaatgatgagttaatgggtgcagcacaccagcatggcacatgtatacatatgtaacaaacctgcacattgtgcacatgtaccctaaaacttaaagtataataaaattaaaaaaaaaaagactgtaaaactacttttgctagtaatatcttttacctgactctaggccacgtaagaaacatcaaagaattaatcagaaagttgaacaaactgatagagtttctgtagagagttattgaagtgcaggccaggtggggtggctcacgcctacaatcctagcactttgggaggctgagtagtcctagctactcaggaggctgaggcattagaatagcttgaacccaggaggcagaggttgcagcgagctgagatcacaccactgcactccagcctgggtgacacagtgagacttcatgtcaaaaaagaaaaaaatagagaaagagagagagagtgtgtgtgtttgtgtgttattgaagtgcattgtgacacctttgcagagtttgacgaaacagggagtggtatttggtttatactaggagaaaggctcaaccaggtaatctgactagttcagcctaacaaagcaaaggtcagcagaacaaaaagagaattaaattaaaaaaaaacctgtatttacaggttctgccaggataagcatataccaaaatttaatgtggtttactcttgggggagagaagccctgtctatagacagattcatgatgctttgtgacctcaagggaaagtggcttgaggtggagcatcttagtttgttctggctgctataagtacgataggctgtgtggtttgtaaacaacagaaatgtatttctcatagtgctgcatgctggaagtctgagatcatggtgtcagcattgccagattctgatgaaggtcctcttctattgcaggctgctgacttcctattgaatgctcacattgtggaaagaggatgagacagctctctgcagcctcttttgtaagggcactaatactattcagaagggctctttctcatgacttaattacctcacaaggccccatctcctattattgtcacaatgggagttaagatttcaacatattaattttaaaggcacacaaacgttcagtctgattccttgagcacttgatatagagaagacagtgtgtaagatgccagctgaggtggtaacctcagtgtcaaaagatccccagcagcatgagcatgtgtatgtgtgatgcgttatgtgtgtgaaactatataaactcctcttgaaataaggtttccatatttgctaccagcaatacccagattataactataacagtccag

SEQ ID NO: 31781 - DNA, 2300 bp, Homo sapien
gtcagggtcatcagtgtaattgcccagatgggacacagattccttaatagaattaagtggactaaatggcatctaacatttggcctccatattcaagatccacgaaaatgttggaatgtgatgaactggagagcatgtatcaaatgggaacagagtgtatcactcatttgctgatttatatgataatctattactgtcatatttttcacaaagaaaagtataaatagtttttggaaatctattttttccactggaaagggggagtttgcttttttaactatttccttatttttaaataaactatcatttttagagcagtttcagattcacagcaaaattgagtggaaagtacagatttcccatatactggacggccttcccctctatcaaggggcccaaaggaagtagaggtatagcatagacgcacagcctcctcctctatcaacatcccccaccagagtggtaaatttgttacaatccataaacctacattgaggtattattatgaaccaaagtccatagttctattggtgttgtacattctgagtatgagaaaatgtatccacctttatgcatatctgttatatgcattatgtatatctgtcattatggtatcacacagcatagtgttgttgctctaaaaatccttggcggccaccagtccatcctttcctcttgattaactcctgatagccactgatgtttttttactgtctccatagttttgccttttcactaatttcatatagttgtaatcataaagtatatagccttttagattggcttatttcacttagtaatacacatttaaagttgctccatatcttttcatgacttgatagatcattttgttagcactgagtaatatctcattgtctggatgaaccacagtttgtttatccattcacctactgaaggacattttggttgcttccaagttttagcaaatatgaataaagctactgagaggtgacagcgtgctggcagtcctcacagaccttggtcgctctcggcgcctcctctgcctgggctaccactttggcggcacttgaggagcccttcagccccccgctgcactgtgggagcccttttccgggatggccaaggccggagccggctccctcagcttgcagggaggtgtggagggagaggcgggagcgggaaccggggctgcgcgcggcgcttgcgggccagctggagttccgggtgggcgtgggcttggcgtgcccggcactcagagcagctggccggccttgctggccccggggcaatgaggggcttagcacccgggccagcggctgcggagggtgtactgggtcccccagcagtgccagccaaccggcggtgcgctcgatttctcaccgggccttagctgccttcccgcggggcaggtctcaggacatggagccctccatgcctgagcctcctacccactccatgagctcccgtgcggccggagcctcccggatgagcgccgtcccctgctccacggcgcccagtcccatcgaccacccaagggctgaggagtgcgggagcacggcgctggactggcaggcagctccacctgcagccccagtgcgggatccactgggtgaagccagctgggctcctgagtctggtggggacgtggagaacctttatgtctagcccagggattgtaaatacaccagtcagcactgggtatctagctcagggtttgcgaatgcaccaatcaacactctgtatctagctactctagtggggccttggagaacctttatgtctagctcagggattgtaaatacaccaatcggcactctgtatctagctcaaggtttgtaaacacaccaatcagcaccctgtgtctagctctgggtttgtgaatgcaccaatggatactctgtatctagctactctggtggggccttggagaacctttgtgtccatactctgtatctaactaatgtggtggggaagtggagaacatttctgtctagctcagggattgtaaatgcaccaatcagcaccgggtcaaaacagaccacttggctctaccaatcagcaggatgtgagtggggccagataagagaataaaagcaggctgcccaagccagcaggggcaacccgcgcgggtccctttccactctgtggaagctttgttcttttgctttttgcaataaaccttgctactgctcactttttgggttaacactgcttttatgagttgtaacactcaccgcaaaggtctgcagcttcactcctgagccagctctgagaccgtgaacccaccagaaagaagaaactccgaacacatccgaaca

SEQ ID NO: 31782 - DNA, 2300 bp, Homo sapien
acacacttagacacacttccatccaacgggcatctacgatcccctgtagggagagcttggaaatctctgccgcctctccctcctcattcctgttcctgcgcccgcccaaacaaccgcgcgctacatctgctcgttgactttattggtgtttgtcttgtttaaatcattctgcctcgtcacccaggtctcgtaaagaatacccacactggacagattttattttttcggctttaaatttttctttgaggggaggcccttaaatgtgtatggatacgtcaggcgagctgaagactaagcaaatcccagcagcggccctttctctctttcgagatggtaaaaattctccccaaatacctacagtccgtctcagtcgtcttaatcctagccgggcctcttcgtttacagccactgaaataaatgagtaaatggctcagttcaaaaacacaaccagacctgagatctgatgaggccggctgcggtggtcgtgaatgaaaattggagaagccttgcttcaggaaatagggacagtcaagggacacaaagtcaaaaggagagatgggaaagctggggacactttggtacacaaagttgccattaaagtttatttcccttttatccagataggtgacgctacactttgccagttactaaaggctgcaggtttctgctcagaaaataatatcgaggtttccaacatgtgtttattccccaggcgcgcacacacggtctacccccgcaagcaagcacgacgacaggaatgtcaagcatttaaacaaagacagacatccttcaccctccacccaccgccgcccctgccccccgcaaccatccaaagtctgagctcccaaaaaaggatctttctccagctctctggagtttgatgttctctcttcactactgcagcccgtcatggtttttcagaacagagtggctttctgggcgctcgtaggttccccaggaccccgataaccatgtcctaaccaagatcctaaatcgcgaaccggagacactttccggggggaggaggacgtcgtctgagagggagggagaaggagaaacctatcctgacaccagctccgaaagctctcacgcgtgaactgggcattagtcaagggaggaggaaatttaccagcccgagggagggaaaacaagtcccccagagaagacggcggtactcgctagggagggggactgggctttggcttaaagaggactggctgggattgggcacactttgagcggcccctggagctgaggctgggctttcccgagcgcggcggctggctgacgctccctcccgcctccttatcccgggccctcctccctcgctctctcctagtgtgtagtttcggcggctcggctgctactgccgccgccgctgcagcagcagcgtcagggacaagcctgatccgtgagcgagcgagcacccagcagcaaccaccactttgggcaacttgcgggtttcctgctcgcgggtagcgaacgggagattcccactagcggttcagtgtctccgagccgctgcagcccgaggggcggcgggagcgcccgcaccagactctcccagacgcgaaaagggacgagacaactgcggaattcaccagccgtgccagggcacttccgaggccacaaccgactgacactttttctccccttggcaaactggatttttttttttaagctacttggcagctgtctctgactccacctccccctccacccccgcccgaaagcctttggcttttcttcggaaatccagacagaattgggcatctttgttaattgccgttggggacgcccggccgtgcgctttcgccggctaacgtcgcctgtgctccgagcctggtttgctcacctttgaactgcaaagggatcaagttcagcttgagttccctgcattgggaaggagagagagcgtgcaagagagcgagtgggagagggggaaaggggaaaggagaggagggaggagagagaggagggaggagagagaaagggagggagggaggggagggatcgagagagagcggggagagagaggctgcaatctcctccctgaatcgcgcacagcgctgcagatcccactgctccgacatgcgggccgaatgcaggtgagaaaaggcacggactctgcggctgcgaacccaaacttgggcaccgcacggtgcgcactgctcagccttcgcccccgtgggcgaaaggctgctgcggtttcaggcggctgcttcgtgactaatgaccttgcgcagagttgttaagaaaaaagagaaacccgcgctctccggggtgagaagggactgact

SEQ ID NO: 31783 - DNA, 2300 bp, Homo sapien
cctgggtctactcggctcatactgtgtggggtgcctgcctgaccaagctcgctcaactcttctggcacgtatgataatagcaaagtgagagggagttaattacctctgggatgacctttgtccaataagggtgggatgcaggagtaagtagataaaatggctttttctttttcgagataggattccgagatgtattctatacagtaggattaatgctctggtgcccactgtgataatcaacttaatcacgtgcccttaggttggctgctgcttcttaaccacgtgactcttttttattccttgttcttccatgtgaccatttcccagaataactctttaggtcttatatatgcaagtgctgattttaagaaactgaagctacaggaagagatgagagtttctaaaaaaaaacacacttgcttgagatacccctttactcttctacctaaaacatggatgtgatgctttcagagcaagcagctgtctttaaaatatgggatgttttaaacaaagagttttattctaagactggggaaatacaaagatgagaagaacctggctttatggtgatttcttaagcgctgcttttttaagcccctgatgtaggttttgctattatttatcgctagaaatgtttccaactaataggatactactctgtagcctcagttaatcctaatttggaaatgagagtaggacctacacatcaaataatgaccaagagacttttatcagcctgactgcttcttctgattggtgggatataggactttttaattttttttgctataattttctagatttaaaaaatttaatgtatctgaaattttaaattgaaaagtataaaagtcaacagaaatttgaactaaaatttaaccctcaaaggaataaattaaggaaccaatttgtgtgtaacaaagaacctaaaagcagaaagtgtaattggagatgcagttttgccaccctctcctcacctcccaccgctctctacaggccccaactgtcctgttctaacaataatttgagcacccgtatcttgtgaaaggcttcctagtcagcagagctgtaaaaagcagaatcaagagaggttttctggaccagagaaacaccttaattaacctatcagattctgaccttttttttaaaaaaaaagaaattataatgtgaatttaatccctaaataaattaccttatacttcatttacttgcctaaatcaatacaaatcagatccttttttgtcaacatgaagaatcaagaactcttcctatcacttattctcatgaactaagcgttttattctctagaaaattttagaataatttgtacctttccattttccctaaccacaaaaactaaaaggaataaaacgtaaaacagaatgtgtttaacattattttattttgagaaaagagatttttggaaatccactccaatatacagaaattttctactaatcctctaaaacttcagttttgagaagtatacagtttgaattctaaaacacaacatctattactacaaccagtcacctgcttaattgtcatatgatgaagattgttaatgtttcactgattaagtaaaaaaattgcccccaaatctattttatccatagcattatttaatatactgtcactttagaagcatatttgtacataataatttctctgtttgccaaaactctttcagtcatcagtgacaaaaataacacaatgaaacttgactaacaaagcttggaaatttgtctattccctagaaatgacttcaagcacaaaagaatctaatggcttaaatggtcatttcagagccctgtatcaatctgtaattccctctgaaaattggttttattttgcaactatcattcttccttgctaccatgctatatagccacctagtagttcaagggccttttattgtgtgttacagagcaagttactgtgcctttttcacaggctctacctaacatgtttcagggaataatcttattggcccatcttgtggatgcagaattctaataggctccctctgagttctaagcccacctttttgttgagagatgaggcattgttattgatgattccatctatattgagttatgaagagactacttaaacaaacaaaaccagatcaccacctgtaacaacaccaaacaaacaaaaccaagaactaggaaaatgaggaaaaaatatctgactgaatgaaaattatgttggttaactcttataatgattgtcatatatagcaatacaataactagtagtaactagatttcaattataaggtatttgtgatattgctatga

SEQ ID NO: 31784 - DNA, 2300 bp, Homo sapien
aagaagttgaaaagagagtgacttggtcaggatagtttgctatacaaattaaaaaaaaaaaaagatggttaagatgaaattctctgggtaacatggcaagtaataacttctgtaatcaactttagaacacaagtttagtgtatttattgtccaaaatgtgatctcagcatgtacagcatgtgccagccattaaaaagaaaggcaaaaaattgtattattattgttgatagtgtagttcctttcaaacactcaaaatttctcctaatttcaattattatgtatcatataagcctgttattttttattatgataaaaaatgcattactttaactttaccgtcttaaccatttttaagtatacagtttagtagtaatgatattcacattgctgtgcaacagagctgtagaactacgtatcttgcaaaactgaaactatacccattaaacactcattcacctttccctcttctctcaggccttggcaaccacctttctactttccaattctataatttttaaccactttagatacttcatgtaagtgaaagcatacagtattgttcttttgtgactggcttagttcacttagcataatgtccttgaggtttatttttgtggcagcctgtgcttcttttgaagtctgcgagattctccattgtatgtatataccacattttctttatccagtcattggtcaatgaacattttggttgcttttacctctcggctattgtgaataatgctgcaagaacatggatcttcaaatatgacttcaagattctgctctgaattctttttgatatagacacaaaagtcggattgctcggtcatattgttaataccattttaattttttgtggaacctccattctgtttcccttaatggctgtatcattttacattcccatcagtggtgctcatgggttccaatttctctgtatccttgctaatacttgctacattctgttactttgataatggccctcctaagtaaggtgtgtgagatgacatttcattgtgtttttgatttgcatttatcttatgattcatgatattaaccacatttttatatgcttggtgactatttgtagatcttctttggagaataacatattcaagtcttttgcccaattttaaaactggatagcttatgacatttttatctaagaaaaaattggcagttgtgccaaaggccgattctcatggggaatgaagtcactttctgaaaggaagtttgtagagcatatgcggcagctgttccctcctcttgctacctcactctctataaattcaaaaggcatctagaatttctgcagcaaattttttgaaggatagctaagacttttgaaggactggttatgaacgagccacaaaagtgtcttgtgaatgttcaaattatcctagtcttaccttcagactcgggcaaactgctatataaaattaacttgtttttctgtttttttgtttttgctttttgttttgttttgttttgagatggagtctcactctgttgcccaggctggcgtgcagtggcgagatctcagctcactgcaacctccgcctcctgggttcaaggaattctcctgcctcagcctcctgagtagctgggattacaggcacgcaccaccacgcctggctaatttttgcatttttagtagagatagggtttcaccatgttggtcagactggtctcgaacttctgacctcgtgatccacccacctcagccttccaaagtgctgggattacaggcatgaactaccgcgccgggccttttctgtttattttaatgtaaaacatgcaaaatgcattctaacagccacctctgccattggcaattattacttcaattgtatttcaaaatatcaaacctataaatataccattagaaatgaagaatcttacatgactgttccctgaagcttttcttcggtagtacattattgtcagaaaatacataaggtctgaatcttgacatttgaaggatcagtaattgttgctatcaaaatcaggttatgacccaggacagccacagccagagaacactcacataatagcatcataaggctcaatgtcacaatgatctgggaagggcaactagccataggcactgctatttggttcagagaagcaccaattaattcgactgctctctgatccacttgaagaactcagctggaaatcaaacaaagccaacctaaaaaaaaacgtctaacactagaggtatgttgtgtgttctttcaagtagactatattttagactctagaactgagggtcataactcctgtatctctctcttttc

SEQ ID NO: 31785 - DNA, 2300 bp, Homo sapien
tggagaaaagtccttctgaacatgtatctgagcacactgtgtgaggtttatctcagggcagagacataagatgctagtattctgtgaaaatcctgtagagtggaatttcccttaattcaagttaacaggagatccttggacaatcttaggaacagcatcaccttatttctgattgtccacaatggactttgtgaacgaagatgtcaattagcctaaagtaccaaaaataaactctcagtttttatattatttacaatttaagatgttttaatatagagaatgcatatgtgtataggcataaataaaggtgttgacaaaatgtagatgtagatgagagatatagatatagatatagatatggatatagatattgatcatctccatactggtctgatttagtattaaaagatctaattaaaaactttcctccagaaataaatgctacaactctttttatgtccaatcaacattaaggggcttataaattaacataatgaatgttagaaatgattttttgttggtaatgatcagtagtaaaaatatgcagataaggaaaaatacttgcagaaacttcaattctgataagttaaaggtctagtgaaaccagaagccctcatcagaatggagtcttaggcttagaaccccgcattctcttggatcaaaatagcaaaatattttgtcacaggataatttttaaatgataattgaatgctgaaaaaaattgtccacaccaagaatttacctgattgtctaaaaaagtcagaaatgagagacttcgtcaggattgcagaaaagattgcacagctgtgtccacacacgtgtatggagtgcacacatgtttgcttgctaacaaatatgtcagaatataatctgtgacttgggttttgttatagcacagctcatgatagtaaagtttttgaagagaaaatatccagccactagctatctttaactcttggaggctatcaatagttactcaaaaagcatcataaatctgaaaaacaaattaggtagttaggttgtaacaccaagaaacttgaagtaactcagatcataacccactgggttaatatttaaatataaaaatgaagtttctttttttacattaagatttgctctcataactgcaattatacccaaacttgcaacaatcacaaagctttgtagtatttccttccaataagaaagattataagggatggttacagcaaagttaagccacttataaaaaacttgttggagaaaaataagtgaaataatctgaactcaaactgcagctaaagatagatgccacttttataaaatacaggaaaaaattacttattctgtgctaaatagaaatatccatggaggaacaaacccctaaatgttaatggagattacattacagggataggataattgctaattttttttctttatcttcataatttttacttaaaaattttctaagttaagcaataggacttctatacttaaaaattactgaatttaaataatttgctttattatttaaacaattattacctcttactctctgccattgactcattcacattctcatggattttatggtctttatatcatgtttttcaatttgtggagtccaactacagtcatgcacctcataacaacatttctgtcaatgaagaattgcatatatgatgctggtcccattaggttataacagagctgaaaattccttttatttgctgatgatgtagccatcctagccatcatagcacaatgcattactcacgtgcctgtgctgatgttagtataaacaaacctactgacccgtcagttgcatgacagtatagcacatgcaattatatacaggacataatacttgataatgataataaataaccatgttaccggtgtgatatggtttagatgtgtccccaccgaaatctcaacttgaattgtatctcccagaattcccacgtattgtgggagggagccagagggaggtaattaaatcactggccggtccttcccctgctattctcgcgatagtgaataagtctcatgagatctgatgggtttatcaggggtttccgctttcggttcttcctcattttctcttgctgccgcaatgtaagaagagccatacgcctcccgccatgattctgagacctccacagcgatgtggaactgtaagtccagttaaacctttatttgttcccagtttcaggtatgtctttatcagcagcgtgaaaacgaactaatacatggtgtatgtattttactataatatacttatttattactattttagaatgtataccttgtactta

SEQ ID NO: 31786 - DNA, 2300 bp, Homo sapien
atgtttactacaatatatttaataaagaagaatggtaaccttcagtgagtatgcattaaaatgttatatctcagtgcgttgcaaaaagctgaatttgaaaattaaggcttgtttatgtaagaacagtgattttaaaattccactaatgatttctcaaatcactagcagtagggctacaattagtgggggaaaaatgtccctaggcagttaaaaacattgagcaaagtttcaggctggcattagcaaaaaataaagatgccacttcattgtactcttagtgatatctttttcatatcaaaagcacagtttcaaactttgtaacagagcaagtattctatttagtattcattatctgaaagaaatagtgataattaactgtatccactgagatagctgctaatgatatgtgctgagaccaggctggtgatgttgaaatctattgaactaaagacagatatttctaaaatccaattgtgagctctatttctttcttacaaaaatgttgataagacctactatataaaggaattactaattacttgatggagaattgtatatcagtgatgattcattgtttaagaaatgacattttgttctttaaaattgtaactccatttctgagaattgtcaagctctctctgagcttttgatctgtaatgatattgctagatagactcaaaaatgtataatcataatagcatagcatttttgttctatcttacttaaactattatttagaaagaaatgtcattgagatatacaggttatgctcactttgcggttaaagaacacaaaataatatacaaggggtatttgaatgaaccatgggaagaattgagagaatgctgttatcactatatttaataatttgtgaaaaaaatatcatactgaaatagaattttccatcatccagaaatgtttccattctttaataaccatgcctaaataagtttctagtcaatgtttcatttaaaattttatttcttatacaattaaatatgtctcaaaaaacctaggtccttaacataactgaatataaaataactataatttaacagattcttattcctattacaaagccactcttaaagaaagatgatgctttcttcatggcggggttaattttagttattcaaattagtaattccttcttttattaataaacatttagtgaatgtgtactgtggtccatgtatagtgatatactctggaaatactaggataaatgattcataattcatgccctcaggggtgtatattgaatggaaacacagacatcctagtgtgccacatctccatgcatttaccaagagtgatatgtgaatgcttaactgaatttcatagtggctctgacatgcagccacaaaccagtgtggaaaaatatatatcgctgaggcagaaacaaacaaaagagcatattgctttcggtatacactggaggtaatgccacttcacattgataaaaattaaataaaattaaacataacaatacatcaccatcaccacaaaaaatacaaaaattaaagatttattttcctagattagcttttagtttagattccttaaaataaacttttcttgtttattttcaaatggcccggttatgttttgatttgtttttcctttacttcggaatatcatactaagcttggctagatcactatgttttggtcaatgagttccactctggaaagttttattgtaaccattattgagagctaacaatatagaaaaggggaaaaaaatccatagacaaagattccttaccctttttactgttttttctaactacatgtggcaaagcagagaataagtcaagggcttctagtatgtgtgcatatgtttttaaattctgtctataccctcacagagctaccttgaataaatataaggcttttaagaacttagctgatgtaatggatctatttgataattctgtgtactctcttgagtgtgaatagaaaaaaataaaactcttcattttggaaatatgtctgcctttattcatataaaaatgttgggccgggcgcggtggctcacgcctgtaatcccagcactttgggaggccgaggcgggcggatcacgaggtcaggagatcgagaccatcccggctaaaacggtgaaaccccgtctctactaaaaatacaaaaaattagctgggcgtagtggcgggcgcctgtagtcccagctactcgggaggctgaggcaggagaatggcgtgaacccgggaggcggagcttgcagtgagcctgggcgacagagcgagactccgtctcaaaaaaaaaaaaaaataaataaat

SEQ ID NO: 31787 - DNA, 2300 bp, Homo sapien
aatcttcagagagtgaggaaaccagttgtcccatggtagaacttcaaggcagtgctgaatggtttcttaaaatttaaggttaaatttaaagtgtgatggatgtacagagtaatttgtttttgtcctccatcaactggcaggcactcatgaaataagctgaattgtgtttaattaggtttggggctttgccaggcaagtatgatagagaacgaaggagcaagaaaataaataagtaatcagataaaatttgaacttgaagatatttacaaggaagtgagtttactgattgaccatgaaatgaaagccaggcaatgagggaagtggtaaaaaatgttgtgagaagagtggtggtggattggaggtctcaaggagtgaaaagaatagttaaaatgaatgaaactaaatttagttagctggaaagataggcaaaggttagaaaatggaaggcagaaatggagatgtttaggtgtggtctttggttataaaatgaaagtttgatcctcacctatatgatccgtgctgtatgacttttgaagtcatttacaaataactacaaatgttaaatcagaacacatcacttggatgtaaagtagaaaaaaatgcctcttagttcaattcaaggagagttagctggtattcacagttgtatattatttcagaaaaagagaaatatggatttgggaaccgcatttgctcttagattcttcaaaatatattttagcgtatgcactacacatcagtgatttgaaagtgtaagggtaattcacaaaattgcctaattccctctcagtcagttttctcccaggtttatgttttgggaacatcacaattatataatatgctttttttaaccatgtttggtactgtgtcataaaaataatgtgaagctataactttccaattgaaatactgtataacctaccattatagatttgcggaactaaggtaaatgcttcactaacattcaagggtagatacgatgcacattaaaggatctgcactgtaagatcattgaggaataaatgaaaattatatgtacattgataaacatacagcttggcagtttgccccttagttaaattagctgttattatatggtaggtagacagtaaatatttgtttaaatgagttctttgccataaagcaacacattaaaataagagctgcaacctaagaacaataatctgttgcttaagaactgagagaaataaagagtaggcatttagctatatagtttactaaatggttttcatttcattacaatatctgtaaacttttcattttatactcggtattctgtgtttacgtcatagattgttgtttgaaaatcaatatactttttccaaattctggaaagttaatctaccctggggagtacaaaattctttaaagaattttttatatgtatatatcagagatgaatcactccagagcttatatttttacctgtgaacatttatccccatccaaattaacctttctccagtcatatgtataattatttagaaggcaagaatatatagtcaatgatttgagaacaaatgtgccccactctccgttgtacaatgattttcagtaaagatgttgaaatgtctgagtaaaaagattatatttctttggaattcaattagataaaatagtaacatttttcaagaggtcataaagttaggctaatttttctgatagtcatgccttaggttgatttgggatatataagatgaaattatttttacactgaaatcatatttggtgtaaatgtatagttacttagattacagtgcctagcaatgtagacaagtgtactatttttcttccacaaagagatttgccagttgcctcaaatacttttccccttttggtttgataagtagtatagaaggcatgtatttgaaacttagaaattgagctgagacctcaaagctcagttcagttaagagtttcatgtcctggagcgatgctgccaccagagtcaacatcataatcacaaatggaattctcatggaaatcagatcatttgatgtggatatgtgggaaagaaaccaagtggctttatgacatagtataccacataataaaatcacacaccaacagcaagaaattgtgtttccacagcatgaatatgatatatggccaccagctggaaaggaacgaaaacgttcaataaccaaaaatcccaaaattggaggtttgcctctgattcctatacagcatgaggggaatgcaaccttggcccggaaaaatattgaggtaggttaggattttgtttgttttatattcaattatagaatatattttcctgt

SEQ ID NO: 31788 - DNA, 2300 bp, Homo sapien
ccaccgcgccaggccgtgtagtttttttttttttttttttttttttttgtcagtgcagatgctgatgatgattgctgctgtttttattgtagccagctgcgatttgtctaattctcaccactactgttagtgctcttgtcatcttgttattgaggaaagcaggtattggtgtgttttaagttgagaagatacgcaacgaacatacacagacatatgcactttctttcaaaacaaggtaaaataaatttacatacaaattaaaatagaaatgcaattgtgttttgactctaggacagcatagatctttaggaccaaaagattccaaggttagaagtctaaaaatggatgctagcatttggagcaatgaactcatcgaggtgagtcctatttaacctgaatggggttgtgataggggttcagtttgcagagactgggaggaggtttgctgtgggtttgggtggcaggaatttttctcggggctgtttgataaagttctcaccacattatggaagtggcttatagcctttttgatagtagtaactctttgagaatgcttcctaaatgagatagttattttaaaagtatagaagatccttaataagtacttagaaaggtttgccagcttgtttttttttaatgctagaactgtatatgtgtgtgtgtgtgtgtgtgtgtgtgtgtgtgtgtgtgtgtgtttgtgtgtgtgtgttttaaacccaacatgggtaaaataataggagagtgaatgaaaacatttggaaaaatttactgtttttaccttggccgtactctgtcattaactgtgatggaggctactttgctgtgtcctgtctccatttttggctccttgttccaccaccaagcacttcagacagcattagcccacctactcggccatttaaagtgaagctgtctcagtttgagtgtcaaagaatgaaaatacttttgctacaatttgtgttgtttgcaattctttccaagctaatttttctccattatttagagtgggtaggctgtattaaaaactgatcatagtatctgctttcatacttcctttttctggaatagttgagtctttcatgtgttttcctgtattttatactaagttatgctttaatttgtaatataattcagtttcctgcagattcaaatatattttatgaactgatatattatggggttttttttttgacaattcagctttttattgtcattggaaacaaaagagcaaatgacttttgggctggtaatcttcaaaaggatgaagaattacatatggactcaccagtagaaaagagaaaaaactttattactcagaaatataaagaaggaaaattcagaaaaactcttttggcatctctcaccaaagaagaattaaataaggtattcaattaaacataacagcagacgtggattttaatgtctttttaatgatgtgccaagattcttgagaaaaagtaaaaaattttatactatctgacaaaattattaattttattttatttccttttgtgacattatttcagtggtttcccccttgtttcatttaaggattcattgtcaaaagagcataaattcttcctccataattgaagtttcctgctaactcttgttgccacaatctgaggatttggaagcaaatgggatccagtaaagtgaagtctgaggactgatataatgtgggaagaaaggatgagaagagatgtagaggcagcttattatttcaaggcaaaagaaaaaaaaaggattctaacagttcctattgtttgtacaaagatgatatataacataagtcaataatattttttattgccgccttctcactgttcttcctccttcctatcctcggcccctgaggggaagatcctgaatttgctttgcactcatctttcaatttcccatagcacttaataattcaaatattctgcagctcctgattagattggaaaatatatattaacattcacatgaaaaacacttaatggttacttcattattatattgaaatattttgattctctgcgcatcagtcattatcatagtatgtaagcataaaaatgtcttccaaagcaagtatgatggattaggtttagaaggaacatcatagcaaccaaacaatgaattgagacctggaggtcttgggttgtaatttaaattcacataaaccaggccttttgtgcctattgcctaattcatggcataattattattagccgccttaggataaaaggaatacagactttatcccatacatgaaattatcagactttcactcattttaatagctagaatcttatttt

SEQ ID NO: 31789 - DNA, 2300 bp, Homo sapien
ttaagtactgcttcatttaaagaagaaacaagtgagcaaaatggtttaactaccattatatatttaatctggccaatacttacaagtaataactaaaatgataaattacaaggtccagaactttgcagaaaagattaagacagcgtctcatagcctctaatctcacatccaccatatgtggtcaaagctaagacatatttcccagattattaagaagttctctacctaattaatatttcaccaagaattcccaaaactcttacaatgtagcatgtgcaaagattgtatccaagaaatgtatcaataaataaatgaggacaggtggaaatgtatgctaaaagaaaactattaaagcaatgactattatttatacttagcatttttatagtcactttcaccaaactttctcacagttgcagggaggtgggttagaaagtaacaaaacgaaacaacaacaacaacaaaaaacttctcatatatcatgaagtctataacccagaattctacgtagactttaaaacttcatagtttcaatgcgttaaagttcttaagaaaactgtaattcattataatctgagttctatacttctccacagtatccaagaatagttggatctgatattattgcatatccatgagccttacactgcaaggagcttgcagtgatattagaaaaacaagaatttgtttttaaacgtaccatcagcttctccttttacagacaagccacataaaatctgacaggtttacagacgaaggaaaaaatacaaacacaagcacacacccatataaatacgttttaacaagctctctcacttaccctctaggtacattttaattcaaataaatctttgagtactgacaaatctatataaaaccctcttcgtgttaggaaccaccttaaatgtgtatgtgttaaatatgtttagaaagaagccaggaagatatttgcacttaaccctagcctagttccatgacccacttttttttcttctttaaacgttgttggacaaaaaatgtcatgagtattttctctcaatatttctcctgtaagtgtatggaagtcataaataagagttaaaaaaaaaagagtttaaaggtatttctctttttttccttaaaaaaagttagcttgctttttatcttccaattacttacgggcaaagttccatgggcctgtgggggtgtagagtgcttaagtgcagataaatcaatactgagcttgtaagtacaatactattatgagtaataacaatgacatcctattaaatgtacttttaaaaatagcttattttcaatacacttcttgattttttttaaaccgaaggctgtattctactgaacagcctacttcaaggacaagcttgcaaaaaaaaaaaaaaaaaaaaaaagaatttgctatcaggatacctacttacaacaccctaagatgtcattattccacacaaattagcttattttcttgtgttttcctctaattatcaaaggctatataatccacgaaccctttccccaaatcaaaataactccagatcacctcaaggtaggaggtgtttaagaaaacaagccagaattagataaagtaaaacttactttattaaataggatggacaccacttctcccaagagaactgtctccaaaagtaaacaagaaagatcaatctggtaaactcacatcatacaggttcccgtgtaaggtatcgggttcaggcaggtggaagccaaatgatcgtaattaaagttaattaacaggccagtcgtcttaacgtggttaacaagcagggtgcggggcagcacagacacccgggcaaattcatgatctctaccgagtaaataacttggtgcctgaaactcactacagcttcttcttatttaaaggtaggggagaggaatggagggagtgtccagctgtctatccggatcctcaccctcccgggtcaaatcccagaagtggagttcttggatcacttaccggcttctggtttcctttcagacgcccacacgcgggagcgaaatccaaggggcggacaccagagccgagcactttgcgctgaggaaatttacccggtgaagtgtcgaaaagccccagcccctccagacagggtcctcccacccccgcgtgggccatcccggcccagccttcccgaggccccgggtactcgccttgcgctcgggtcgcggagttcgaaaagcgaggtgaggcggcgctgggaagctcagcgccggcgtctctcccagccttgggcgctcggtcctcgcccctctgccggaggcgccaggcctcctctttcccggtcccc

SEQ ID NO: 31790 - DNA, 2300 bp, Homo sapien
atgtgagaatttggagagggaaaagggaaaaagaacaaaagaaacacacacacacagagaatgaagccagaaaagagccacataaataaaattcctcctataaatgctataggaatccagagaaaaagttcccgtggtttggaaaatgtcaataaaactttcctggtggaaatgaggtcggctatgaggtattaagttcaaaaggaactggatatttggtgtctctagtaagacagagctgcttcagagtctccccagggaaagacggtgctttgggcaggtagttagtgtgggtgaaggtgatgactgaagaatcctaagggcccaggcttgtgggaagcctctctctttccgcacttcaccaattatctcattttcataaggtctgcgctttccttaattgcttcacttccatcaacaggaacaggggaaagataaatacatttcaccttttaatgaagagaatttcaggtagtctgtgggagatgtttataaaaaaaaaaaaaaaagctggtagggggcagtgtctcacgcctgtaatcccagcactttgggaggccgaggcaggtggatcacttgaggtcaggagtttgagaccagcctgggcaacaaggcgaaactccgtctataccaaaaatacaaaaaaaattaccttggctgatggtgcgcgcctgtaatcccagctacctgggaggctgacgtgggaggatagcttggacccagaggcggaggcgcaatgagctgagattgcctcactacactccagcctgggtgacaaagtgagaccctgtctaaaaaaaaaaaaaaaaagtagttggtctgtgaactcacttgcaaataactggattttacggacgcttagatatttggaggtccacaagggttctttgggatcccctattttccttcgctgcctcctttgtcagagtccaactcaaaggggaaatgcccctctgggatctaaccgccacaggtgcaagaaggagcaaatttacatagaagcagcctggggaaaatagtgccctagatgagtcttcagtttgggaaacgctgagctaacactttaagtacttggaagagtaatactaataatcagtcgtggcgaggttccgcccatttgacattcaaccccccatgagtgcgcacagacaaacccactggccaggaggagccaacacaaggtcctgggcatctccgtcccgggaaggtgggtaatgcccctgtcgctctgggctccagggcgcgcccccgcagcttccccagcggggtctgacgcctccgggccgaggtgcgccaggtggcgagggtgccaggcgcggccaagtcgcggcggtctgagtcagtcacccaactatgctgcggaaccagggaggccggctgggccgcccccgccgttgagctccggcttcccccgcgcggggcgcctgctccccgcccccgcgggcggagaggaagcggcggccgaggcgaggcgcgggagcacctgagcaaggcgcgggcgccgggctcggcgtttccggagctgagcgcgggtccgcggcccgcgctccccgcctccaggtgcggcggccgcgacacgccggccccactaacagcgccgcccgcgcggccgccgccaggcagcagaggcgactgcggacagccggcggggaccgggaaagaggaggcctggcgcctccggcagaggggcgaggaccgagcgcccaaggctgggagagacgccggcgctgagcttcccagcgccgcctcacctcgcttttcgaactccgcgacccgagcgcaaggcgagtacccggggcctcgggaaggctgggccgggatggcccacgcgggggtgggaggaccctgtctggaggggctggggcttttcgacacttcaccgggtaaatttcctcagcgcaaagtgctcggctctggtgtccgccccttggatttcgctcccgcgtgtgggcgtctgaaaggaaaccagaagccggtaagtgatccaagaactccacttctgggatttgacccgggagggtgaggatccggatagacagctggacactccctccattcctctcccctacctttaaataagaagaagctgtagtgagtttcaggcaccaagttatttactcggtagagatcatgaatttgcccgggtgtctgtgctgccccgcaccctgcttgttaaccacgttaagacgactggcctgttaattaactttaattacgatcatttggcttccacctgcctgaacccgataccttacacgggaacctgtatgatgtgagtttaccagattgatctttcttgt

SEQ ID NO: 31791 - DNA, 2300 bp, Homo sapien
atttctcaattagtttataaaatctaccaagcgaagtaacttgaggacaaagcaatgattgaacctcccacacataagataactgatctaataatttttatttataacccaccttgtttagagaaggaccgaagatggcttacaatgataaaaatagagccaggcatggtggctcacgcctgtaatctcagcacttctggaggccaacgcaggcgaatcacttgaggccatgagtttcagaccaccctggccaacatggtgaaaccctgcctctactaaaaacacgaaaattagctaggcgtggtggtgcatgcctgtaatcccagctactcaggaggctgaggcgggagaatggcttgaacccaggaggcggaggctgcagtgagctgagatcgcgccactgctctccacgctccagcctgggcgatacagcggggctcagtcgaaaacaaaaacaaaaacaaaaaagagagagataaaaaaaaagagagaagtatgtgagaatttggagagggaaaagggaaaaagaacaaaagaaacacacacacacagagaatgaagccagaaaagagccacataaataaaattcctcctataaatgctataggaatccagagaaaaagttcccgtggtttggaaaatgtcaataaaactttcctggtggaaatgaggtcggctatgaggtattaagttcaaaaggaactggatatttggtgtctctagtaagacagagctgcttcagagtctccccagggaaagacggtgctttgggcaggtagttagtgtgggtgaaggtgatgactgaagaatcctaagggcccaggcttgtgggaagcctctctctttccgcacttcaccaattatctcattttcataaggtctgcgctttccttaattgcttcacttccatcaacaggaacaggggaaagataaatacatttcaccttttaatgaagagaatttcaggtagtctgtgggagatgtttataaaaaaaaaaaaaaaagctggtagggggcagtgtctcacgcctgtaatcccagcactttgggaggccgaggcaggtggatcacttgaggtcaggagtttgagaccagcctgggcaacaaggcgaaactccgtctataccaaaaatacaaaaaaaattaccttggctgatggtgcgcgcctgtaatcccagctacctgggaggctgacgtgggaggatagcttggacccagaggcggaggcgcaatgagctgagattgcctcactacactccagcctgggtgacaaagtgagaccctgtctaaaaaaaaaaaaaaaaagtagttggtctgtgaactcacttgcaaataactggattttacggacgcttagatatttggaggtccacaagggttctttgggatcccctattttccttcgctgcctcctttgtcagagtccaactcaaaggggaaatgcccctctgggatctaaccgccacaggtgcaagaaggagcaaatttacatagaagcagcctggggaaaatagtgccctagatgagtcttcagtttgggaaacgctgagctaacactttaagtacttggaagagtaatactaataatcagtcgtggcgaggttccgcccatttgacattcaaccccccatgagtgcgcacagacaaacccactggccaggaggagccaacacaaggtcctgggcatctccgtcccgggaaggtgggtaatgcccctgtcgctctgggctccagggcgcgcccccgcagcttccccagcggggtctgacgcctccgggccgaggtgcgccaggtggcgagggtgccaggcgcggccaagtcgcggcggtctgagtcagtcacccaactatgctgcggaaccagggaggccggctgggccgcccccgccgttgagctccggcttcccccgcgcggggcgcctgctccccgcccccgcgggcggagaggaagcggcggccgaggcgaggcgcgggagcacctgagcaaggcgcgggcgccgggctcggcgtttccggagctgagcgcgggtccgcggcccgcgctccccgcctccaggtgcggcggccgcgacacgccggccccactaacagcgccgcccgcgcggccgccgccaggcagcagaggcgactgcggacagccggcggggaccgggaaagaggaggcctggcgcctccggcagaggggcgaggaccgagcgcccaaggctgggagagacgccggcgctgagcttcccagcgccgcctcacctcgcttttcgaactccgcgacccgagcgcaaggcgagtacccggggcctcggg

SEQ ID NO: 31792 - DNA, 2300 bp, Homo sapien
acattatatgctacagaaaaataaggagaagggatgatttttgattggtaaatatgaaaagtccttttaaagcaagtgacatttaaactgagatgtgaaggctgggtgggagggagctatgtgtgctgtgaggaggagggcggagatgtgttctaggcaaaaaagagaatttgtgaaaccttggaggcagcaaaaagcaggaacttcggaggaactgaaaaagaaaaaaagctttcagctagatagtgaatagagtagacaagatgaagttggatgtacaggtagctacatcatgtagggccttagaggccatgttcaggggtggagattttatcaaaaggacaatagaaagtcattgagtggatttaagaggggacaatgtaattcactttatttccttaccttataaaatcttcaaaataacctttaatgaaagatactgttattatgcccatatttcagctaaacacatggagatgcagggagattaaatttcaaatgcattactagatagctcatatatgatttcagggccatcttttcacccactctaccatagtggcataccatgtgtgcaaagaagtccacagtcgtctaatctatagaattgtcatggcatatgagcatttatagaccataacataacagataatacataggaataattaatctttttgaggtcttcataaaattattttgtatttataattcaatacttctgggtttagagaaataaaaaggacatccagtgaattcatccttccattttctacagtcgaattctaagcaattagggaagatttaatttgttttaatgtgagatgccccttttgttttatataaacaaattcaataattatccccaaaccaagtaactaaaaatagattggaggaaggggaacagagaataagaatatgtcagcacttcatgaaaattttttggtagattggacagtaaagatgctaacctaattactttccctgtagctagttccagaaattgacacgatttaaaaagacattaatcattgacttaatgtacagtgtgtacatcagttgctagtaacttgtatgccagtgaaatctgctgttcttactttagaaaacaaaaatccatatatcctgtttttctatctgaaaaggtagcgttctcaatttctctaaaacacattttttttagaaaaggtatctatctgccatttgatcatttttctatgtgtgaaatatgacataccatctcggttatgctgaacagcaggtgcgcagagcttcaaaggcctaactcacaggtttgcatttccttcactccacatggcttctgtggcatcctgtgtcatgttttgtgttctttcctgtggaaactctcatacccacattacttcagtctagtttagcaatcagaaaacatggtgtctgcccagtagattttgcaaacattttaaggaaactgtggtagtcatgcttgattgaactgttctttctttcacttataaaggaactactgctcatgccttcattcagccatgaatgcttggctttttaaaaacagtttctaggacactaaaaaaaggagatttttgtttttcattcatctccaaaaaaaaaaaaaaaaacaaaacgaaacagcataggaaatactccttttattctctgggtgaagacagtttttacaaagcaatttttttaataaaagaaagcaacttaatttattagattatctttataatctacagagtgaacttctaaataaaaagcaaaacatttgaataattattagatgggtaaatgttttattgagacagcagaattgaacagggaacaatgaaatataaagaactgaagtttttcttttattgtcccttccaaactgtgcttctgaacttacacttctcctgcccccaaatgaaatatagggtgggtctcctaggtcttctcatctgtgtcaatgacaagaaaatttatattataaaagtgtctggtctaatctagtatgcaagactatctctagtatagttcattcattataaagcctactgtactcagtcaccacccctctcttacaagcctactttaaattggaaagcctgtctcgcttgtttcggtgtggtgagtgaaatggagaaggctaaactttttcttcccacatgctcacttccttgcttgttcgctagctgctgcatctggcccctcaagggtaaagtcaaggggaaaaggagattgagaggaaggacagtctgtgaattggtgagtgcaattgtaattttctggcgcttactttctcttttctactccatccccca

SEQ ID NO: 31793 - DNA, 2300 bp, Homo sapien
agcatagttcttatactagtggtcaataaatatttctcaaataaatgaatgcattttcaatactttctattcctctccctataatctgatggtttggtaagtttagtaagttctatccactgtacttcaaatcccctctcacgccatccccttctctcatctgctctgttgctgttttatacagaccttcgagcctcctaactcttatatctctgtcatctaatacatctgcatctctacagcacagatttcatcacattgcagtctgattcaaatatattcaatttctgtcttatctgtaaaccaaaattctaatttcttctcctcactatctacaattactgaactcttcatttgtcacctctgactcgttaactgaaccttcctccaaagccatacttttacatttttgatcctactgtgtaatctcatgcctccgtgactttgatcatattatttcctatgctggaatattttttttcttttactccatagcctgcttatcctttagtttctaattcaaacattttccaggcctctaagcagaattatttttttaactcctcaaagcttttatgatactttttctttatacttctgctctagctctcaacacagactaagctttatttcaataatctgttcatgcatctgtctcttgaaatcctaaaaaggcctgacctccagcacttagttcctgtcccacagtaaatgctataggaagttttcaaaattagcattgaattaaagccatgtgtacattattattgagaatgacacatccatttaaggagtaagaaaagaaaatagaattgaatgagtgagtctttagtttgagaagatttaaatgatccaatccatgaagtgatatgaactcatactgcgaaaaaggtccccttttcagtgaacagaagttaactgaaaaataagacacttagtggtgaaggagcccctctccactctgcagccaccagtactcaatactgctcctttccttcagggtctttgacagtctttagggcagtggcagtcattcttcattatttattctctgggcttgtttttcccatcttgtcttccaggtgccctgagtgtagctcttagaactccagggcttaagatgagataatgtgttgcctgtgggagggaagcactccggcttccacttgaaaagctttcattttgttccagtacccgagggaacatgagcctctctggaatgtacttgctgccctcttcctttggcttaggtgtgtgttctctctgagcagtgggattggagagagggaggcagactgttctggtttcctccaaatacccgcaagtgctgcattgcatagccccatatatgatgcgctggcaggcagatgggcagcagtggggagagcttgttgtatctgaattttaattacatatggtaaagaatccttgctagtttagagaaagctactcttcaggtttactttctttcagtgaaggggcattttatccaattagagggaaattatcagaggccaagttcttatctcagtctctgcagatttaccacataagaagatgctaattataacttcctaaccaatgcaataggctctgctccagtagaggaatctttttaaactcttggttataaaaatactatacatatacacattaattagagtgaattgtcaagaccccatgtgtaaacatatccagcttcaacatttattaattcttacagcaaattttatacctctacccacccctatgctccctgattatttagaagcaaaatcagacatcacattatttcattcataaatatttttaagtttacaggaatcctgccagcaatattgttcatacagtttacctttgattaataaacttcttaccctacctggaatctgtattttgttgcctcaaaacttgaaaagtatttggtacttccacagtatattgaatttgtaaaacttacacagagagttggatcatgtgagtcagctctaccccagtgattaatgtattctgtacacagtagcacccatggtacaggaacgccccttcttcggtcacctagtaacttttcactagtcaacaccaaactgaataaccactatgttgtgagaaagtgctgggctagctgactcggatcatctcctagagtttaggagaaataacaatcacaaagtttgaatttgcaaaacctttaggctttgctggcaggagagaaaataccacttttggatcataaaatggatatggaatacatgggctcaggtaaactgggccaaatattgaagcagatttggagacaa

SEQ ID NO: 31794 - DNA, 2300 bp, Homo sapien
aaataaataccaagtacagtaagcaggaaaagtcaggacttataataccctaaatgattctggtaaaaatccatgctaaagatacacagaaaaatactaattatatatactttcttagtctattgttaatcctatcacttttacttgtatgtcttttagtaagaaaagacttatttccagaaaatcctacagtaatatgtgggaatgggaggagtgtgaggttagggcagctggatgaaagagctaattgccacagatatcacaataataacctattagaatgtcttcatgcataagtgctctagggtaaataatcaaattaataaaaacagcgtgtcattttctgtcattgactgtataaaattgatgcttagctacaaggctatgtggcatccatgctaaatggtgctaaaagtatcagaaagttcttaccgtgttactttacacaaaaatttgctctgcactagagtccccaagaactgggaagcagtagaaattacagaggacaaactcgacaacttcttatgacaaatggctatagtattgtttcggttgcccttgaaattattgaccgcacaaggaacaattaaaaatacggcattctggccgggcgcagtagctcatgcctgtaacctaagcactttgggaggccaagatgggctgatcacctgaggtcaggagttcaaggctgaggcaggagaatcacttgaacccgggaggcagaggttgcagtgagtcgagatcacgtcattgcactccagccttggctacaaacgcaagacactgtctcaaaaaataaaataaaataaaataaaataaaataaaataaaataaaataaaataaaataaaataaaataaaataataatattgctctagtattcaaaggtagcattttgttttactgttttgcccttccaaatatgtgtaaaatggagagaaggatttacaattttccagactttcccctttctaactttcaccttaggttttactgggtattgtgaggagccccattatgtttgctgtgcttcctatgatgacctgtgttcattctttgcggctgggaaggcactatgatgatgggatatcaccaaacaaatcagccctaaagctggtccacaatggcaattgtctttccgctgcattgtctttcatacttgttttcatgcacatgtttctacagtgacatcagcttagtcagtgccagttaccaccccaaagctccctgaaagcacattacaatgagggtgagtcccggccaggctgaagcattgagcttctttccagtcccaagcactgtcagagactagtgtggttagctctcaatcaggagacctgatcacacttgatccttgatattgcatctatcacagaggaaaacagtaagagctccccatcttccacacaatttttttaattttctttttttttaatgaaaggcagatgaggtaaccaaggagaaagcaaagtttatataactcagatttgagctcaggctcaattctgagagttccacacatgcctcataagtgtgcagagaaggaaccagtctagaaagttatttgcataaaagctgaggtgtttctggggtaagaaatgaacctcagtttcagaaataactgtgtatatgagatatgacttgacagaattctgtatgcaggggagttaggatggttttacctaaaaatgcatgcacatattttataaatttagcataaaaattcattaaatatatatgaatgtattaaatattgcatgttaagtatatcatatgtaatataaatattacacattattatatagcataattatatatagtacatgttacatatatgtgaaatatacaaatatatatcatatcatacactgagagctctagtcattggggccagcaagtgtttagagttgagcaccgaagttccactccttagatgcatgattatgtctgaaggaaaaaagttttaattaaaaaaaagaaggcctattttatttagttctgtggcatatcagggcacagtcaatattactttaatgtcatgtgacatgaggggtaggaagccacttcctttatcctatcatgttttaccacacagctcacacaccgggagagcttagggtggccactaacagacaattgcttcgcttggaagggaagcaggagagaccaagagctccatataaagcaggtgcagtgggatcactgctggtgggatccagcagagcagcagtagggcagcagctgtgcgaacctgtggaaaccacagatgtcatctggacctatatggcaccatgagagga

SEQ ID NO: 31795 - DNA, 2300 bp, Homo sapien
ttatgtcatttctaaatgtatcattaggcatatgagaatgcattacatcatatgtaggttgtagggaatctgggacactctctcagccactgtgaagctaacacaggatggataccagggggactgtggcatcatgctgagtaaataagttttccaaacatttagcaactttcccaggatatgggaaataaagcaaggagcaagcctggaagttttttttctttttttttttcacctcaaaacacacatgcattagttttttatattaaacctatttggctatgtctaccattctctcccatcaggttgaccaccaggtgaggttgacaccagggacacccatgtctgaccttttgttctgccaatttttactcttcttttcaacaatagaagagctttcaatcatgaattcacgtttcatagaatcttcatttacattatcttccttatccatccgtatagttaaagtaaatacataaattagtcttgaaaatgaaatagtattgaaagtaaaaagaagggcaaatggtaaactggatgaatgactgaacaaaattttggctgaaatcaagactgtccttgtcatcacactacctatggtgagattgtatgattaaagtaaactatgtttgactaatattaaagaggaacttttagagtttagaagacttctttcttaagaaagtatgactttcaaaagtattgttttgctagagactctatgaggtcagctttcaggcaccacaataagcaatgatgacttcagtctgggcaggagccacatttccctgaagcaacactcgcctttggtagtactgattgggtgccagtgggggtgataattatgagactgccatcatagaaatatcaaaaggccttcatctgatattttagaatatttttcctttacatgtaatatgagtctagggtaaaaggcaagatttaaacgtaaattgtatcaattttattgactgagagattgacctgtagtagatctttctttttctacttcatttactacttatgttacaactttatcataatcattttgaaactttaaaaaatgagaatgatgcatttaattgcacatgtacagtgagttaactgcgctctaagtaaagatgaaaccttaatactagaggtggtgtacaaaaatattttactcgtgcaaaatgaggggttctgttattttaatattaaagaaagtagatggccaaattgttaattgctaacccatgttatattctgaattcatgttttcgagaaatgtattaccaagaagttttattttctttctaatattagcagccagaacaatctggaatgtagaattataaagaacacaattatttttcagttgcatacacggaaagcctctagtgcccccaatagaaggaaatgccataggtcattttaacaatgttatttatagctatctgggtgagtaagttaccagaggatgtgacaggacattttagttttcattatgcagttttctcatttgtaaggttatgtcattagtttctagatgtatgtagactgtgtaggaagaatataaacgggttgaaatgagtggactctaaattctgaagtgtctaaaatgtactttagaatggctgaatggcaaaggcagagggaaatggaggtcaaatgaataattaaatagggctttgatggttaacaatatctaggttattacaattttgttaagcatttgcagttggggaggattaaaaaacattaatggaaaaatcaaaaggtacaattaaaagcagttcaaagcccaagtttatttttttagagtaagcaaattagactaccaaaaggtcaaaataattttaaattaggaaaaaaaaaaaacacaagtgttaaaggaagagaatatgaagcgagcagtcatctggaaggtaccctgacaagcaaaagataggaatatccagcttccacttggacatctaccagaaggggtacaagttttgtataatgaacatgcacggttactcatttaaacaggctaaggctaagaaaacccagagaaacaaaaatgtttgggatggggatgtaggttcgggtgggttaagttaaaaatttcggcctggcgcggtggctcacgcctgtaatcccagcactttgggaggctgaggtgggtggatcaaggggtcaggagttcaagaccagcctagccaagatggtgaaaccccatctctactaaaaaatacaaaaaattagcccggcgcaatggcaggcacctgtaatcccagctacttgggaggctgaggcaggagaattgactcggaggg

SEQ ID NO: 31796 - DNA, 2300 bp, Homo sapien
cacattgtgctcatttctatactgtcatacttatcaaaatttatatgcagttcatctttgcaaattgtcttcagagacggtttagaggcaacatacgataaccatttttgcatcagactctcatctacatatcaaccacacatagccttcttttccacagtcacctctcattcaattaaaatggctctgaatgaatgacctttggttgtttacaaataccaagtctgcctgtaagagcttaagctttgctgccattgaagacatgcagacatcagctccagaatgtgctatggttgagttctgcataagtctcacctgatgggagtatcctcagagaagagctggctgttgcacaggaggcaatgctccctggaaaggaacccagctcctatgcctgggaaacagtcacattgcttcagggtcacgttttgaaaatactgtgtatagcctatgcataaaactcttgtaaaacatttgcaaagacacctgatactttctattcttagctcaagagttcaactcattttatttaaaagatattaaaatattaagtttgcagaaggctggtattacaaaaacctgatattcaacagaagtagagtgaattaagatggtagaagtttgcttccattcacattctccatgaagccaagagaccacaagtctacctagaagatttcgtatcttcccaggtaatcactttaaaaggtgactcagaccagtgtgtaggtctatgtttatctttctgtccatcctaaaccacccctgtgagcaggatacagataaggaaaagggaagattgtttcactagtctggcaggcaaagtctagataactgattgaaagatgccattatgggacataggctgtgttcagcctacctagttgtaaggcacacgataagataaaaatcccaggaaagatacattttggaaatcctgcttttgactcagtttttcaacaggcattgtcatggtgatgagaagagaaaaacttgggagaaaacgctagaagaaattaaaatgatgtgacatgatatctacataaggttttccctgacatagaccttgtcaggggccttgccagatatttatgacactgtggatgccatgtggttagtggaacttccagagttcctgtaagccacaccagcatctgatctctgagtttctatagggccatggctagtaggttgatagatcttggtgatactgaaacgttaatacagccaaggccattttgggtgtacatgtaggtgtgtgcctatgtgggtgaaattgctgattttatctcccacaatatgctgagtgatcatgaaagtaacattttaaatgtgagtccagagtatcaactggttttatcaaaacctaattggaaaaagtatatatatatatatatatatatatatatatatatatatatatatttatatatattccacctctctaggatatttttggtgttttttataattgttattttcattgtagtaagagtatttaaatgagatctacccttttaacaaattttaagtgtacaatagagtatcattgatgaatataaatacattattaaaaagatacatgttggtgaggttatgtagaaactggaacccttgtacattgttggtgggaatgtaacatagtgctgccactacggaaaatagtatagagtttcctcaaaaacttaaaaatagaactgctgtatgatccagcaatcccactgattggtatttatctaaaagaattgaaactcagattttgaagagatagtatttgcacccctattttcattgcaacattatttacagcagccaggatgtggaaaagtgtccattgatggataaatgtgtaaagaaaatgtggtatatacagacaaggaattttattcagcctttaaaaaaaggaaattctgcaatgcaacaacatgaaggaacacggaggacattatactaagttaaataaatgagacacagaagggccagttctaagctctcccgggcctgaaagcttaagtagatgaaaaactcctcccttctcaggcccagccggaagacgcaaggccacttgcgtcagcagcgtgcgtcagcaaggtagcagaagcaggaagagagccagcaagaagacacctaccctggcaggaagacacgtacccgtgaagatagagaaagaggccatccaggtacaacgtagcagttacctcagaataggacacctcctgtttccaggagactataaaacctttgccccctcctcacttgggggctgacgccattaggcctcagcccgcctgcacccaggc

SEQ ID NO: 31797 - DNA, 2300 bp, Homo sapien
atcatggtgttttcaccctggtgtgcatcaagaaaccataggtttttcttccatatgttttacaagggcccctcagatctcaatttggcattccaagagatctgcaagaagtacagattacacgttgtatggacacatggagggttcagtttcagtgtatcaacatgacagattacataaaactggtaatctagggatacaaataaaagcagcacctctagctttatagaatgccagcccttactatttaatagatgaggggaacttcgccagctacctgtgcatattcagagcaacggttcgcaaactggagtaggtaccacttgctaaaacacagatttcttcaccctccctccccaactatttctgaatcaatacgtctggggtgggtcccaagaatttgcatttttactacattctctcagattatgccgatgctattagtctaggaactgcactttaaaatctaaggcaggctggggcgcgcggtggctcagcttgcaatcccagcactttgggaggccgaggcgagcggattgcttaacctcaggagttcaagaccagcctgggcaagtttaggagagcccacccccaccctagtctccacaaaaataataataataatagtaataataataataataatacaaaaattagccgagcatggtagcatgagcctgtagccccaggcactccagaggctgaggtgggaggatcccttgatccccagaggaggaggttgcagtaagctgagatcgcatcacactccagcctgtgtgcaacagccagaccctgtctcaaataataataaataaataaataaaatgaaacccaatacaaataccaacccctttttcgacagataacctacttgataaatgtatcaatatcctgtagacaattaagtgtcgactataagttggacatgagtgccgttcattgtgacaaaggatgtaaaaccacatataacttcctgcaaaaatctaacactttacagcgtgcaatcccagcactgcaaaattagaaggattcaaaaaatggagtgttcaaattctcaaaagcctggcaaatatcatgtgaatggggctggcatcattaaagtagatacattgaaaacccaaggacactatgtccatccttagataatactctgtccagatgcctctccaatatcctattttattctcttgctggatgagttgaaaagaagagagaagagggtaagctaggtggcgcagttgcttaacactttttttggcaagctcagcatttgctttggagcacaggtgaaaagaatgtccagtccttaagcagagtcagttctccacccgccttaggtatatggattgtaacagctacgaatgtggaactcagtagattggatgcagtcttgtggccaatgccctaagacctcaggaaaagaaagggatggagggggagtgggtgaggaggggacggggaaccaggagttcattgaactccccctggggcctttagggtgcaggcgagtgtgtgcaacttccctggtttttatcgtggtggtggcgcccccgctgtttctaggtccatgtagctcatacagggctggccatggaactcacagcaggtctaggcggcgaatgccagaaataaggaggaaactgaaaaatgccaagttctcggggtttgggagtacacaactatttgccagcgggtgcatttgttttgtgtatccccgtactccagtcccttgatcataggaagctcccttctctccagcgcaacattggagtaagcaccccggagtttcccgtgatggcaggcggttggcgcggtcgtttgtgctcagaggccaacaagcgcgtggattttctgcttcagtgcgcccgggactgccaccccggccccggggatgtcggacatcgtactccagggtttcgagccctagccccgccgcatcctcggggcgtgcaggtaaagggttacgcgtgtcgggaaggctcacccgcagcccgggccacgtgacgcgcgggcccaatgacagcgctggggcggccgctgcgagctcggcgggctcagggcagcgcggagccgctagcgtctcccggcgcggctgcccgaggccggcgaagccatgggcgccgggaccccgccgccgccgccgccgccgccgtctggccccaggtagggacaatcccccgccccgcgcgcgcaaagagggctttagtcctgcggaacttggctttggggcgagctttcccccacttctctccgagtcgcctacttttaagtttaatttcttgatttgcttttgccctgaa

SEQ ID NO: 31798 - DNA, 2300 bp, Homo sapien
gctgcagtggatctcttccatttttactatgtccacccctagaacacttggcttcctttgccaaaaccaaatcctggtgagcatcataaaacttgtcttgtcaagtttaaaagagaatgcagataaattgtaactgcaatcttgacggtctagccaattaactctgttttattattctctttggaaatgactatagcattaaatgcgtttgtcacatgccaggtagccagcaaaccaggattcaaacccaggtaatggcggctttaaaatgtgaactctttcaacttccctacactgctcaccagtggctgggagacgctgccacagggaaaggaacagctctgaagtggttgagtgaaaaagcacaggacaggaaggttatagacatgggtcccagccctacaacaacctccaacttatgggagatcctttaagaggtcccattctctctttaggcctcagttttcttatccataaaatgaggggtttggaccactgaagaccccttccaggtcatgattctgtcatctacggacttttttttttttttttttttttgatactgagtctcgctctgtcacctaggctggagtgcagtccaggttcatgccatacccctgcctcagcctcccgagtagctgggactacaggcacctgccaccaagcccggctaattttttgtatttttttagtagagatggggtttcactgtgttagccaggatggcctcgatctcctgacctcatctatggacatttttaaagcctcagcttagttgcttaagaaataggcttagaaattgaattgaaaaaaaataaaaatcttttcatcattcaaagaaacaaaggaatggacggcaaaattgctcacatcatttgaaatttgaagtgtggtttgttgccattgggatcaacatatggattcaataaaataagaaaatcaggcaggggaggaaatcagtttttaatgaggcattttcaattttccatgaaataattacttcaaaccaccaatataaactttgaagcatcgttctgaatttggcacagtgtatatgaaaaaagtcaaaccaaagtaaaccaaagactgatcagtttgataatctcctccaaagaccaaatagaaaacctgcaaagtgctttagttggacagatagagaattgtgcttggagccagcaggcctgggttcaagttttggctgaatcacatctccaagtctgtgtccttaactatgaaatgatcatcataatcctacctacatagatatcacagggttgttgggaaggcctaataaacagaactacataaagaactatttcattacaaataattgcctgccaaaaaaatttccccactatttacatggacatacagatttggaatttaaatgtttgaattacctcttagcaaaagctgaaaaactgctataatgaaaaggaatgggggaagctgcctttaaacaaacaacaaaaccacaatcaccaaaaagtatccttcttttacagtagcaaagaattgcaaagataacatcccagcctgaaggttgggaagcacagttcagaacttgacagtccagaatcatgttcacattctctctttattcccttagaagatctggcatcgagtcccatggaaggtgctttgaaatgcctcccagattgcatccttctcctctatttcctccatcttttccttggtctgagttctcttcacaggacagctaaaggacagcaaagcctaagcaacaaccagggtcactgctgccaggccagcctcagtactgcccgattaacctttctaacaagcagacttcatcaggctccacagcgattccatcagtctcacataacttccttttactgccaaaaacgcacccctactctagtccagcaatccctccacttgctttcatacctgtggcattgattccagcccagcgtccaagctttcactgttctccctgcctagaaagctcctccaccctcatgtaaaggacctcttcaagaagaactagaaaccactgcttaaggaaataagagaggacacaaacaaacagaaaaacattccatcctcatggataggaaggatcaatatcttgaaaatagccatattgcccaaagtaatttatagattcaatgctattcccatcaaaccaccattgacattattcacaaaattagaaaaaaagctaatttaaaattaatatggaaccaaaaaagagtccatacagccaagacaatcctcagcagaaagaacaaaggtggaggcatcacgctacctgacttcaaattatattacaa

SEQ ID NO: 31799 - DNA, 2300 bp, Homo sapien
caaggaatgggcagcggcagttcaagattgtctttcctactaccctctttagtgcctctttcagcaatatgaagttaaaaccaggtacactgattgtgtacctgatttttggttcttataaaggtgcttgttggtgtagatgatagttgttaaatttggtgttcctgtggggcaatgaagtgaacatcagtggaggcttctatctggccatcttgttctgcccttccccaagagcattctcttatataaccccagtacaatgttcaaaagcaggtaattcacatcaatttaatacgattacctaatctacagaccttattcagattttaccaattatgtcaataacgaccttttagcaagaaggacatgcagtgcatcggctgtcatgtctcttaaatctccttgaatttggaagcattcttctgtctttctttgctttttcataacattacattattttaagagtacaggccagttgctttgcagactatccctcgttgtttcaactcagagtatgctcttttgtcaggaaatcacagaagtgaggctaagttctcagtgcatcctatcaggagccacatgccattgattagtctcattatggcactattacctttgattacttggttaaggcgctgtatgccgggtttctccaacgtaaggataatattttgtccttaatcatatgggggggagctactttaagactaaatatcctgtcctcctcaaaatttcacccactagtcctaccatccattgatacttcttactgacatcaattattattatgatggctatcaaatggtttttctattattatgatggctatcaaatgatttttctagttccagtatttctcgtatgtttgttagctggtttcctacttgtaaggtagagtgttccctttccctttatgtatcttagtgtggactcataagtccttgttttattcaattggctacaaatgctgtagattagtaattattttaatattccagttgttccacatttggccagtaaaacttctacaagtggattcctgtgtccttttaaaatgtccctgtcattcttcaaagctatcactatttaaaggcagcttccagatgggttgagtcttttcctatatgcccttgacttcctaatgaatactcagttaatttctctgcctggctggagaactcctgggcttccctggacttcgcccttcccctacctccattgctaccctcccagcaaggaggcttcaccaatgactgacatggcattagcatggccttctttttttattgtttgtttgtttttgtttttgtttttttttttttgagacggaatctcgctctgtcgcccaggctggagtgcagtggtgcgatctcggctcactgcaagctccgcctcccaggttcacgccattctcctgcctcagcctcccgagtagctgggactacaggcgcccaccaccacgcccagctaatttttttttatttttagtggagacggggtttcaccgtattagccaggatggtctcgatctcctgacctcgtgatagcctggccttgtttaaacacaaaacagagtcagcccccaacacagggctgcagaagcaggcggcagcagcattgggtggacacagccatcctaatggtgtttgtttttcccctgtgtaaactaagaagtggttgtgaaggattttccctttgttgcctgttgcttttttatgctccaaagaggaagcaaattttgattttgctcagtaataaagggtacccaacaactgaattcttacctttaagctagctgttgccaaaagggaggcaaggaagacagctgatagactgctcattttgaacccaatcttacgtcaaaagagcatatttttttcattgctgtgtgtcacatgctagacccggagcatttccttgttgcccctgggcttaggagaagtccttgctaaatgcaagatgtagaagtgggagtgacatatgaaaaaagaaatgaattaaatttgatatgacacatcatataaggaagaataattgtagacacaggcatgcaggggttgggtgtgagtacattagtccccacccttttcgtcagcagtcacacaaccttggacattagagcctgtccgtctgatctagagaaggaatgttgctggggaaggaaaactcagggcgaggtgagagaggacagaacctctaaccaggaagaggctgtccccgccaagctccggagaggcgcggaagcatgaccctcaggtatgggaccaggtctataggaaacccatgtggtgtgccctaat

SEQ ID NO: 31800 - DNA, 2300 bp, Homo sapien
ttttttacttcctctctcaaagatattacagatagtgcagtttttatcagctgcagaaggcagctgttgaagaaagctaatgtgattgttgagagcagagaattggatgatggtaatgaccagaatagttaacctttcggagcatactgattgcttttcctcgtattaagcgttgtgcataggatcatctcatgtcaaatccccagtaaccctaggagagaatgctacagaaacagccacggttccacggctgggagtaggggtctggatttgaatccaggcccctcctttttagcttagcctgtattcttgcatgcccagttcttaaagccggtcaaatctgtgcaaaacactcaaaatgaggagtgtttctaggttgcagtgaaaactgttactgtgatgaaacattagtttctaggcctgacatcccccacctttgacgttgttattttccttgatgcaaaaatgtctagttctaagggagcacataaagaggagacataaaaacagtggaataccatacctgttttctagataatggcctagtttaaggttttgcctggaaaattccctctcattttttcctttttttttttttagggccatttttatatgtctctacctctggcctttctaccttttttccccctctgctagaatgtttatatgaattgacacctacctgaaagtagttccagacttgactttgttcagttttacagtaaaaatctgcagttcttgtacagttttggcaattcagtgcagggtattacgtatttcattagaattaaaaacttgatccatgctgttttattggacagtgtttcctttttagctaaggggataaaggtcctttactcatcatctcatttgggaaataaatctctttctttctgtctgtctccctcattcttcctcttgtgctctgtctctattctctttgaatattatattgaatataatattgaatattatggttgaccaaatgaatattatattgaatataccattgaatattatggatgaccaaatgacagaagaggataacatagataataataaggtacatatcttgaaggacaagctgtaaaataagtaaaaagtatgttcttcaaaacacttctagcaacttcatgctatttcttcatatttctgcaagctgggtctatctctggttttgtttagtgtttatagggtacacatgattttggcaggtgggagaacgtttcgttccttaaccttgtgtgggttcacctgcatggtatgtgtatttcagcatacacggggagctctataattttagtcctgtcctgggttatgccagtctgtaaaacaggaaagtaaaaagtcacagagctgttcattaaatgagatagttatagaaagtcatttgaaaagcagggagctattttacaagtatgggcctttgtttgtgatgtaaacgtagacattgacaagggccagttgttagaatgacttaaaaatacaatccagaaccctgaaggtacaataaagacctaagatggaatatttaatcattgtgttcttacttgaaatcccaaccgtgctgtcttggatggtcagtagagacttccagtgaactggctttggtggggctttagaaagacacctattgaaggcacatcacatgggaaaagcaggagcaagagagagaaagggggaggggcacatacatttaaacagccagatctcgagagaactcttggaattaattatattttacttaaatttctttagcctgaattctagaaaaaaatgtacagtggtagaaggaatggggtgggatgggatgggacagggtaagaatagattataattcttctgtgtttttaaatattcaggcagattaatatgtgatatgatgcttacccttggttaaagatctacattttttgttttctcttgcagcaatgacttgacttgaagagctctaagagactgaaaacttatatgaagttgccttgggaatatttttatatattttatacagtttctatcatggagtcagcaggcacgtggataaaacctaaaagggaatattattgctgtgccatatacagaattcagtttgctttgaaacaagttttggttgaaagagtctgttgaaaattttattatacttccagggaaggaaagagctgtttttatcttcttaaccactcccagcctctactcttcccagcccctaatcccaggccttggtgtacacactgtagtttttccattatgatgagtatgtgcagtgatactattcatgtacagtctgagcttatgctcag

SEQ ID NO: 31801 - DNA, 2300 bp, Homo sapien
ctacgatctcctgacctcgtgatctgcctgcttcggcctcccaaagtgctgggattacaggcttgagctactgcgcccagccaaaaacgatcccatctttttaatactaagtccaatctgtgggaaaagagtgaaacatgattcaattttgaaatgacattttacattttgattagatttcttgattcaagcattttgttacattctaacttacaaaaccagagctggctttataagtgtgtgacctgtgcaactgtgtgtttaggagggctccacaatcgatttaatgttgtgttgttgccatcttgaaattcttaacgatttttgaacagaaggccctgccttttcattttgcattgtgccctgcaaattttatagctggttctggctacaacttctaatttatagtttaatttctaggtccgggattctctcctgttttagttagaaatccacatggatcgctttcctccgcacacattctcaatgtttatgttgatataaaactagcaaaggctgcctgctaagactgccagactgtaggatgcgctgccaactgagcgcaggacgcgcagtgccctccttgggcttcaaagggcaggggctccatccttcagcctcagccatctgtactgtagtggcctgagcttctgtcactggcaattcccacatcaatgcaatgtttgtaataatagtccagcagactgcgtggaggactcggtgagagaataaatagtcctctgaaaactagaggttatcagtcacctcaaggatgagacccatcctgtgaaaacccacagcctccatgcaccccctcttcttgctggtgttgagtatttgctcaagtcctgccctaatttccttcaagcaaatgcttgatggcccagtaacaacagtctctacagggcagtaaaaaggaactattcagagagagcctctgagtcctattaatgcttgtgaagatgattcaacttcagaaaacacttctgacctcttagcgtgtgctgtctgtcctccatccaggcgctgagggcacagcagcgagcaaacacaatgacaatgagataattacaatttatcatggtggcccagacatcgtgggtttactccctggcctctaatagtcacctcgcagagctgatgtgaggatgtgaggagataataagcgtctgggcattgaaagacctactttgcgggagtatgcgcaaggtgcaatacaagcacacgattaaaaaaaaaaggcaagttgttcctgaaaatgcatagaggtattttccccaataggagcagcttaaatgcaaacaaacagaggaagaaatttaagttatcttttctgctaatttccaaacaacagaacgtgacatccagcacagcatcactccctagatctgcaaccgaggggaatgctagtggatagacatgccaacagcgaaaaaagcctgtgctcactccagtgctggccgcttctgactgtccagtgcttctcggggcgcgctccctctttctcttcccacgcccgcctagtcccagcgaccgagggaggttgcacccgggcgaccctccccccgccccgggctcccgcgtaatcccggcccggcttggaaaggaagcgggcctggcaagtagaggcacggccgggccacggtgggcagggcgcaagggcggggctatagcctaactgcgccgccaaggctgctgctgggtttggaaaggaagcgggagaggaggggtcgggctgagctgtgggtggggaaaagggcggggccatggatgggccacgtgccttcttaggtggagtccggggctcggtagggagaggcggggccaagctgaggtgggtggagaaagagggcgtgtccatggcctagctacgccgctgaggctgctgcggggtttggaaaggaagcgggaatggcagggagaggcgggatcaggctgaggtgggcggggagtcgggggcggagccatgagtggacctcgtgccggcttaggtggagcccggggcgcgcggggagaggcgggaccgagccgaggtgggtgtggcgtggggcggggcaatggcggggcggggttcgccgctccctggggcccagcccagccactcgatcagcccgccggctccggagcggctctgccttcccgagcgcgggacgcggcgccctgggggaggagggcgaagcgacgcggcgatggctccgcgggcactcccggggtccgccgtcctagccgctgctgtcttcgtgggaggcgccgtgagttcgccgctggtggctccgggtgagtgtccggtcgtagccggg

SEQ ID NO: 31802 - DNA, 2300 bp, Homo sapien
aaataataataaaataaagttgaagaacatacggaaaatgcacaactcataagattgcagcttagtgaatattacaaagtcaacacacctgttgaccatcgtccaggtcaagaaacagaacagtcccggaaccccagaaggcactttccctccttcccaaagctaccactctgctgacatccataggttagttttgcctcctttttagtttttaatcttaaaacttaaaaaaaagagatataacttacatacagtgaattttaccctttatatcgtacagttctataagttttgataaaagtaaaccccaaactcaatcaagatacggaacagttccacaactccctcaaattcccttgtgccctaggtagtcaacccctcccccaacccccagctcttgaaaatcactgatttgtttcctttacctataattttatatatttcagtgtttttttttttttttttttcagggtctccctctgtctcccaggctggagaacagtggcacaatcagggctcactgcagcctcgacctcccaggctcaagcgatcctccctcctcaggactccctccagctcccccaccacgaaatagctgggactacagatgaatgatgcagtattttggggtgacggggtatgggggtgggtgtttgaactctgtcactcagtgtttgtgagattcattcatgatgttgtgtataacagtagttcacctgcattgctctatcaatgtgccatgatttatttatatgaattggtatggatatactaccaagtatttatccattgtattgtcgatggtcatctgggttgtttccagtttgaggcttttacaaataatgctgctagaaatattcttgcccgtgcttttttatgcttatgggtatgcatcttctttatggcttggtgataccagcgtcaggaagatgtgctcctatgttagtttccctaagtttcacgctactatggaaagagaccaccatttctgctgtccttcccagcttctcccccacctccccttttccctagtttataagacaggagaaaagagagaaagcaaaaagttggaaaaaaacagaagtaagataaatagctagacgaccttggcgccaccacctggccctggtggttaaaataataataataatattaacccctgaccaaaactactggcgttatccgtaaattccagacatcgtatgagaaagcactgtaaaacttcttgttctgttagctgatgtatgtagcccccagtcacgttcctcacgcttacttgatctatcatgaccctttcacgtagacagaccccttagcgttgtaagcccttaaaatggctaggaatttctttttcagggagctcggctcttaagacgcgagtctgccgacgctcccggccgaataaaaacctcttccttctttaatccggtgtctgaggagttttgtctgcggctcctcctgctacactacctttcgcacttagagatacaattgatctggagttcagagctgtgtgtgatgggaggtagggggccaagttcccttttttcttttccctacgtggatatccctttgaccgagcaccattaaccaaaaatagttccttcctgtgctctgcagccccgcctctgaaataaattgtccatacacgtgtatttttgtttctggtctctatcttatgttccactggtcttcctactttgcttttctttttcaagatttttttctggctgttcttgaccctctgagtttctacatagtcttcaggcccctatctgggtgcacttcctggtatcccagcatctgacatgtgcctggcgcgcagcaggaactcacggctggctgtagcctggatgcatcagagacgatggcaaacccttctcacacgtgccaggttccagcaacccaccctagccccgcaattcctcctcgctcactcccaccccctgcagcgcacccgcaaacggcaaggaggcgtgcccgccgcggcgcgcgtcactttcccccggaccgactggctccgccgcggctctccccgcccccgcctccgcctccacgtcttggggccgggccggaaggcagatctcaccgcctgcttccctctgcagcggtagcacaagctcagcgatggcggctccagaaggcagcggtctaggcgaggacgcccggctggaccaggagaccgcccagtggctgcgctgggacaaggtgaggggcaccagcaggcggggagcgcctggagcggggccgggtgctctgccctctccaggcgcggcgctgcttgctctgcctgagctgcc

SEQ ID NO: 31803 - DNA, 2300 bp, Homo sapien
aaagaataatttccataacccagttaacattctactcattacagtatttatgactgtatatttcttaaaaaagagttgaggctatgcacacaaataactactcaatgacaaagaatgagctgagggctacacagtggccagagagcaagtatattataaagggctttggatcttggagattccagcacccactaaccctgtaggcactaacctcttacttttctccttagtcaaatggatttaacaatctttgccctgcagagtttttgagcaaattagcaacaatatataaggacagtatctagcacaataccccaaatcgactaactcctccgtaaagaatagctaccactattgtgagagttttaagtcaagctgtgaataaaactcttgggtccacttaaaaatacctcccctggatgtaagcatccagggaaatcagggaatgccataagacagccctaatctaaaagcctacaagaagctcagtgggcttcaaggaagacactgctcttggtacgatgaggaaacctggccctctatttgcctcctgggccacagtaatattgataatagctgctgcttttagttgaggaccatgtacgtctgtgtcactgcactggccactttacttacactttcctgctttgtcctcacaaagatcctgtaaggtgtgtattggtcccatttagcaggtaagacaatgaagaccagaggtccagcaccttgcctaaaccacacctgctgggatttggattcaagtccaaccgtacagctcaaacgctcagccacttccctaaagtccacccccagctacattaagtaaaaaaatccagaaagatgccacctgggggtctggaactgcctcctccgagcacccggctctcccctccctgcggactcttctctggagaggatgtgatgcttcttacttttctcagatccctctccccaccctgcgagtgacgttgcgcctctgtgcctggtgggatagggatctgggagcttcgcctgttttttgcacactgccatcccctagtcttagggagcgagctctgtcccgcttttcacatctccgcgtctttccttgcactctacatcaccgctgggaatgtccccagacctgatcggggcatgcacactggggtgtgcgtgtgcgtgtggtgtgtgttcctgcgcgtgtgccgggctcgcggggcaggaaaaagcgcctaatccaggctctgcgtcactcccgcaattggttagaaatggagtttcctggtgtttaatcccgggagggcacttcgccttcgttgtttcccagagtccctgattttcctgcctcgcatgccagcgccccatagggcatccgtgcctcagttcacctcttgccatcctccaaggacggggagaaggggtaaggcgggggagagcaaggtggcttggtcgcccccggcccccgccccccatgttgtgtgcagtttccaccacgtctgtttcggagggagaagaggagggtgcagatgaggcgaggcgccttcgggagcgcggagagcgggcaggcagtgccacctgctgagagccactcaggccgagcaagcggcgggcagtgccacctgctataaataggccgccaaggacagggtgtgcgactgtacatcccgccacgagggcctgcatcacgcgcggggccccgcgcccccggctccccagggaaacgctgtgcccagatcctgcgcaggggtctggatggggcggcggcccgagtacttcccccctattccccccacagacactggctgaggatggcccgcgggcttgggggcggggggtggcaaggaggggagggaggccgcggcggacccgcagtgcagcagctgttgctcgcgtgtgactcgcccgtccgggccgtgctgcccaggcacagtcacacggcgcagtggggaggaggaggacaccgagtccccctcccagctccccggggaccgagtggggagatcccggctcctgtcttcccctcgcctccagcgcgctcgcccaggctgggaggaggaaaccagagccgcgcgcagacacctcctccttctcctcctcttcttcctcctcctcctcctcctcctcttcggctgctgctcctggtgccgccaccgtccgccggtgcctgttgctgccgccgccgcgggacctgctgtgtcctcagctgggtggagaagaggcgggcgccgagccgaggggagccccctccccgtccccccgcggcgggaagagcgcagccagccgggtgcgatggactccccgcccgcccaggccgtccccag

SEQ ID NO: 31804 - DNA, 2300 bp, Homo sapien
ccatatctggtcccagatgattcttcatattttttatttttgttccaagatggtgtactctattttccagcaaaatgggacagttaatttttcctcgtagccatgctttcctctgttttgttcattgttgtttcttttgcctggggagatttcctcttcttttacttaagcattccgtctctcctagctccttctcttacttaagcattccatctctcctagctcaaatgccacctcctccagaaagtgttcctggattagatttgctttcacacctctagacctcctttatttgtcccttctttaggacacatatatgacatcttttactttaattatttctgccccaattcagagtactattagaaggctgttaataaaaaatgaatgtgtcggaagagttgaaagaagttgtttaataataattcctgctaatggtataatgagacaggattacagacaggtggcctgcaaactttattgtaaaagttgcctaccatagtgtttgaagaaaaacaattcaattggaatgcctgcagattggcacacacactctaccccaccagtctccccgttccccattgtcttccactggcacatcatatatttacattccctcactgactctgggtggcacttgaatttacaagctccatatagaggttacatcaatcagttgatataccaggtccaagtcatggctctgtcactttctagctagctgtgtcaggttaagagcaagacttctaatgatacctttgaatggccctttgtatttgaggtggccttatgcaaataaacaggcacagttgacccttgaacaatgtgagggttaggggcgccaatcacctgcatagtcgaaaatccacctataacctttgactcccaaaaagcttaaccgatagtcttccgttgacctcaccaataacacagtcgactaacatatatttcgtatgttttatgcactatatcctgtattctcacaataaagtaagctgaagaaaatgttattaagaaaaatcataaggaagagaacatattgcattattcattaagtagaaatagatcatcatacaggtcttcaccctcattgtcttcacgttgaataggctgaggaggaggaggaagaggaggggttggtcttgcagtctcagaggtggcagccgcagaagaaaatctgagaacaagtggatccatgcgactcaatcctgtattgttcaagactcaactgtatatttttgcatatgggctcaaatacgtacgcacatatgtcactgggtcaaagattcatagaatgaattagacaacaagaatatttatcattgaattgaaatggctcactgcaaaagtgccctcaacttatctctaggccttagaaacagaagtgaccctttgctgctgtgaatcaatagcctggactagattggggttgggttggcaaaggtatatagtcattgccatagtccagtattcctgcccaagcaagcaccattagtagtcacgttgctcagagagggcctctcggctctccccaccactgcatgctggattgtctgccaccagtagatcagagttggcaaaagggataactcgggatgaaacatttgagcattttgcagtttagagaaacttcaggggtgctgctttagtaaaaaatggaagacttgcatttattaaaggttagtaagaagtgaaataatgtatgcaaaagtacattataaattagaaaatgcaataacggcagaaactatttatttattggttgctctgccctttacctaagtggtttttgaccatttaacaatgtgtaagagttgggttttacctccattttatggatgtggaaatagggcttggatgttagctaacttgcccaaatcttacagctaacagaaagtggtactcccgagattcctacccaggtttgtctgacctcaggcctgtgctctttatatgagttcatgctaactctcagatgatgtgctaggcacaaaaattagatattacaccaatttccactatagttaacattctatctaaatataaagtgggaccacggtcttagatgaatgtggctgttgagagcggcaataatccagaatggctactctgatctacgttgataaggaaattggagaaccaggcacccgtgtggctgccaaggatgtgctgaagctggagtctagaccttcaatcaaagcattagatgggatatctcaagttttaacacgacgttttggcaaaacatacgatgctccatcagccttacctaaagctaccagaaaggctttgggcactgt

SEQ ID NO: 31805 - DNA, 2300 bp, Homo sapien
ggctattttgttttttttgagacagtcttgtgctgtcacccaggctggagtgcagtggcacaatctcggctcactgcaacctccgcctcccaggttcaagcaattctcctgcctcggcctcccaagtagctgggattacaggcacctgccaccacgcccagctaattttttgtatttttagtagagacggggtttcactatgttggccaggctggtctcaacctcctgacctcctgatctgccctccttggcctcccaaagtgctgggattacaggcatgagccactgcgcctggctgaaattttggcttttaaaatcatttaggtctcatcaggtatcaattatttaaaatgtaaaactttcctaaagatcttttgactctttgtgtgataaaataccttgaaagaatagtcataatctttatgacagagagatctttaaggtgtatttgatatgaagtcacaaagagaaaaatctttcgagtcattggttttgggaattatgtcatgaacactgaatataaggatacttttaaaatttaaaaccacctcctttactgtatgtgttgatctttgacctgaattggaagggggatttttaaaatttctctataatgttgttaaaaagacatagggcctgtgggtattgggccttaaattgaattttccttatatagaaaaatggaaaaaattggtttaggtgttaggtcataacaaaaagtaggcccttttgaagattaaatttatgcctgccttggccttgtttaaatccatgcctggccacaaatattagtgttgtggctgtccatcatctgagcaattgcacagctgtttcattcactgccgtgcggattcatctttatgtctatgctgctttgaagaaccttctcagaggttaatgatgagaggatgtagcagtagggacaacaccgtggcagatgaggtcttttattacattcttttaatcatgattttcagcattagaaaccaaaagctttatagtctccatgtgaagaatccctggtgagcctgtttgctgtgataatattagtcatgggttactcagtccttgattaaaacctcctagctttgttgacttgctagtcactattcacctgctaggaaatataggactgagttgtcatggaaggaaataatggtgctgggatttgaataaataatttatgagataatttcagagcctttgtcttcttcatcccaccatttattaaagaagactttccaaagtatactgccatgagatctagaataattgagtcatgttttgtgaaccacgttggagacagacttctctgggaggcgacagcttctccagaggaggcctttagctttggagtgggaccagcctgggcttgaatccaaggcctgctaggttgggctgtgtgtgttcccgggctggtggtttaaccttgcagggtgctgtgggcatgtaaatcctccagcgcagcccttggcaggtaagaggtgcttcataagtgtcgtcccccttctcttttctgtggaagctgtgtgttcacctcccatgggaagacattcctagtcccctcccgtgggctcctcctccagtgggctcctcctccagtgctccgcagtggagtagccagcggggcgtcccgaaagagcatggtgcattcattccgtgagtgccagccacactgcatgttccaaataacacgcctctctctctcctcaggtgcctgagatcatcagctccatccgtcaggcggggaagatcgcccggcaggaggagctgcactgcccgtccgagttcgacgacacgttttccaagaagttcgaggtgctcttctgcggccgcgtgacggtggcgcacaagaaggctccgccggccctgatcgacgagtgcatcgagaagttcaatcacgtcagcggcagccgggggtccgagagcccccgccccaacccgccccatgccgcgcccacagggagccaggagcctgtgcgcaggcccatgcgcaagtccttctcccagcccggcctgcgctcgctggcctttaggaaggagctgcaggatgggggcctccgaagcagcggcttcttcagctccttcgaggagagcgacattgagaaccacctcattagcggacacaatattgtgcagcccacagatatcgaggaaaatcgaactatgctcttcacggtaaaatatcacccagctcgtgcacagccccagtctgccatacgctttcaagagaaaatctgctttatggagcgaagattcttagtcaattgcttttgatttatgtgtgaatccatatattt

SEQ ID NO: 31806 - DNA, 2300 bp, Homo sapien
tcacccaagctggagtgcggtggtgcgatgtcagctcactgcaatctctgcctcctgggttcgagcgattctcctgcctcagcctcccaagtagctgggattacaggcgtgcaccaccacacctggctaatttttatatttttaatagagacagggtttcaccatgttggccaggctggtctcgaactcctgacctcaagtgattcatctgcctcagcctcccaaagttctgggattacaggcatcagccactgcacctggccttggtatatgtgttttaatttgtattcattcatttaagcctcatgacagctctgcgaggaaagttcactatacgtcttcaggctgcaggtagaggacctgaaagggacaggaggtaacagtctggccaagaccacagagccagggaatagcagaggaacatttcacctgggcattgcactccagagctgggcttctcactgttctcaacccctggcaaatgctcacttgaacaaagccaggtggtgatacaaaggtatttgttatattagtctctacacttttctgtgtgcttgaaataactgcaacaaagaatatatcagtatttagagtaatgggggatttgcttgtgtgtgtttgtatttttgagatggagtctcgctctgtcgcccaggctggagtgcagtagcatgatcttggctcactgcaacctccggcttctgagttcaagcgattctcctgcctcagcctcctgagtaactgggattacaggtgtgcgccactacacccggctgttttttgtatttttagtagagacagggtttccccgtgttggccaggctgatctcaaactcccgacctcaggtggtccacccaccttggcctcccaaagtgctgagattacaggcatgagccactgcgcctggccgtttttttttctaacgaaattattttctaacagaaagcaatcaggtgagaatccacataagaaacaatttaattcagagatttttgttgcatattaaaaaaaaaatgtaccttcggctgggtgtggtagctcactcctgtaatcccagcactttgggaggctgaggcaggtagatcacttgagctcaggagtttgagatcagcctggccaacatggtgaaaccccgtctctacaaaaactacaaaaaattagctgtgtgtagtcccagctactctgggggccgagggagaaggattgcttgaacctgggaggtcaagactgcagtgagccatgattgtggccctgtactccagcctgggcaacaaagtgagaccctggcaccctgtctcaaaaaaaaaaaaaagtacctccttgtaaataagtaacactaagacttcatttagtggttgtcaagcaaactccattgtatttttattttcagtttttatggctagtagttaagggagagaagcttggttgcagagaagaatgaaaggatgatgggaaaataaaagtaggagagaggaaaacgcaagaaagcaagagatctgtagaaagggatgaaggaattgtataggcagagagaataggttctttaattgagaaatttatgttgtctcaccttctgaaatgcccccaaaggtaagttattgttttattttgaaaagctaatgatagctacctttctaccacgctgtgttcaatgttttacacactttacctgtttgagtctcacaacacagtgttatgattcgatcttgccattggtctcactttactgaagaggaagtttgaggctcagaaaagtaagaaactggccgaagaccacggttagtgaagacagatctctgatccagttgcagagtctgagcaataaactacttcaactgattggtttcaaagcacatttcgtcattttacttggggtaatcaaagcaactctctgaggcaaaattatttcctggacttgcagccatgtcactaaggagcagatgaggtgagatcacagacaggatcagaatgatggcctggtgccaaaaagatgtgtcctagagatttttcattcctttaagaagcagagaagggagcgataaatgacttttcgtttttcacttttttagacatcgcagatggcagcagagaatattggaagtgaattaccacccagtgccactcgatttaggctagatatgctgaaaaacaaagcaaagagatctttaacagagtctttagaaagtattttgtcccgggtaagtagcataatttctcctgatttaagttaaatcactttttaggagagtgtaagattgagttctatgcttttattccatcaatgttcatcataaaggta

SEQ ID NO: 31807 - DNA, 2300 bp, Homo sapien
agacaattgccactgttttcatgtctattctttgactctctatcctgggtagacaacatggactgcccagcatcctgtcttctgtctggggctcccactgtcgtcctgaccacgctgggggctgccagtgacactgggaaactcctgagggacccccttcaggcttcacatcatctgctccctccctagcatcccagcctagaacactttccagccatcagctgcattccccagtgaggcgtgcagcctctcccatgataggagggcttcagccgaaagaacacttcaacaggcccagaaacccaggagcaccattagatcagaaagcagaagcaagaatgcatctaatctcccccacatcaattgctatagttttattaatctgcatattataggtcagtaaggggatggcacagtttataatccctgcaagagtctgatgatcttttggtgaccagaagtgccattttttgatgggcttctagagatcctccatcagggataccagacatgtttggcatgcctgtgctgccgcgagacgctaagcgtgtgtccagactacacgtgtgggtcacgggtccagcagcagagctgtcatgttgattgtttgcttctactaaatgtataaagcctgcctggtgtccagaagaaaagaaactataatccaattttttagaatccataaaaggtaagaagtaggagaacatttagaatccacaaaagatgagaagtaggagaacggttggattttttagaatccataaaagatgagaagtaggagaacctccaaaaggaaggaatcagctgagagtattgaagatgaccaagtacaaacaggcagaggggagcgcttccccttctcctctcccaggcggtgggctgcctcgctcggccaggacacacagagcagcatcgtgcactttgaggggcaggtggagctgctcatcactagcaggggtgctggcggggaccacagtgttctcttccatctttgagttgaagtcctgtgtgagaaatgagaaaccttcatggcaaaagacagaaagggacctagaatgtaacattcagcagtcttgttatctcacgcacctgtctgtccagttggggacgttgctgtatggaggtcagttgaacaatcacagttgaggagcctaatgaattcttgcaccaccagccacacacattattctgaagagtgagccattgtctctgatcttatcaggatcacatcgtgggatcatatttatttggtcattctgaatataccctttaagtccaaagtgaaataactaaatgtcgttgataaaaggaaagaataaagtggggtatgatttcctttcacagaggtctggaatcttcctgcctttttcaagtcagtcggtggtgctggcaaatgtttaataaccagctcctctcacccctcagaggaagcccttggtgttcagtgtttgcagatttccattgtgcaactagtcctcccacaccccattttaaactacccacttgatgtcactggtcatggagttgggctcacagagccagtgggagtcaactggagcagccactggactcattcaagtgtttcccaaaaacaatctgctcctagaaggactctcccttaatctcctaaccctgccattcaggatgattccctgcactctgggaagcacacgttctagtgggaagactgatactgggcaactgataaccaagtgacttaaacttctgagggttacaaagggtgtttgtatcctcagtgtctcatttcagattctgctcagagctaaatgcaacaatgtgagaagatgttagtatcccagatcttcatccaggaaggaatcttagagatcattaggttgtagggtttctcttctgcagaggagatagagggtcggtgtcagattgctggtttgccagtaccactccctggagaaaagagcaaaagaaagaaacttgttagtcaactgtgcagagccaccgtgagactgaatagctttgtgggtggccccgtgtttgctgcaagagacctctggcctcttgtagcagctgccacatggtaaacagagccgagatatcaggagtctcgctgaaaatgcagtcagatgggctctgaatagaggaaggcaggacactcttgagatgggatggggtttctcacagcaccgtacagggaccacctgcaagatctcttgaggggcttgtgaaaaacacatccctgaggtcaccattcttgacctgctgcttattgagtttctgatgcctgggatgtgcaggtttaacaagcccccagatgatcctaa

SEQ ID NO: 31808 - DNA, 2300 bp, Homo sapien
acttctgagggttacaaagggtgtttgtatcctcagtgtctcatttcagattctgctcagagctaaatgcaacaatgtgagaagatgttagtatcccagatcttcatccaggaaggaatcttagagatcattaggttgtagggtttctcttctgcagaggagatagagggtcggtgtcagattgctggtttgccagtaccactccctggagaaaagagcaaaagaaagaaacttgttagtcaactgtgcagagccaccgtgagactgaatagctttgtgggtggccccgtgtttgctgcaagagacctctggcctcttgtagcagctgccacatggtaaacagagccgagatatcaggagtctcgctgaaaatgcagtcagatgggctctgaatagaggaaggcaggacactcttgagatgggatggggtttctcacagcaccgtacagggaccacctgcaagatctcttgaggggcttgtgaaaaacacatccctgaggtcaccattcttgacctgctgcttattgagtttctgatgcctgggatgtgcaggtttaacaagcccccagatgatcctaataggattcctgcctgaaaattgctgggtgaaggctcttccccctccaagtgataaagaaggaaaagattgatcctggaagaacatccgttagatgagcaaaattttgtggagcacttcatgaagaggaattactaggtcatttagaaatatgtttgaattgtggatcatcttgtaggcctttctggcatatttctccacttagatccacaagacacatcgaatgtctttttataaaggggttttttaatgcccatgtttgaccctctccacttaacagtcccattctcattttatatgtgaaggtaatctgctttacagaaaaatgtaaaggacctgcacttctctgctttgtggtaagttgtaaaatgcagtttaaagaggcaggcctcatatcctgatagatttgtaggaaggattgcacagttttacccagcttccctcgagtttggcagaaattagctttccctgagctggtgtcttcccgagctagcatgcttctcctatggggtgtgtggccttctctcctgtcttcttgaggcagagcttcaatctagaatctgttcacaaactgaacaaatgcaacaaacagtaaacagtcttttgctcatagttaaggtgccttgagttgggtgtgaggggctgagtgtgttctcaggggtgctctgcccacggctccggccaactgctgcaggtgcgcatcatatgggtggtctttgtggaatgccatcagcactagcttagtacctcctaaatgggagctggagggctacagtgctcaacactggattatacgaatgtggattgtccaggaaatgcttttaatccccctcatccactctctacccacgtgacctgcctctccctctttacttggtgtttactcaggaatgtgggtgagttgtcgtgttagcctagaacagccattcccaaactttgatggaaggatgccattcactttgaaaattatcgagtagcccaaagagcttctgtttccatggataattcctatcaatatttactatattaccaattaattaaaactgagattagtatttatttgattcgtatttatttttacatagctataataaactcatacatataaaaaattattaaaaaatgactgttttccaaaataaaattagttagaaatgtgacattgtttctacatttaaaaaatctctttaatgtctgatttaatagaatccgctgaattttatttgcttcattcattctgttttgcttgttatttgaagcatataaagcaaaagctgaccttgcacagatctatagtaggaaaagcagggggagggcctcatggacccctaaaaggatctcagcgacctccaggggtcctcaggctgaccaaacattgagaactattgacctggaagaatgtaaaataggaaaacagtgtctcccccaatagaatttcgtgtaaaacgtggactgtgttacaaagtcagatgggtgcagttgtcctgcttaaccgctaatcaggagctgaaggccagagactcacagctgttccccagcctggtagtgaacccagaggcctgtcttgctgtgcagtgggacaggaagttgcatttgggagtctcatagaacacactggaagatgtgttttagcttggccagtttcatgcaggacagattttctgcataaagaaaatcaatgacagtttctgaaactgcatcctggaagccttgaccagtttgg

SEQ ID NO: 31809 - DNA, 2300 bp, Homo sapien
caggcacttgggaagcacttgttggatgaattagtagctgagctcagtggatcgcaagccaaatcgaatgtttaaagttctagtaagtcttctcttacacccaccctgtgagcagtaggcataactttattgctgtggcagatccctaattctcagcccttgtggctgtcttcctgcagatccagatgtaccagctctcgaggttgcttcatgattaccacagagacctctacaatcacctggaggagcacgagatcggccccagcctctacgctgccccctggttcctcaccatgtttgcctcacagttcccgctgggattcgtagccagagtctttggtgagcattagtaaatctgtttgccagaaccagccttctcttattagaggggaaacatttcctgtctctccgtggtgattcttatttttatacctgtagctcttaccagaacagggtattgtttgatagtctaagattagtcaggggtgggttttgtgactttggagtcctccttaacttctgataatcacggggcttccctagatgccttcatcttgtgggatgtggatccgatccgtgtagatccgatcgctcaccatgagggtctccctagagcagacatttggaggacttggctgaggagccacaggtgtatgtttctcatgaattgccttcctcagccactctgggttgtgagtattgactgatgctgactgtgggcctctgggccctttctagattcccttggcatctcttcctcccctttctcttcttgccctgcccttggctctacactttctcccaagtcactgtcttggagaccagtgtcaggaccttgagtaacacctccgtgtggatggctcgctctccccgctcagccttgacacttcatgaaggcctcttgcccctgagcccacatgtcacagccactgccactcccgtgcccccgctgttaaccttgggtggttcacatgtaaaacctgcctttatattcttgatttactttttgagaacattgtcaaagttaggtgagtgttcatacacaaagccttcaacctgccttcatatgcagggatagggctgtccacgtgcgcatcaggaaccgagtggaatgttgtgagcatggtcagttcgggcacagtttgttttccctactgcagaataaaagtgatatttttgacaattcaggttcttttttttattgtaaaggaggaggctactaaaaaaatgatagttattatatatcaaatgtttttaagcatcacttgacagcttaaaaacatgtgatctttaaaaaatttgtttttatgattagagagcatcttaagggaaatgttcaaagacattgatactacttcagacatgctttgggtaaacatcttaaatatccaaattctagaaatcctaaaatttgctttttaatataagtgagcatttacccttcttctctcttttcctttccccccaaatactagatttttattattcacttttatctacaagaacctttaaagagtttcccattttgctttactataagaattcatattccttcttttctgtccctgaaaaaataaaatcactaaattaaaatagatacaaaaagctatctcctggttgagcatatctttagtgagagttcatgaaggtttataccatggttaaaaaaaaaaaaagattaactaaaagcctcaaaattgtgtgcttagtttattaacaaaagagttacagaaactaaaatctcaagctctaggctttaagctttcttgccaataacttctatgtttttgacttctctaacactggaaattaaaagaaaattattaatctaccttccttacattttctccacattttagctatgattttcatacagggtcatgaagaggagtgaggatggaaatggggaggagggagcgctgtttgttaatggtttgtaaacagctcaggcattaaattacttggttagtgaagaaaattctaccaaggcaaccaggctgaccacagactggagggctgaggggtcatcactgagtcatctctgccctggggccccaggcactggagctgctgcttgcagaaagttctggggctctggaagagaaatttttccttcggctcataaatgggtaaaaagacgttaacaaacaagcagactccactttggaaatgatagcccttctattgcagagtaatttgaagctctctgaagctcactctaatgacttcataaatcaaagctgcagcttgtaaaggtaagatatttttctgtagactttgtaggcagtggtgagactcgg

SEQ ID NO: 31810 - DNA, 2300 bp, Homo sapien
tgaacatgtttgtagatgcatctttatctgattatttccttaggataaattcctaaaattgctgtgaattgctggattaaagggaatgcacattttataggctttacggacctatagataaaatgccgttcataaaggttttaccagattttctgcattcacttatattgtgtgcctttttgttacatcactatcaacactgggatttaaaaatgtctgtcagctcaatacgcaatgtatagattaatttaaactaatttaataatttattgtttgacattgtattagtccattttcacgctgctgataaagacatacccaagactgggcaatttacaaaagaaagaggtttaattggacttacagttccacatggctggggaagccttacaatcatggtggaaggcaaggaggagctagtcacatcttacatggatggcagcaagcaaaaaaagcttgtgcaggaaaactccctcttataataactatcagctcttgtgagacttactatcaggagaacaccaggggaaagacctgcccccatgattcaattacctcccactgggctcctccaacaacacatgagaattcaagatgagatttgggtggggatacagccaaaccatatcagacatatttccatgacatcatttcccattttcaattctatgaattacctattatgtaccaaacactggtctaggcagtttgcatattctttttttaaaaatcttcacaaaccattatcttttattttgagtgagtaaactatggctcactcatagtaaggggctaagttacttgtctgagatcacacaaactggtaagtgatcaaactagggtccataactaggtctgcctgactccaaagtagaaactataataaaggtttttgtttgtttgtttgtttttaaaaaagatgctacataagttcttcaggttctggttgaatcaatcaggaaccagtgagagaaagacagctctctccaaggagtaattgaagagagttcatggaaagcactatttgtggaggtgtggggaggaagaagggaccagtcaaagggtagagaaacaccaaggcagtatcagcagcagaaagctgctgtaatcccaggcctggaggggtagaaagagggccctctttggcaatctggtgagatctgcagcagtgggagagtggcagctatgtgaccatagagtcacagctactgtcaaaccacagagcagcctacagacattatacccaactctgatctcctattggtgcctcctattagccaaatccaaccagaagccagaggacaatgaagtctggaagtattgtccatgaaaatcaacctcctggacacacaagaaaggaaagtagggtggagaatggacctgcagtgctccagcccgtttgctccctattccctttagaagagcagagccatatcctcccacaatgaactgttgatgtacttcaaaacccacatgcaaggctgctatagaattaaatgcagccatgtaggggaagggcctagtacagtttggtgcatagtaaacacacaataaaaatgagttatgattatttcatatttagaattaatattctacacaaatcataccaggagattctacttatccttttttctactggcaactttcagccctcaaactgttggccataaaacaacaaccataaaatccaaaaacaaaacaaaagaaagaaaaggaatggggataaaatgaaacatttttccttgttgggcacatggctgggcatgtttgccagccttcctcattctaaggtgtggtcctaggaccaaatgccagctgatgaaatgtgaacagaagtgagaagcacaacctctaggcctggcctatataacctctaggcctggcctatataaacttctcctgtgcattcccccaggctgtctcccctttgccagttcaatgtcaatgaacagaccatctgatacgatttggctctgtgtcctcacccaaatctcgtgttgaatttttattctcagtgttggaggtggggcttggtgggaggtgatttgatcattgggtggtttctaattatttggcaccatccccctagtgctgtctcatgatagcattcttataagatctggttgtttgaaagtgtgtagcacctaccccttggcactctctctctcctactggtcatgtgaagatggtgcttgcttccccttcaccttccaccatcaatgtaagtttcctgaggcctccccaggagcagaagcctgtatatcccacagaaccgtgagctaattaaaccactttttaaa

SEQ ID NO: 31811 - DNA, 2300 bp, Homo sapien
tgcatactcaggcaaagttaagaccagcatcggcaccaattggcattagtgagtgtaattcagccattgggaaccagccaggatactaatctgtggccccaagctcagcagccagtgcagccaggtgagctgtacagcccagtgggaggagaagctcaccctccttcagaggagataggcaccaaggcggggagagaccatcctagaaggaggaagagagattgggacatggctccggattattgagcaggctgtgatgtgggggatgaggacacaagaaaagaaccaacattcactgatcacctactctgtgccaaatgattttacatgcatcatctccagttctttcaacagtcctgtgagggggtattagtgtccccactttacaggtaaggtcacaatttgccagcggtcacagagtaatcagaggccatagcagaggcagaatctgagcacaaaccttcctgactctttgcccccaacacagggtgggcaggagttccccaaggggctccaggactcccaggatgcacacagtccaactctggttgactttgtgcctaaactcttcttttttttttttgagacagagttgacctgtcacccaggctggagtgcagtggcacgatcttggcttactgcaaccaccgcctcctggagtcaagcgattctcctgcctcagccttttgagtagctgggattacaggcacccgccaccacgcccagctaatttttgaatttttagtaaggtgaggtatcaccatgttggccaggctggtcttgaactcctgacctcaagtgatctgccagccttggcctcccaaagtgctggaattataagtgtaagccagtgcgcctggcctgtgcctgaattctgaagtcccacctaccatggtgtatcccaggccactgatctattgccccacctagaaaaggagacaagtctggacccagccaagcgggtgaaactgacagaggagctggcgcagggaaaggaagaagggctgtagagagtatgtggcaacttgcaattaggtagaagagtcagttactcagaataccacatgccgcaaccatgccgaaatgagtttactgtaattccagataaaaacaaaactgtcggagcagagacttagagactcgaggcagggttggcttatttttttttctatggtttcgatataattcagcactttcactttgtgaagatagacctgacctttatgtggtctggagaatgctgactcaacatcagggtaaccaatggtgcactcatgacccgaaacaagactggtggttgtcagggttcttaaagctccacacttgggctctccacgatctcggaaaaccgtgcctttatcagaaatgacagcccttgttcaaacagagatctggataggtgcgcattaatttcaaacatttttttaaaaagatattttcctgactttgtaagaggtagagtaggatgctgatttagcgtaggtctttttcccatttcctacagtagtacagatggtgactgaagggcagatgaaaaaagaaaaggggaaggaagggaggagaaaagaggaagagggtatgggggaagagggatggccggcaaaggaggcccacttttacttccttggaaatatttcgttcattttgaaaactcaaactcaagtttctcctggaaaagaaaaaggcttgggatctcccaattgcctattggtatgatttttatctagctccactttttgattctttaggaatcaaaccgtgaacttaatttttcctcctatttgaaaagcataggcaaaagtcctgccctcttttccaaaacaaaatgcagcatccacccccgacccccaccacacctcaaagccccaaagtgacattttcaacagacttatcataaatcaaatctgctgtgcacaccagtaaatagtgccagtaagccaggtgaaccaaatcagatttttcagccttgacttccagtggtgagaacaaggatgtgctgacctaggaaaaatgacaagtcatgggcgccctgcaccggccctttcagaagacgtagaacactgcagggggtggagtctggaataaggagaatctggaatcagtgatgacctagttgtcttgagggccaggctgaggagaagcctgatgggttacgcttcagaatttcatgtgctcatggtaggtcctctgcattttccctgtcagagtggatgttgaactctggtgaggatgaaagggaaggtcccagaaatgacctatgctcttgctggggagatccaacatctggctcaagccttaag

SEQ ID NO: 31812 - DNA, 2300 bp, Homo sapien
ttccgacaagttgcatttgagcagcttcccacagggcaccgaacacagtgttcactaattaactgtttaaaatggcttttcttctcctttgccgcctgccccttccatatcaaaaccactcccttcttatcttgggtcacacttttctccgacaggcctatttcgctcttcccctttgcgtccacacccacatgaacaaggtaaaaaacatggtttatgtgcttcaagttctcgtcactgtgtccctggagaaaaaaacgtacttttttgagcacctactatgagccagtttcaccagccattcctagcacggtgttccgctaatgcaaaccttaaggcagccaatcagccatttaatgatgtcagtgatcaataaatggcaattagtaattgacacgaatccaactctttttttttctggaatgtcttttattcattatgaagaaaaaaaaaactcacaccctttacattttaaagatgaagcttatgggacagcacgacgtcccatgagccggcgtcggttctgggtatcctccacgtggcctttcctggacttgcgttatttaaaatatgcgatttcactacttgaggttaccgagtactaattttacaatactgtgtagctacatgaagcggctcgaaatatactattatcactccgttttaagcagcacgatgtctggatgaagcatcaaagcgagatgggtcaacttaaagggcctttaaaacatcttgaagcaataataagccatacactgaagcaggggcggttttaaacattacacagaacttaaaacaatcgaacgaattcgtcctttgttctttttattacattaattattacattaatactgtttaaaaagaaactcaaaaggcattaaacttaggtaccaatctacacaaagtcctcgaaggggcctggcttggaccgaacgcgcttttgtgccgccccgctcgctcgcagcaccctgaaggccactgagcttagggcgctaggtccctagaagcgacttgaaatgagggggtcgccaggccaggccctcgctctgcaggggaggatccgaccaaagtttgccaagtttccaggcaagcccaactgcgcaaatgccgctttttagctccagcggcaggcctggcccgtgggagttttgccccaggggtctccgggccttcaaagaaaagtcccacgaggtggggggcgccgcctgggccgccggccagggggacccgtcgccccagggcacaaagaaagagcgcgcctacagggtgtcccctgaccccggcgactcggggccagggaggctcggcgcgccccagcggccgctcttcccctcccgaacccgcccggcccactcgctcctgcaccgcggccgcctcggctcggcttttctcttgcagtgagctgagtgcgctcagccgaggaggggccgcgccgcgccgcgccggccgcggggcccagcccttcccgccgcgcccggggccgcccttcccgctggagccggctgatcgatggccctggcagcccgcgccccccgcctcggctcgcccgcgagcccggctgtgtgttttggaagcagcgcagcgggccgcagccgtgtgacgcccggagcgggcagcgccgcccttccttccccccgggctcgggcggcggcgcggcggctgggccgggcgggagggctggcggggcgcggactccggggaggagggcgcggggaggggacgcgggcggggacgcgggcggggggcggaggccgcgccgcgcacgcccagccccacggccgcgccgcgcctcgtgggacaggttgggccggcggggcggcgcccggctccggggaataatgagtgtctgtcaggccgtccccgggtgactgggcggggcggggcggaggcggcgcgggaggcgggggtggcgggggaagggcgcagggcggggtgcgtgtttgcgcgagtgactcggccgacccctccggcggctgcctccacccaagtgggtggggacccgcccagcccgggcggccgcggcggctccctctcccctccctgaccctcccaccccgggtcccagcctctacttaccccgccagccccgggaggctcgcagagcgagcggcgccggcgtcatgtgactgcccggagttggtgccaggagccagaggggagccaggagcggagccgcgcggagccggggcccgagccggagcgcagcgagagcgcccgccgcacgcgcgcccgtccccgtcccctgcggccgccaacgccgcccggactggagccctgacattgctgcgctcggggggctc

SEQ ID NO: 31813 - DNA, 2300 bp, Homo sapien
ctttttcaaatgcagttatacacatctttgcagagctgctcatctgttcaacatatacacacgtttatagaaattcgccttttaagaatgtgattctgttcctgacatttatctaaaaattattatgcaatctgtacaccagagtactaatttctagaagtcattctaaaatgtctattttccctttgggttatttttaagatagtaaaatccattcacagttcctttcccattatttctctttactttgttagccaggactgtttaactcaagcttacgttatcagagatttaagaatgtggtgtgtgcagactaagtacaggtaaggaaaaaaaaaaagaaaaaaaaaggaaaaaaagagcatcactgtgcccatagcaacaagaagattgggttttaatttagaaactttgcagtgaataaaacaatagctttctgcaaaactctgttgtcgttttgtacctgacaaggttttgtggtctaagcagttacttttctttgttattcccatgttgagatttttgtacttgcattccctttcatgcaagctaaatgttctttacaatgtatcatcattgaacttaccgatagtacattaggtttttttcttctaataaatagttctgcagcaaagcccactgactgcagaaatgaagataccagtttctctagggagtttaatttaatcgaacatctaatttcaggtttctattaacagcctaaggtcaactaacatacctcttttcaaaccagaagaaatcactcgtggacactttccttaaacactattactaactccaaaaaatttgtagatattaatgctagcagattgttttttcccctaaaagcaagtcttcttccctagggtgaggcagatcatccagatgaatttctcttataaaaatgctcctcaaattcgtacagaaaaggatagcacaaaactgctgtgtggaaaaacctataatgaacaactggcctattccccacttgattttgctggcacatttcaggtacttgtcagaataccacttcatactttttcccatataccagactcttgtgagaatataatcaatatatttaaaatgtcttgggtgatattaatggaaacataaattctgagtaagaaattcagtggttaagtgtaaaatgtttattttagtgaaatacaagaaggtgagcaatttccaatttccgtttaacttgacttattaaaaataagtctcattcacattcttctagtattattgtatactgctataaaatttaaaccagaaaagtgcttctccttgtcagtagctatctgcccaaaaaaatgaatatgacaattccagatctcatctgccatctctaagaaagccacttggaaatgttaggtaggtcccatgggtcctgatccagggatctgtccctgggtccccatcaggctcggctgcaggcagttgcctaaggcgtcttccgccttcagccacgctgcaatccttgctccaggcactgcggcaggttctctccatgcccccaggaagactctccaaacccgaccagctcatttctcctgccccggaggatccagacgccctggcagctcctgggctccagaaccgagaatgggatgctgcctccaatcccaattgccctaagtttctttccagagggccgggagactgctccaagtttgctgtggcgggcgagcggccgcgcgccgtgtcctgggaggggggcggcggggggcgcgggcggagggaggggaggggaaggacgcgggagcctgggttgtggtggtggtgggggggcaccgggagggggaggagcaggagcgcgcggccgcggcgctacctttctccaaacaacgttgccacacgcggagagcacggagatttctggggctttggagggaatcgtgagcgggcgggaggaggccggggaccacacaggtgagcccccgcccgcgccctgcccgggacggcggcgggcgctgccagccccgctcccccgcacccggggtccgcacggtgcctcgcctcaacccctcacttttcaccgcgaacccgtgaccccctcctccttgcttgctctccgcccccaccccggctaagtgtagccgccacactttcccaagcccgcaggcgccccccccaacaccagcgctgcacccccgacccattccccgcggccccctccaggagaaaaaatgaaaccagactggccgaggaggggggcggcagggaccagggtgcggagcagaggtgagggagacgggacttactttgcgaggcgcggtgcagggcgccgccgacga

SEQ ID NO: 31814 - DNA, 2300 bp, Homo sapien
ttatggttcagcctcagtgcatcaagaggaaaaaagatagagcactgctgttaggaattcagattacaattggggtaccccacagaaccaaaattggagcaactgtaagcctcctttagtcacagaactaaattccaagacagactgtgggacatctacagtaacccaaaattttcactgtctttttcaaatgcagttatacacatctttgcagagctgctcatctgttcaacatatacacacgtttatagaaattcgccttttaagaatgtgattctgttcctgacatttatctaaaaattattatgcaatctgtacaccagagtactaatttctagaagtcattctaaaatgtctattttccctttgggttatttttaagatagtaaaatccattcacagttcctttcccattatttctctttactttgttagccaggactgtttaactcaagcttacgttatcagagatttaagaatgtggtgtgtgcagactaagtacaggtaaggaaaaaaaaaaagaaaaaaaaaggaaaaaaagagcatcactgtgcccatagcaacaagaagattgggttttaatttagaaactttgcagtgaataaaacaatagctttctgcaaaactctgttgtcgttttgtacctgacaaggttttgtggtctaagcagttacttttctttgttattcccatgttgagatttttgtacttgcattccctttcatgcaagctaaatgttctttacaatgtatcatcattgaacttaccgatagtacattaggtttttttcttctaataaatagttctgcagcaaagcccactgactgcagaaatgaagataccagtttctctagggagtttaatttaatcgaacatctaatttcaggtttctattaacagcctaaggtcaactaacatacctcttttcaaaccagaagaaatcactcgtggacactttccttaaacactattactaactccaaaaaatttgtagatattaatgctagcagattgttttttcccctaaaagcaagtcttcttccctagggtgaggcagatcatccagatgaatttctcttataaaaatgctcctcaaattcgtacagaaaaggatagcacaaaactgctgtgtggaaaaacctataatgaacaactggcctattccccacttgattttgctggcacatttcaggtacttgtcagaataccacttcatactttttcccatataccagactcttgtgagaatataatcaatatatttaaaatgtcttgggtgatattaatggaaacataaattctgagtaagaaattcagtggttaagtgtaaaatgtttattttagtgaaatacaagaaggtgagcaatttccaatttccgtttaacttgacttattaaaaataagtctcattcacattcttctagtattattgtatactgctataaaatttaaaccagaaaagtgcttctccttgtcagtagctatctgcccaaaaaaatgaatatgacaattccagatctcatctgccatctctaagaaagccacttggaaatgttaggtaggtcccatgggtcctgatccagggatctgtccctgggtccccatcaggctcggctgcaggcagttgcctaaggcgtcttccgccttcagccacgctgcaatccttgctccaggcactgcggcaggttctctccatgcccccaggaagactctccaaacccgaccagctcatttctcctgccccggaggatccagacgccctggcagctcctgggctccagaaccgagaatgggatgctgcctccaatcccaattgccctaagtttctttccagagggccgggagactgctccaagtttgctgtggcgggcgagcggccgcgcgccgtgtcctgggaggggggcggcggggggcgcgggcggagggaggggaggggaaggacgcgggagcctgggttgtggtggtggtgggggggcaccgggagggggaggagcaggagcgcgcggccgcggcgctacctttctccaaacaacgttgccacacgcggagagcacggagatttctggggctttggagggaatcgtgagcgggcgggaggaggccggggaccacacaggtgagcccccgcccgcgccctgcccgggacggcggcgggcgctgccagccccgctcccccgcacccggggtccgcacggtgcctcgcctcaacccctcacttttcaccgcgaacccgtgaccccctcctccttgcttgctctccgcccccaccccggctaagtgtagccgccacactttcccaa

SEQ ID NO: 31815 - DNA, 2300 bp, Homo sapien
attttaaatttaaaaaccccaatatgatagttaaaaaatgtattttaagaacccacccactccccaattttataagacataaatctattataatcattcatgtttaaattgatcattcctcctgtagacaaatccatctggaaattttcttctttactcgtgatctccagcagtcacctaaatcttaagtcaagtatgaaaaaaacctcaaaaatgttgctttaaaaattgatccgtactttgcgatctacattttaaaaaataccatgcttattttaccacttcacttcaagaaaaggcctctaggtcagaggtctccaatctttttggcaccaggaccaatttcatggaagacagtttttccacagaccgggtttggagatggaggagagatggtttcgggatgattcaagcacattacatttattgtgcactttatttctattattatgacattgtaatatataatgaaataattatacaactcaccataatgtagaatcagtggaagccctgagcctgttttcctgcaactagatggtcccatctgacatgatgggaagcagtgacagatcatcagacattagattctcataaggagcacgcaacctagatccctcccatatgcagctcacagtagggtccaagctcctatgagaatctaatgctgccactgatatgacagggtgtggagctcaggtggtaatgcaagcgatggggagcgactgtaaatacagatgaagcttcatttgcttacccaccactcacctcctgctgtgtggctcggttcctaacaggccatgaactggtacctgtctgtggcccaggggttggggaccactgctctagataactcctttccaccctcttcctgcctgattgctgaaattatggagtcaccattcctactcctgcccatcatcacatgactgccccacccaactgatgaaagggataaccgacctgcaccttgaagaaaagcatcatcaaagagctctaagatgctgtggaaaaccagtatggtagttctgcaaaaaattaaacagaatggtcatacgatccgtgaattccacttctaggtatagactcaaaagaatgttaagtaccaacttaaatagatatttgtgcaccacgttcacagcagcattattcacaagagccaaaaggtgaaaactacccaaatgtccattgatggatgaatgaatgaacaaaatgtgggacgtacatacaacaaaatagtattcagccttaaaaaaggaaggaaagattctattattctatgtaataataatagaaatgatatggatgaaccttaaagacattatgctcaatgaaataagccagtcacaaaaaaccaaatatggtataactccacggacatgaggtacctagagtagtcaaattcacacagacagaaagtagaattatagtttccagggtctgagggaaggggaaaatgggaaattattttttaatggcatagaatttcagtttgggatgacgaaaaatctttggagatgggcagtggtggtggttgcacaacagtgtgaatgtacttaattaatgccactaaattgtacatttaaaaatgcttaaggtcaggcgcggtggctcacaccgtaatcctagcactttgggaggccgagacaggcagatcacttgagctcaggagttcaagaccagcctgggcaactggcgaaaccccgtctctacaaaaaatacaaaaaacttagccaggccagttggtgagcgcctgtagtcccagacatttgcgggactgagaagcccagcctcttgcgggctttagcgcaagaggtcaaggctgcagtgagcagtgatcacaccactgcactccagcctgggtgacaaagtgagaccctacctcaaaaaaaataaaaataaaaataaaaatagaaagatggtgagcatgataactcctatgttatgtgtatttgaccacaatttaaaaaagtgctaagattataatgaatatatataacatgcaataccagtagcatgcagaagagggcggatggggtttaagctttacagaaaacctcgattcaattccctcctgcagccaattctgaccgtgtcaacgaatcatccacgcacctgcagctctgctgagagagtgcaagccgtggggtaagaaccttagctttgtttgttgtaactctcattaaaaagatataagggctgcatgggtattttctaaaaaggagataatttgagctaatattgaggggagggaagtagggttatttagatttttagtatttactattttgtctagatta

SEQ ID NO: 31816 - DNA, 2300 bp, Homo sapien
ctcggcatcagagggagaccgtggaggtagaggtagaggtaggggtaggggtaggggtaggggtaggggtaggggtagaggtaggtagaggtagaggtgtagaggtagaggggaagtgtgtgtttgttgattgatgggtgtacatgattacaagtgtgtgtttgttctgtggtgacccactggacagcagggggaaaaagaggcaggtaggtgcctccgaattagacactttattttatttatttatttatttatttatttatttatttatttatttattttttgagatagagtcttgctctgtcacccaggctagagtgcagtggtgtgatcttggctcactgcaacctccgcctcttgggttcaggcgattctcctgcctcagcctcctaagtagctgagatcacaggcatgtgccaccacgtccggctaattttttttatttttagtagagacggggtttcgccttctctactaggctggtctcaaactcctgacctcaggtgatctgcctgcctcagcctcccaaagtgttgggattgtaggcatgagctaccatgcccggcctgaattatacactttaaacgggtgtattttttatcgtttgtgaaattttttatggaaggtgaaattttttatggtttgtgaattatatatcaataaggttttgttaaaaaaaaacacaactaactacagattacatctaattgacagcatatttttactgccctgaatccaaaaagaaatgcccaggtatgggctaggggtgggcagagacacacacacttgtaatcatgtacacaactgggagtagtggggatgagtctgtggggaaaaacaggaattcagagtgctgagaagcttcccttactgccctgcccacttccctcccctgggcattgctccctcagcctggattcacaaagtcaatgcctttgggagccaggaactaaattcttagtcaaagacacctccctcctgtccagttatgggtctcagggaggaaatggcaggtgggtggtttcattctttcagtttcagaaaatatctgtagacataacatatttcctctattaaacaaattctgaggtaaggggaaacagagagagacagtcagaacattataagtcgaaaagaatctcagcattcttagtttagggaagttggccttgctcgctgtgtggtagaaaagctgattacgggagagaaccgtggagggaaggaagggaggcagttttgtcatccccacatccggttttgactggacaccatgcaggctgagatcaacttcagaggcagtcagctggaatcccatagctttatttgcccatttattgtgttgttattttgttgttgtcattactggaaaaggcaagagtagagctatcagaatgtcttccttgaacatgctgtcaacaaaccccaggatttttataaaccctatgtgaaaaacacgctaagaatctcttttcttcttagcatatttttcacttagggtttacaaaaatatgttttgaagaaagcttgaaaagatcagtggaaaaaaattcagcaccaaattttctctgaaaatcaacttgtcaaaaaagacgtgattaacatccatcctgtaaccagcacatgaatgatcttccctctttacgagtgtgcttcagcaaaactttaatctcgacccctccctctttccacttttaatagtggatggatgaaaaggcaagaggaaaaacaaagcagccgaaacacacccagacgcacacttctgccaagcatagccaccacggtaagcattttgaattcagccaattatgatctgtggattattaacattacctcatttacttcatcagtgtagacaatagtaaactgactgtagtgaaatttggaaccatagaaacgtgattctattttaatacaggcctatcaggtaacccacagactatgctacatatgaataagagaaaataagtttattcttaactatgtaatgtaattccagtggaattcggtaggtggcataaaacagcctttttgttttgttttgttttcaacaccaaatgtggttaacagtgaaataaattcaaggaagtgcttgaatttcttacagactgccaaatggaacagacaagcaggttgtcttggtaagcaacacattcttttcttttgtaaaagaaaataattgtatagctagttattaagtacagaagtctcaaaaatctgtgtaagtcctgggtgtttttctaagtgggttatatttctgatatgtatatagttactgtgtagtttgtactggcatttgtgta

SEQ ID NO: 31817 - DNA, 2300 bp, Homo sapien
catagtttggatacaagtccctatcatatatgggttttgcaaatatcttctctgagtctgtggtttgtctttttcactctcttgcagtgtcttttgcaaagcaaaaattttaattttaatgaagtccaacttaacagtgttttctttcttggattatgtttttgatgcgtatctcaaaagtcatcaccaaatccaaagtcacctagattttctcctatgttatcttctggaaattttatagttttgcattatacatttaggtctatggttaattttgagctgatttttgtgaaaactgtaaggtctgcgtctaaattctttctcttcttcttctttttttttttttgcatgtggaggtctaattgttccagcaccatttgttgaaaagactatccattctccactgagttgcctttgctcgtttgtcaaacagcagttgattatttttttgtgggtctatttctaagctctgtattctggtcatttgacctatttgtctattctttcaccaaaaccacactgccttgattgctgtagctttgtagcaagtctcaatgttaggtggtgtcagttatctggctttgttcttttaatttcttttttttttttttcctgtgaatgaacaatactttctgtttctttgcatggctaatttttttaaacaaataaattagagattcctttaatgccaagttacacaatcaaaaagataacaatctctttccatttgctttttgcaaggtttgtgttatttcagggcaaaacgtagagcaagtccactggcaaatctgggggctagtgattattttgttttgatttttatttttttaaatcagacattttaaacactacaatgaggtaactctagaaatcaaattctgtccccctttcccagaggtgttttatttatttatttatttattttttgacagggtctcattctgtcacccaggctggagtgcagtggtgtaatcacagctcattggagcctcgacttcctcggccccaaacaatcctcccactcagcctcccaagtagctgggactataggcacacgccaccatgcccagctaagttttgtattttttgtagagatggagtttcactatgttgcgcaggctggctttgaactcctggactcaagcaatccacctgccttgccctccccaagttctgggactataggcttaagccactgtgccgggcctccctttcccagggtgtattgttgcttcttgtggcttatagttgcttgtttaatgacttttctaaataatttttataaagattattctttgtcatgtgtggctattacattttctgtccagttagcttagtggtcagccagtaacttgagatttctttaaacatctggagcaaaaacaaaaaccaaataaactagcaaaagcaaaaacaaaaacacccctgatctttgcaggttggctgtgttggatcactttctcaatgcttagccagtctattcacagctctgctttagccttcactttctgcatgcatggaagctaaagatgagccagaggtgaagtttaggattttctcaggtctcctctgaacatgcgtccagccttgggcacgtgagtggacttctggactccctggtatatacagagatttcctcagccttttttctcccacatatctttctccatatatctttgcatatttcccagactttttgatgtgtctgctgcttgccccctctgttagcccttgctcaggtggctgcagctagtatgtttgcctttaattgtttacagcaaacaccagccagaaggctgttccagccctgagaaagttctaaggtgtacaaaacaaaggcaagcccctgagtgtgaatccctcaggcagcaaccagacaggtcaaaacacacaaccacaattctttgataacaaggcctatattgccccttctggcatgagcaagctatataactggttataaaaagtattacattaaattatggggacagaaatgactctactagtgaatgaagaaatcatttagattttatggttagtaagtggaggtttgagagtaaccatccgatctttattaatcttagtgtatattatatttctagaatttggactcatatcaagatgctctgaagaagaacaaccctttaggatagccactgcaacatcatgaccaaagacaaagaacctattgttaaaagcttccattttgtttgccttatgatcataatagttggaaccagaatccagttctccgacggaaatgaatttgcagtagacaagtcaaaaagaggtcttattca

SEQ ID NO: 31818 - DNA, 2300 bp, Homo sapien
ctgagttacagaagccacgtgttagttaaggttcaaagtctcgctcaattcaaaaaggctattgatctcaatttaaagcagtttccacccactctcacattaagataactttctggtttttctatgaatttaaaaatgacaggctgggtgtggtggctcacgcctgtaatcccaacactttgggaggccgaggtgggcagatcacttgaggtcaggagttcgagaccagccttgccaccatggcaaaaccctgtctctactgaaaacacaaaaattagccgggtgtggtggcacgcacctgtaatcccagctactcaagaggctgaggcagaagaatcgcttgaacccaggagatggagatggtgccactgcactgcagcctaggccacagatcaagactctgtcctcctaaaaaataaaataaaataaatattcagtagcttaaaaaattattaatataaaaatatttaataaaaatattaaataagaaatatagccaggcacggtggctcatgcctgtaatcccagcactttgggaggccgaggtgggtggatcacctgaggtcaggagttcgagaccagcctggccaacatggtgaaaccccgtctctactaaaaaatacaaaaattagccgggtgtggtggcacgcacctgtaatcccagctactcaagaggctgaggcaggagaattgcttgaacccagtaagcagaggctgcagtgagctgagatcacgccactgctttccagcctggacgacagagcaagactccatctcaaaaaaatgaattaataaattaattaatatatatatggaagaaactggaatataaggagcaaactaattgtcaataggagaatgattgaatgaaatataattacaaacatattgcaatatataagacaagtcttagaagagtggttttggttgatatgtattgaccaagaaagatgattataatatataataaatagggggaaatttacaaaatacgtcaacatctcgccatttttataaaaaagcaaacaaaaagctgtttatgcatacatgtatttatataagcttagaaaaactatggtaggatccacacactataaaaaatggtagtgatattgaaagggagagactagggctattttttctttaactttgaatttataattcttcaaaaagaagaagggatggagtgagagaggagaaaatctgccttaaacacatcgctcagaaagaatcactatttttaaattgtatttcctccgacttttatagaaaatacaaaattgtttacaaaactagttaatactataaacactgcgcttcctccgcatctgagttcatattaagccatatttgaggaaggccttcatatgtggccttccctccatgtcaacgaatcctcatttttaagggctacaacatattcgatgtctgaagttactgtagcttacttcaccaatcttactgggggacattgagattgtctccggcttccccccgcagaaacaactacaacaaacatccttgtacatacatatttgcccatttgactgcctacttaggacaaattcacaaatgtggaattcctaggccaaagctaatacatcggagttttaacccacagctccaaactggccttctggaaagtgggttttcgttgtttgtttggggtttgtttgttttaaatctatcacactcccaccgacagggcaagggagtgctgcttaacgcagaatcaggagatcaaactttagctgaatttgagcgacctcttcccagtgacacggcggggggttttccaagcccttttaaggaaaggaaagggatctggcgaaccccgagacccacccgccctgggctggagaggcggcgcgctctggctttccgcgctggcacaggggtgggacaagccaagtttccaggagactcgcccagcgcgggcccggccctcgcagcgtgggggtggccgggcgtccccgcggcgctcctcgtggggcggggcgcaggcggggcggggccccctctccagccgcccgccctccggccgcgtccccgccggccctgcagacgtggcggggcgggacccgctgggcactcccgcgcgtactcggccgcctgagcggtaagagccccgggcactcggtccccatccccttccccggggggcgggcgagcgcgggggcggctgcccgggggtggtgggaacaccataccttggcgcctcgtccgggacccacgaatcctgccctctgcgttagtgagaagcagtggtcagggaggacccggctctggggtgagggtct

SEQ ID NO: 31819 - DNA, 2300 bp, Homo sapien
tctacctcacttcttaccctttaagtttatccttgactaaaccatggtctagaccttcatcagctggtccccaacaaggaatactgtgtgtgtataggtctctttctcactgtgaatttctgacaaagatgttacaaagctaaatggcaagtattttttttgataagtgctcaggtattttctagacttattcttttttcttttttttttttttttttttgagacggtctcgctttgtcgcccaggctggagtgcagtgacacgatctcagctcactgcaacctccaccccccaggttcaagcaattattgtgcctcagcctcctaagtagctgggactacaggtgcatgccaccatgcccagctaatttttgtatttttagtagagacagggtttcaccatgttggccttggctggtcttgaactcctggcctcatgtgattcacccacctcagcctaccaaagtgctgggattacaggtgtgagccattgcaccctgccttcctatgcttattctcattattgctacaaatataattaataaagccagagtcaataattttaaagatacaggtattactcttagttcccataggcgtagtctttcatgccaagtaagagctccaggaaagtttaaagatagccctgtaggtttctgttagcttcctatcagtgctgtgacaaattacaactaacttcacggcttttgccaacacagacttattctcttggagttctggaggtcagaagtctgaaatcagtgtccatgggctaaagtcaagttgctggcagcctgattccttctagagtctttgaggggagagtggtttcttttcccttttcagcttctggtggccacccatattccttggctttgggccccttcctttatctttgaagtgcgtcactccagcctctgcttctgtcatcacatcaccttttcctctttgtaatcaaatctccctctgcctccatatgataaggacacttgtgattacatttaaggccaactcagatgatctaaaataatcccctcatctcaagatccttatcttactcacatctgcaaggtcccttttgttatgtaaggtaacactcacaggttccaggaattgggatgtggttatcttgggggccattcattattccagcagtccccaacctttttggcaccaggaactagttttgtggaagacaattttcccacagatcagcagaaaggggtgcgggggagatgcttttgggatgattcaagcacattactattgtgcactttatttctattattattacgttgtaatttataatgaaataattatacaactcaccacaaggtagaatcagtgggagccctgagcttgtttccctgcaactagatgctcccacctggggatgatgggagacagatcatcaggcattagattctcataaggagtgcacagcctagatccctcacacgtgcagttcacaatagggttcatgctcctatgagaatctaatgccaccactgatctgataggaggcggagttcaggtggtaatgcgagcgatggggagcagctgtaaatacagaggaagctgtgctcactcacctgccactcacccactgctgtgcagcttggttcctaacaggccatggactggtacaaggaataatgcagggttggggacccacaaggttacatagagtattggttaaaaaaaagtttgccctggccgggcgcggtggctcacgcctgtaatcccagcacttcgggaggccaaggtgggtggatcacctgaggtcgggagttcgagaccagcctgaccaacatggaaaaaccccgtttctactaaaaacacaaaataagccaggcgtcgtggcacatgcctgtaatcccagctactcgggaggctgaggcaggagaatcgcttgaacctgggaggcggaggttgcagtgagctgagatcatgccattgcactccagcctaggcaacaagagcgaaactccgtctcaaaaaaaaaaaaaaagttttcccctaccagatttatttatccagggctttgaattgaagcttaacaattcgatgaaagcatgaggtgtttataattgtgttgacagatactaaaatgtctgatgatgctggtgacaccttagccactggagacaaagcagaagttactgagatgcctaatagtgattctttacctgaggatgcagaagtgcattgtgattcagctgcagtttcacatgagccaacaccagctgaccccagaggggaggggcatgaaaatgcagctgtgcagggtgcaggggctgc

SEQ ID NO: 31820 - DNA, 2300 bp, Homo sapien
aactgcagtttagaaaatagatctgaagcctaagaatacgttgatgcacatctgggaccctgacccctaaacatgagtgtgcgagctgaaatgaagagtctgagaaggtcagggcagaacggagtggcgtgcagccatgagtctgggcacatttacttccacctgctgaactccacgctaatgggttttgtgttgatgacttcctgcagagcttcctcccagagcctcagtgctggctgcattatgccctggcaatgagctttagcaacttttaggaaaatggtgtcctggtatcccagatgccctctctacctctctcagttatcccgatgtgctcatctattaccacaatgaatattaaaacctattccaaagaggactacggctccaccgctgtctctctcgccagagcaagagtttgacctgcagaatgaaaaaataaaactttactactttatacttatacttaatattttataaggtgccttccctgtgcccttttaccattttggaaattcaaatcaatcttcagagaatgagcggccatctgtacaaataatgttctgttttttttgaaacaggatcttgctggagtgcagtggcacaatcatagttcactgcagcctcaaactcctgggctcaagcagtcctcttacctcagcctcttgagcaactgagaccacaggcgtgcaccagcattcctggctaattttcttaaaattttttatagagatggggtctcactatgttgattgcttgagccctcaaactcctgggctcaagtgatcctcccgcctcagcctcccaaaatgctgggattacaggggtgaaccaccatgcctggcctgtacaaataattgttaactgtatacagaggatagtttcaaaagaggggctctaaagacagtgagcagggaagacgtcagtcccagcatcacctcctctgtgaagccctccctgtgtgtaccctctcagttccccaagggggaaggacagtgcccttcctagtgcttccctccactgtaccctcctctcatgcctgtcatagttgttcttggttgacacagcctcactcctttagcctgcaagatgttggagaagaaaaatgtgtcttgtgcatttttgtaaacccagtgtgataactgacatctagcaagtatatatgtgcatctatagatgcgtatttatttatgtttatatatggatgcatgtttgtttatttatttattcattcatttattttttgagatggagtctcgctctgtcaccaggttggagtgcagtggcgcgatctcggctcactgcaaactccgactccctggctcaagggattctcctgcctcagcctcctgagtagctgggattacaggcatgcaccaccacactcagctaatttttgtatttgtaatagagacggggtttcaccctgtcggccaggatggtcttgatgtcctgacctcgtgatccgcctgcctcggcctcccaaagtgctgggattacaggcgtgagccaccgcgtctggccgtatgcatgtatatttataagtattgagcatcactctaagtattttaagtagattacttcatttaaccctcaaaacaaccttataaggaggtgcaattagtttccattttatggataaagaagctgaggcattaaaaggttaaataagttaccgaaggtcatagtaagtgaggagctgacatttgactgcagggttgatgtcaaactgcgtttttaaccactgtgatagaagagctaccaccaccatttatgcagcacatactgtgtgcagttgtgcaaagtatttcacattttgtatctcatttactccacaaagaatctccctttaaaaatgagaaaactgagacccagagagcttatctaacttgcacaaagttgcacagttaacatgcatcaagccaacattcaacccagcgatacctcccacaccatgaatcacttttgtcctgggaaaactggggaccgctgtgtgtaaacgttattaacgagaagaaaagatgacagtcgtgctgacctatttcttttttcaggttcagtcatttttagcatcacttgatggagagaagctggaactcttaaaaaatgacctaatttccattaaagacatctttgcagccaaagaattagagaatgaagaaaatcaagaagaacaaggtaaaggaaaataacttaaatagcaagacaaactgttggcataatccttacgaaactgctgttaatgaacacagccctttgaattacttaattcaagtgctcctcctccatgcttccaaaag

SEQ ID NO: 31821 - DNA, 2300 bp, Homo sapien
agtgccgggagaggagtttgaggtcagtaattaagatttgaggaggggctgggcacgtggctcacgcctataatcccagcactttgggaggccaaggcgggtggatcacctgaggtcaggagtttgagaccagcctggccaacatggtgaaattccatctctactaaaatacaaaaattagccaagtgcggtggcgcatgcctgtaatcccagctactcgggagactgaggcaagagaatcgcttgaacccaggaggccaaggttgcagggagctgagattgtgccacagcactccagcctaggtgacagagtgagactctctctcaaattttaaaaaaaggaaaaaacgaaaagatttgaggaggcaacataatggaatgtggtggtggagaacatgctagactgtgtcatgagatctgcattttagttgtaattttactagtaattaccttgtaaccttgaataagtcacttaccttttcatggcaaaatagaatgttatgtcggagcagtagttatcatcaggttagggcagggaaaaagggtgcagaatcaccaagaggcttttttcaaatttcaccccgccccccttctaaagaaacatgccagaattaggtagagagaggcacgtcagccaggtaaaccccacagttcctcccacctggagcacaggggctgcatcatgtctaagaccattccagctttaacaatctgggttcctctaataataccacagtgtgttttgcaagttagtacaaggtcttgctgtgaagtttctttagaggccatgatcattaattacttaaaactgcatgatgtttttccattctctctctctctctttctttcttctttttagcaagcagtggtttacataggtactcacttatccaggtgggtgaggaaaagggcagaatgaggaggtgagatgagtaatttctttatctctgatgggggtcactgattctggcaggtcagtgacttgaacacagtgggaagttgcctcattcatctccgtgcagcatctgccactgctcagagggggcatgtggtggctctgagattccactggcttatttgcttagggttaaatctttgtctgtaatagaggacacactgaggacagttttgctgggttttctctccccagatcttcttgctgttaacttaccattcaacactctgatatttttaactttggcgtgtaagatttaacgtgggaagtaagtttagtgtaagccccaaaacaacttttacttaagcaaacagcttaaactataatgataaaattggagtgagtctgccccttcgttctaaattcagggaataacaggcaggggaggaggtttctgattgtttaatttagccatgattttgcagggcacagagtgcgtaaactgcactcatgtgaaattaaactagacacagagcagcaccagacctttccagcagcgcttctcttctcccccttgagggtggaagacctgtcatgaatcaagaaacgcagagcccttcttcaccttcccagcatgatacattgttaggttcatgaaacatgaagagcttcctgaaatatatcagatgaggacatttgctgtagccgcggccccatggctcaatttctaacacatatttttaaaaatactattattcttttatagatggtcatgaaaagtgaaaaatataccatagatttttcaatgtgactgtcatttttattcttatctgaatatcatttttaaatgctttttgaagagtcctcaggcttgcattgttctttccataccttctgttctgtccctcttttctactttatatttaccagaaagcaacaacaaggttatctttttcgggggttgaaaaattgccccgtcatcctccaaacatacagagatccattcttgaaggcttagagacacttgattctagtcttggggttggaatgacttagtttccatatttgcgccataaaaggattgtttggttggggacctctgcaggccatgaagagggctcatgactgggtggaagaggatcaaaccgtggtgtcagtagatgtggcaaaagtgtccgaagaagaaacaaagaaggaagaaaaggaagagaaatctcaagaccctcaagaagacaaaaaggaggaaaagaaaactaagaccatagaggtaaattcattctagattgtctgcctacaaggtaataagagtgtgttcattttattagcagcttaattttaattgaggagaggccatttctttttcatttgttccgtgttatagaaatataagtttgagaccagcctg

SEQ ID NO: 31822 - DNA, 2300 bp, Homo sapien
gacctttccacagaatatagtgaagggatagaggacagtttcaactaggaaaaaaaattactcatataaagtatataaaagcgtatatttcgtatattaataaatatgtagaagttaaatttaaactatcctttttaaggctgctatttataattttctaaaaagtatattgcttttgctttcctagggtagagcacctccttgatataaaagatcctctcaattttaaacatttgtatctaacacagaatgcataattatttaattaagacgtttggtcttgattagaaatagaaacacattaaagtatttttgagaacctggatctcagatatgaaatataagacttaggaaagttaaacactagcgtagtagcaacaacctcttgtgtttgagattcgttaatctcttattccttcattgaaataggaaggagaagcttgcagtgggtaagtaattgcagatttgtagccatttctagcagttcctagaatcccctttataatctaatatttgtgtttttaaaaaataatctaatatttgtaaaagtgctttggaaattgtaaaacaaaactatggagatgtgggccattagtattatcatcaaccctaacaggatgttagagagtcagatgttgccacttcaagggagatgaccgagttttggtgcatttcaggaagccaaaatcaggctgcaagtaaactttgtatttaagaataaatgagaccgggcttggtggctcacgcctgtaactgcagcactttgggaggctgaggtgggcagatcacgaggtcaatagatcgagaccatcctggctaacatggtgaaaccccgtctctactaaaaatacaaaacattagctgggcgtggtggtgcatgcctgtagtctcagctactcaggaggctgaggcaggaggatcacttggatctgggaggcagaggttgcagtgagccaagattgcaccactgcactccagcctggagacagattgagactccgtttcaaaaaacaaaaaacaaaaacaaaagaataaatgattaaattgataaactatacattatttcgtgtaatattagaaatacaatgaagaactgtgtttctctgcataaaacttttaggtacgtgttttatactctgttacaaaatagttgggtggaaaaactcccaccatatacaaaatgaaaaggcaaatgacaacctgggaaaaatgtttgcaaaacatatgcaaagatttcatattcccaatagagaaaaaagtcttatagatcaacaggaaggatataaatgctgcaataaaagacatgaacatgcaattaacaaaagaaattcaaattgccagcaaatattaaaaatctttagaattactgtcaaccaaacaaatgcaaattaaacaatacttttttttccttttaaattggcaatggttaaaatgtttctatcttctagatgtactattttctgaacaccagaattcagcacagcacctggcaccaaacaggatcgacaatcatttaataagtaaatgaatgagtcatgtgcatgcaacctagacatgactgacattcacccttttatttctttctctcttgagaagggatctcactctgtcacccaggctggagtgcagtggcctgtcatggctcactgcagtctcaaatttctgggttcaagtgatcctcagcttcctgagtagctgggactacaggagtgcaccaccacacctagctatattaaaattatttttgtagagaggagggcttgctctattgaccagtctggactcaaactcctgaactcaagtgatccttctgccttggcctcccaaagtgctgggattacagatgtgagccacttcgcccagcccaccgttttatttttgtgagtatactgtgggtttatatttataaattgggtggggagaagatccccttgcttcttgagatcatttatttacctttcttgcttagaaagacaaataaatggtctgaaagtgcttatttggggggtagtttttttttttaatgggaagtgactcaaaagtgaagtctcagttcaagacctttttttttttttaagtcttactcaaaaggaagtgagtatgaggtgaactgcattaacctaaagtgctgcagagataaacttaaagcaggaagcaacataccatgaatgtactgcaagggaacacatttgtgtcatgtgaagagacatgacaaaaacagccctccttaaattatttgtggcaatagtgatcacattcattttaattttgccggaatatttcaagacaccgaaaggtga

SEQ ID NO: 31823 - DNA, 2300 bp, Homo sapien
ggcacaatcttggctcaccgcagtctccacctccctggttcaagtgattcccctgcctcagcctcccgagtagctgggattacaggcacgtgccaccataaccagctaatttttatatttttagtagagacggggtttcaccatgttggccagaatggtctcggatctcctgacctcgtgatccacctgccttggcctcccaaagtgctgggattacaggcattagtcaccacgcctggccgggaatgcctatttcttaaatcaggaatttttactgcaattgttatctgattagattgcaatgcttttctagtctttctcattataaacctgaaagaaaaatgctgaactaaaaatccaagactgaacaagtaactatgagcagggaagaaaaaaaaaacaactatgagaagaatgtcattgcggttaatgtacacaaaggtaaacactgaaaaatccaataagggctgaaacgtagtaccaaattccaaaaattcaagcagtgggtttgtttacacaattgtcttttgtgtttaaaaacaaagttactgaggtcatttttatctatgggcgtaggtgtcatggcacaggaggtggagggtgtctcttccacatagctccgataaaaaatgtatcctgtactttgtggttggaaccctccttgggagagtttgtgatgtatcttcttcctgactgtaacaatcttaaattgtcccatccgcttccctttgaactagctgtccatgtgagtacttcattcttttacatcatattgttttttcctaaccacttccccaagtggaagtgcacaaaacatccctaaatagatctcccagccaccccaggctaccacaatttggttatgttatttgattatcagtcttctggaccacttgctttgcttgcattgggtttttattacggagacaaactgaagagctcctgaacaaatgtcatctgggggggaatgaccacattcaaccatcacggacggagagcatacagctaactcagagtagcaaacactaatctacgaataatgaacataggcattattttaagaaccaaaagaaagcacgtgggcatttggtttacacatcactcagagacaaagtaaggaaatccctcccttcctaatgcatcatgagctacggggggcagggaccatagctgttttgctcaaacctgatgatgaattaatatgtaaagtactttagtgttttcataaggcgccaaataaattagttgttattctcacgacctagcatataggagttcaatgttgggtagaggaatgaataaagaacctactttttctgattcttattattccaccactggaaaacaatgattatggtcacagtgctgaggatcataatttcgatgccacaaacccaccacctagagcacactaattatcagattattgcaaggggaatggttactgaggctggagaagggaggcgagtcttagtgagttccctttaagctctgagacaacagaggccgcctctctcacggccttccagccctgcagagggacctcttcctaacttccacccccaggaattcccctaaccccagtttcaaggggcggggaacaaccagaatctttgtcaggtcctctacgccacgccccctcctcgccagagccccgcccagcctgacgtccccttcccccactagctcctcttgccacagacgctcccgttcccccacccccttccccggctcgggccgtccccacgccgcgcaggagagcaaagaaacccccggcggggcagtggcggccgcggcctctccgggcgcgcgacccggcgagggggcggggcctggcgggagggggcggggcgggcagccgactgcgccgcgccgggactgacgggctaaccggtcccctacccccacctactcgcccgccccctccggggccacccggggactctgaccccccggcctggcgccgcctgacggagcgggagtggctcgctccgggccggccggcgccggggatgaggctgcccggacagggtctaggggcgcgcgaggggccgagcatcccactcagctcgccggccccggcccccgcctcccccgctcctcccgcctggccgccccggcccgccgtgacccacggccgcctccggagcccgacgcggtaagtgcgacttccttctcggcatcggggagggggccgcctcgggcagggcccgcttcccgcccccacgcgactctcacgccccgctgcggcctcccggagcgcgcggggcgcgaagacgctgcccctcccggaggcggct

SEQ ID NO: 31824 - DNA, 2300 bp, Homo sapien
gcaaaataaaggtatcatttttcattgccagatgtttgctgtctctggcccctgcacactcaatgcctatagcactctggtcattccaacaactaaaaatctaccaccaccaccaccaccaccacctattttccagaagcctttaggagcaggttgatgcttcccttgttgagaaccagctacttagagtaactgaagtgtttacaaagatgatagtgcctgagctaaatcttgaaggatgaagtgtgttttttaaaccagagtttctctgggaggcaaacagtgttataaaagagggaacaccataatgtagactgccttgaccaatgaagtggtgtgtctatgttggaaaatggttagaaataaagttggatagctagagtgaagttagaaggatgttgatcagaaggagtctgacaaaggtgagaggagaggggaaagtgtcatttcactctctaatgcgtcctgcacagtactgccaagttaatttcctaaaacattgtcctgttcaacagtccattcaataatgtctttgctgcttgctcaaggcattttatctcatcgtattcatctaactttatctcttactacaccttaaaattaatttggtatggctggctgatcaaactgattatttcccacttcttccttgtagatatgcccacttcatgcttttattagaatctttttctgtagaaatctatcattctacctaaacaatgttttactattcttagcagccttctccctaatgaaactggcccataccactccattgccatcctgatatctcctttctttcttacagtttgtatggtttttcccgtattatttagcatgaaatcatacttggctttttatgcttctcattcttgtttctctgaataatttgtattaagatagacacctcacaatatttttgtaagcctccaaagtagtttttgtttttgttttttggtcagcttagataggcattgccttttgtatggaattagttgataaaggagtaaatactgagcaccctgaaaactcaaattctgcattgatagatcacactttaatattgcagcattttaatgtttcttattttaccttatcaaatattttgtatttggttcaatagctagatttaattattttgggggttaggaaccaagatatatatatctctgtgtccctgacaatgcctagtagattgcattgttcacaataactactcagtatttttgagtttatttgtatttgctttatcaatttgccttaactgtaaccatgttcaaaccattgtttgttttgctaacaacagagggcaccattagggcacttgtacacccaatagtcctatcccagtccctggtagcttttttgagccgcacttttccttttcctaagtaatgtcatagaaatttggatgttacactaactggcagtggcccatttctacttatagagaaatcctggcctcagtttatttgaaaaagagtatttgttacattttgatcctttgtagttttcaaactttttattctcctcattattctttatccaagtgaaatcttacccaggatcttactgtattaattagatccatttgttttctgaagggagaagatagaggtgaaggcaatagtctggagccccacctttgtactccgctttcctcctcattccccatccaaagagcacacctggaaaatcaccataactcatctaattttacaaatgcttttttaaaaacttgttttgtggtatttcacttagggacttagtttagaaatagaaacattttagttttaaagtgattatttttaagtacaaagggaaatgctatagaatacatttattgtttcagcaatgaaagagttaatatactaagcagcagagactgagatactgcaacggggatagtgttttctgtctctgtcatttgtggtttaagaaaaagggggtggtgttctgcatttgaaaggactttaatgaatgctgtcagtgtttgtgagacctaatggtcagtatgggaaaggagagccgggaaagtggtctagctgcttcaggataggtggatgagagtttgctctgattgaacggaatgttccaccgtgtttcatctttattcattatcctttgttctttaaaatctgatatattggcataaaagtaattgtagatatatatatgaatgtgatttattttcctttacatatttttgttgtgtacagcagggcatatacttctcttgtcttggttggatgcacaaatctgtgtgcagtgctttttgcccgttgcctagacgatcactt

SEQ ID NO: 31825 - DNA, 2300 bp, Homo sapien
aaaaccaccattatttttttgcttatgttatcctgtctcctaaattttaaaatagtttctaattctcatttatttgtataagcatatataattacatactattcaacccatttttataataatgatcttaaatgtgaagttgagtattacttgacttggattttccaagtcattacaccagtaatattcatagtgtacaacacatcctttctagataatatacatttgacttctgttgtcattattgacaattatcctccaagggcatttatctgatgcccatgtttgtatggtactgaaaatacattggactaggaggatttaggaaggaatatttatcagttaaggcactgttaacttctaaaacagataaatcttagttcaatgtgagtgttcttgcttgagttatcttttatgtattttacttcttcctttttctaagtcttcaatcctctcccttcaacccgtgtatagagaaagaaaatatggaaaagccatacctgttcttagccactttaaggtgaactgtgtgatgtaatagttcatttccataagaacacatctatttgcaagagaggctgggaaatatagtctagctatattctcaggcggaaaaaagaatattttggtgaacacatagcagtttctgtgatagccctatctctgccatgaatgaactctgactcttggcaaggcacttaatctccttagcttaagttcctttactttaaaagtaagaaatatggtgacttttttcttttttgataaggttattatattaacaagattctcttaagatatagtggggcttgattcaacaaagcatatgtcacaaccatcatatccttaaaagaagatctgatgagaaatgagaactaagttatggcacagtcactggttttatagttaattgcataaccaaccgactttgattacttgatttaagtgatcctggagaggagaactgggtgtgagggtgaggaggaaagaactggactcaggacttcattcttagtcctaaccttttcactttttcacagtttttatcagtaaatcatatgaaaacagaacatacaggtgggtgcggtggctcacacctgtaaccctagcactttgggaggctgaggtgggcagatctcctgaggtcaggagttcgagaccagcctgaccaacatagagaaaccccatctctactaaaaatacaaaagtagctgggcgtggtggtgcaagcctgtaatctcagctacttaggaggctgaggcaggacaattgtttgaactcagtaggcggaggttgtggtgagacgagatcgcgccattgcactccagcctgggcaacaagagcgaaattccgtctcaaacaaaaaaaaaaaaaagaaagaaatcagaatgcctactcttcaaattataatttagaaatttcaaataattttttagacagctgtattaggctatcaaattcctttaacctgtaatataagttatagattacctgggcttttgaggactggacagagaaccaaaataattatttataacactgtttttatgacaatatattttttaatgaacttgacttgaatttgtatttccaaaataatttaattgcctttctgccttcaaagatgaatgatctcttatatccttaaatataacgttaggagatgtggttatcaatatgaatatagcttagctctttttcagcagagacattggctttaacagagaaaagacctcacaaaaagatactacaaagaatatatgtagcaattaattaacagtttatattcacttacagtgtttacaagaatcatatgacttaaggcatcattgatttttaagagactaaaatgatgaatgattatacattaatattgataggtagcattgatttcttctattacatttgaaggctttcaaaagacttaataggaaagatctttttaatgtgatagtgatatttcaaaatgtgtgtttttttttcttttcaggacttccaatagtagtcagacattatcatcctgtcatactatggagccatgtacatcagatgaatttttccaagcccttaatcatgccgagcaaacatttaaaaaaatggaaaactatttgagacataaacagttgtgtgatgtaattttagtcgctggtgatcgcagaattccagctcacaggtagttgttttctatatttctgtatgtgtgaaatatttcctcggtaatttagatatgtatattgaggtaacctacttcaattgactattatgtttttgggaaggggtgtagttcatggaatttccat

SEQ ID NO: 31826 - DNA, 2300 bp, Homo sapien
agaaagtccaggttatgaacgtgggtttgttagaaaagctatttcaacccgaatttcatagaggcacctcaaattctgtatttccaaaactgaactcattcattaccttacctgccatgcttgtgtgagccatcaacatctcacttagatgactgatgcaaaagcctcccaactggtctccctgcctccactctttgcccctacattctgttttaacgtagctacctgagtgatcctttaaagtggaactcagattcagtcatttctttgatcaaatctttcattgactcctcatgtcactgagtgtgaaagggaaagtacatgcaatggcgtacacgatccagcctgccgtatctctctagtattgtcctattggtctctgtcttgttcagtcagcatcagccactcagaacctcttgtagttccttgcatgtgccaggcatgctgctcctacctttggaattttgcactatttcttctgcctgaaggctatttccagatacctgcatgaccaaatcctaaacctccttcacatctttgcccgtgtcactttccggtgagaccacctatttaaacttaccaccctttccccatttgcctttgcccaactttttttccccttagcacttatcacctcttaatgtactacagaatttacttctactgatcattgtctccctaccctctaaatgtaagactccataagagaagggatcttttgtcttattttgtacccaatgtatctcaagtatctagaacagtacccagtatttactggacacacatcagtatttgttcattaaatgaatgaatgaatgaatgaatgggcagttttctgaagaagcaaccaatggccaataaacatttgaaaaacctcactagcaatcagataaatgaaaattgaaacaacaatgagatatcatttaacactttatggccaaaaattttaacatctgataatattatggggaaaatgttagtcttatacaatgctggtggggtctaaattggtaccttactttggcaaatctaatggctcagcagtgccactcctggggaggtaagaaaatggaattagagagggagccaatgattatctgtatcataatttttattacttttaaaaatgaaaatgtttatttaaaatctatttaagtgtgttgacatggaaatatcttcaagacattatccagtgaaaaaatgcctgtttcaaaaatacggccaggtgctgtgactcactcctgtaatcctagctctttgggaggctcaggtgggctgattacttaaggccaggagttcaagaccaacctggccatcatggcgaaactccatctctactaaaaataaaaaaattagctggacatggtagtcacgtctgtaatcccagctactcaggaggctgaggcaggagaattgcttgaacctgggaagcagaggttgcagtgagccgagatcatagcatggcacgccagcctaggaaacagaatgagactgtctcaaaaaaaaaaaaattataatttaaatgtattatatatgaccattaaaaacttagagacatagctaatatattttataattataaaaaatatagttttatagtgttattacaacataattttaaaacaaaatgcagactaagataataatagaatattataaaagtttaaaacttgctagcaaaaaccattttcaaatgtctcccatatattcactacttctataattaaatttttttaaaaatggcttagtttattttcaaaaatgataaacaataacttttaaattttttcctttatatagttgatttgatgctatgggcttatagcttgttttctggatgtcatatagcattatttgagtagtgaagtggtaaagcattcacctcagcagaaaatttggtaatggtaatttattattcaaaggaaggaactagagcataaagcaatttgtcaagcttaaaatgcatttcctagtaccatgcactgtgagtaacaaataaaaaagaagcagcagcatttattaatgaacatcaactcgaatgtggtcattgattttttttttcctaatgtgttcacagattggtgctctcctctgtctcagactattttgctgccatgtttactaatgatgtcagagaggcaagacaagaagaaataaaaatggaaggtgtagaaccaaattcgttgtggtccttgatccagtatgcttatacaggtaacgagtctgaaaatgtaaattaaaacctcttagatttatgttgtattattagatttcagatttctgtttttagaaagcatgcc

SEQ ID NO: 31827 - DNA, 2300 bp, Homo sapien
aaccaaattaatacttttgaaaaatactttgtattcaaccttgagttcagtagtatttcataagttgttgaaaaactcagttttcacttaatgtaagttatactagaatggaatgggcattattctgaaatagatatatcaacaaataattcgtcaagtgcatatttacgtgatagtccttttgttactgatgaaatccaattaatgccatttgaaagtatggcatagttataccaatgtataaatctgtcaattatactttatatgtttaaggaattggaaatatatattattatttcagtttcttcacaatctcacataacattttatcataagtacctttccatgtacctacgtgatctttgtctttgaaatttttaatgcttatttaatatacagctccctataactgaacatataggctatttcccattttttaccattgtaaataataatacagagaagtattgttaggtagtcagctttgctttttgcttacaaattattattaaggtttaaattacaagtgggataactgggttgagagtttcaacatttttgtagatcttgctatgtgttaccaaaataatgtcagtatgcaattcaatagaaccttttgcttgaagccattctagcactgaagttttattaaaatatgtttctgaaaatgataatccatcatttaaaatagactcatttagacatccttgaacaaatcatgataaattgaagcaattgaaattcattaattattcatgaatggttttcccctttagaacttctactgataggaatgtcaagctaatatatattttagattagtacctcactcaggttaccacaggctatatggaaaatataattctcattttaatatagaagatagttattgatagtccttatttctagctctaatttaaacagctttagcttctttagtaaacctctgcatgctgagacagcgataatacatcaggaaatatgagaaaaacattaagggacaatatgtgtctagtatttgcatttataaccgtgtcaactatccattcattaagacttaaaacctttcaaatcagatggtatgttttccttctctccagattatttagcataatagcctatcaaggtcatctcacacctaagggcatttttatttcccatttcaaattatagaggatttgattctaacgtgaggccaggactgagtcatcttcagtctaatgtcctgatcccagggcattataggtcactacttttttttccacctttggtcctttttcctgtgagaccaaaagagctttgtaaataaattatattagaagagattaaaaatttaaaaacagacccttaaaagagattaaaaattcgaaaacagacccaaaatcctagatgatcttataaatatcattaaaacgatcttgaagaccgatttgactgtcgtataactctaagaacaaatactcattccagggaggatctgagaagacatctgtggtctagaatgattctgggaaatgtagccactctggaggccatttcttagtaagagaagtaaccaagctctctaggtatttggctccactgctggccgaattcttcagcacccacaaatccaaaccgcaaatccacccacttctggtgttagagtatcatacatctcagtgtctaattcattatttctctcttccttcaaaagaattgccaaaagtatttcctaacttgagtgaagtaacacttaaatgtcctaggtccattttttaaatgtaataagtgatacaacactttaattctacttgcatatgtttaacaacataattgcagtttaatttttttttctctgctgtgtttctttcctaacaagtaagtattacattgtaaggtctaaaatataaattgtgtgttggtagctaatataaaaagcttttactttcttctaagtaaattgtgaaggtcagaaggaacaatattgtttatctgctatttcttccctctaggagcatttcatggaagtaatcagaaaccaggaatttgtattattaccagccagcgaaattgcaaagctcttggctagtgatgacatgaacattcctaatgaggagacaatattgaatgcacttcttacttgggtccgtcatgatttggaacagagacggaaagatctaagtaaacttttggcttatattaggctacctcttcttgcaccacaggtaattaataggcacttgtttataggaatttttctttgcctattctatcaaagaaaataattgtacatgtattcctatgaaacgtgtaggtga

SEQ ID NO: 31828 - DNA, 2300 bp, Homo sapien
tagacaaatagatcgatagaacagaataaagaataaaaaaaaacaaatctcatatactttgagatctatttatgagaatgtagtatggccaagattcaattcagctggaaatggagggggttatttaataagtggtacagaactggctactgatcttaaagaaaataaaaatgctcctccactcatactctatttaaacattaatttcaaaaaaatgaatttcacatggatcaatggcctaaatgaaagaaagcaataaaatcttgccagataatccagaagactacatctacaaactgaagcaaaaagacaagactttgtaaccaggactatgaaaagaaagacacatatttgatgacctaaatatgaaaaattatttgaatggcaaaagtattatgaaacaaccttaatagacaaatgattaaaaatctagaaaaatacaattgaaaaataaaggattagtgtgtgtattacaaggaactcttaaaatttttaatcaaaagatagtagaaaagaggcagataaaggaagaaaaaagtacaaatggtcaaaatattttaaaatgcttatattcacttatcaggaaaattcaaattaaagggaaaatgtgatatcattaacaaaaagagctaaaacacttattcctggcaggaatgttgtgctcttgtgctcttatacatggctgtaatggaatgtgagccactttgctatacatggctataatggaatgtgagccactttggaaaatctgacaacattgatcatacacatagacacacacagatacacatatatgtgcacacacatgcatacataacatacatacatatatactttgacccacctggagtcaattcaattcttacaaatctatcctataaaggtaaaaattaatacataaggacttctgtactggacttgtttttagtagcagaaaaaagtatgtttacatatacacgtatatatatacatatatatacatatgtatatatgtatgtacatactgaaacaaaattgatgtctgtaataaggaaatggctaaaaaattagcatatctatatactatggagtattattcagttattaaaaagaataaatcagaactataccttttcagaagacctggaggaattttcttgagataatgttgagtaaagatggtaagatgcagcaaagtatataataaaacaattagtaaaagaaaaaactgtaaaaattattacatatatttatatatgttatacatataaatgtatgagaattatgtcagcagaggtttgcataaatatgaagaaaatatgaaaggctgcacaccaggttgtttataaggcagggaagaattgcaggatggggaggggcaatggagaaccaagcacaaaaggaaaagatttttaattttttttgttttatttaatttccaatgtgatcatattttcattttattttttaaaagacaaggtgtaatcatatttgtgctaaacatataaaaattgtatttgtgttatataaatatataaagctggattcagtgacacaaaagggattttaatgtttttagaccaatcactgtttggagttcttttccccttgagaaactggtaacttttgtttttgcagttgtgagctgaacatcatttagcaaagttaagtgaacgcagcataattagtcaactcctacttataattattcttccattagaattatttctgattttaatagtaaaattatttattttagaaaatctggaaattatagaaaagtagtaaaaaaaactttatttaaaaagcaccagtattcctactacccagagataagcactacagtactaagattttagagtataccatttatgctacttgtgttttgtttttcaatgaaatttaaaatgtaaatcttgtaaatgttgcatattttagttaaaaatatgtgcctatgcttgaattttttaaaaatatgtaaaatccatttgagaactatgtcatttttttctgtaaaccctaccattttcttagtcattcagtatacatacctactattcttttctagttcctggcagacatggaaaataatgtactttttcgggatgatatagaatgtcagaaactcattatggaagcaatgaagtaccatttattaccagagagacgacccatgttacaaagtcctcggacaaaacctaggaagtcaactgttggtacattatttgcagttgggggaatggattcaacaaaaggtatcaaataatcttttatttggggagggaggaccagagaaaaagatattttaataagtgtatata

SEQ ID NO: 31829 - DNA, 2300 bp, Homo sapien
aattagcaaaataacttttagttaccaattcatatgaatatgatactgcttagtaaactagatctaaaagaaataacttaaaattcaaaagaaaagtattccctaaatgtattcatgaagaaagatgattagctttttatttgttggagggaattttctaatttgatttgatttatttaatggaagggataatattttaagatcaaatttagagtaattaaatatactattactatgtatgttactattataatgtaagcatatgagtaaaaaacctcactatagctagaaactataaagaaaaagtattcaaacatatttttcaacagctgtactaagtataagggactctgtttggtgctgtgaaaaatacagaggtaaaggccgggcaaaatggctcatgcctgtaatcccagcactttgggaggccaaggcgggaggatcacttgaggccaggagttcgagaccagcctggccaatacagcaaaaccctgtttctactaaaaatacaaaatattagttgggagtggtggtacatacctgtaatcccggtttgggaggctgaggcacaagaattgcttgaacttgggaggtggaggttgtggtgagccgagatcataccactgcactccagcctgggtgataaagcaacagtctgtctcaaaaaaaaaaaaaaatatatatatatatatatacacacacacacacacacatatacacacacacacatatatatatacatatatacacacatatatacacacatatatatacacacacatatatatgtatacatatatatatatatatgcatgcagaggtagaaaaagacttgtctatcccaaataatttagaattctgtagggtaaataaaaaataataaaaactataacacgagaaaatctatatgtataacacaactatttctaaattttaggaagttatcaataatactagtgctctgatgaccaaattataacaaatactttagaataagtgttagtcaagattataattctataaggctagcgcggcttacatgatgtattagaagcttagaagagagaagtgggttctagttgaactcttcacaattgggggttaggtttttttagagggttttgttttttttgtttttttaaacatctgctcatcttaactcataaagagaacaaaggagtcctggaatcttccaattcttaaaaaaaaaaaaaaagaaaagaaaaacatagatgccttcaggcagcaacttcctgaactccctaccgtcatagttcccaaagtacccgatccgtacttaccccgcccttgcttattgcagtagaatatgttccctcctcccgtgaaagacagctcttctgcctatgccctggatactgtgctttcctgcctccccacgaaccataatgaacatggttcattatgttcgttatgatccctttcatctcctgtatttttagctgctttcctctcaaccagatccttttcattcacatttaagcaaactctgagttttcaaattttcaaagcaaaacaaaacaaaaccttcctcaactcttctagtaatttctatctctccttactttgatagccagacttctcagaagaatcttctatgctcactgtgtttcttcatctcccagtcacgtctcaaccactcaataaggaacctccccctgaagtcatcagtgacctctgtgtggctaaatccaataatacttctgagtcttcatcttatttgatcctttcagtaggatactgttagcagacctactgctataaactttcttcctttggcttccatgacacttaacgcctctgcttttttctcccccgcttctgggtgttgtttctcaccctcctttgacagttaatccttgtccatttgaccttttcttactggggcctgtgtatgccctggagaatagtaggagatgaggacacagaggtaggcagaggctagatcatgcaggaccttcatgaaatataataaaattattattctcaatgctaataagattatatttttgtatctgtaatttcataaaattaccaatcatggtataatttctatttacataacttctatatattactatgaaggagcaacaagcattgaaaagtatgatctccgtacaaatatgtggactccagtagcaaatatgaatgggaggaggctacagttcggtgttgcagtgctagatgacaaactgtatgtggttggaggaagagatggactgaagactttgaatactgtagagtgctacaaccccaaaacaaaaacttggagtgtgatgcca

SEQ ID NO: 31830 - DNA, 2300 bp, Homo sapien
tcctattgttcaaaaaagaggtgaaagatttaagaattgttctttatccataaatttagattgcattccttcccctagcaaccctcccctgacttctatctcactgtaatagagctcattcactgagtttgtttccactcccaggggagttggatgggtagcatttattatttatttagtctgctaaaaagtagtagaatgggtttagacttttcagccatgcacgtagaaggtagtcaaaaaatgtgaggttatgagttcttctagaataagcagatccccaggcattcagagtattttgtgtgctacctctgagatagcatggctgttagaggacctctctagataacacttgatctttcctccatattggtcacagagttactgtaagtgttcagcatttcttcatatccatactgtgtatcattttggctaaaatagagtgtttcatgtagattaattcttgagctgttttaaaaatcacctttaaagaagaatgaatgctacacaatcatgatgtacccaaaacaacttagtctatgaaactttgccatggaaggtggctcttgggaaggggaccaggccagaaacagcgctgatacagcaggggccagggcaacaaccctttgccaacaagtacaggctgtttcaatatttcaccaactggcatagtagtgttgacattttaacctacagatccaatacatatctctttttcctttttaggttgctccactgtgcctaggaagagctggagcttgtgttgtgactgtaaaattataatttagtgccccgttttctacatgaagacaccgtcttcctttattaatttagtataattattctatcaatggatacatttttagtaaatgtgcattgtcacaatcctgggcacaaagtgcctgatgtcaaaatgaagatagtaaaacaagggaggaagcagtggatggaccaggattaattcctttcatttcttagtaaattaaaacctgcagctggtggattgtgatcacacattcccgaagtaataagtgaggacgaatgcactgctctggaacataacccagtgctaactgggggtttcatttattcagtcaagcacatcttactcacatccagatttattttcctacagtgcaaacacaccagatgaaactttaaaatgttactttttgtaagcttatcataaatgagttgcagtaatttgtttgcttgtttgtttaaccacaaccactattttaatgatatactaaagataacactatttagttttttcagaaacatctgcattatatgtgtgttggttgtggattttgtttctaaaattggcttagtccaataaataaagaaaagcattaaggacttaaagcaacaataaccaaataaaaacttgataggatctttgaagtctatttaaatattcattccattacatctagactcaccaagaactacatgttatgatgttaagttgaagttgaaacatgatgttttgcattaaatttaagatatgcaaatttatgtagagaaaataaatgttatataccctataatctttcacctaattagtatttaattatatggatttgttttatattataaaagatgttttgattttgtcttttgatattgacaaaattgtttggatatccttatgttctcaagtctgtatctgcctcccctgccttatttcttatgttttgccacagttaacccattgtgcttctttgtaatcaaacagtttgtgggagaatgggcttattgaatgtctaaaaaataagtttaaagtgtttgttaccctaagttttttacatttttaaactctaattacatatgtgaatgttattactctcagtgaattgttattgtttgcaaaaatgcactgggcagtaacattttgtgataaatcctataagatataagtcattgagatgtctaagatgctttttattttaaccccagttaataaccaccttacggaaaataatatttgctaatattgtttattgtgaactaggaatcaaagtttttgtatgcatcaatgcacttaatccttataacaaccttatgaggtagttctattccctttttatagctaaggaaattggggtacagagaagttagccccaaggttatatattgcaagtaagtggcagagcagggattcatacaaagaccttctcactcagcagtcttcactcttactattcctgccactaggtagaaaaagaaagatttcggccgggcacagtggctcacgcctataattcccagcactttgggaggctgaggtgggcgga

SEQ ID NO: 31831 - DNA, 2300 bp, Homo sapien
caatctcggctcattgcaacctctgcctcccaggttcaagcgagtctcatgcctcggcctcccgagtagctgggattacaggcatgtgccaccacgccaggctaattttttttttttttttttttttttgagcagagtcttgccttgctctgtcgccaggctggagtgcagtggcacgatctaggctcactgcaacctccccctcccgggttcaagcgattcccctgcctcagcctcccgagcagctgggactacaggtgcccaccaccatgcacagctaattttttgtattttagtaaagacggggtttcaccatgttggccaggctggtcctgaactcctgacctcaagtgagccccccacctcgaactccccaagtgctgagattacaggcgtgagccactgagcctggccaccaatacttctttttgctgttttttttgacggagtctcgctctatcgcccaggctggagtgcagtggcgcgatctccgctcactgcaagctccgcctcccgggttcacgccgttctccggcctcagcctcccgcgtagctgggactacaggcgcccgccaatacttcttaatctcccacacttaagtggaacaggatggtttatggaggctgaagttgagtatttcccttctcccaggtagtttaggctctgataaaaccccagcagactaggctttggtaaaaatactttctcctgagggcaggtcttgttaagaactgattgctctggctatttttaaatggttaccctttcagcagaggaatctttcagtaaaaatttaagtaattaacctaactgtcagaggcgtttgaaccagagcgattccattttgagtgagggctaggaaaatgaggctgagacttgctgggctgaattctcagaatttgggcattcctcgcctctagatgtttacgattaagggaataaattaataatgtttactaaaacagacccagatatcgggatatctggagaacaaaggcattcctaattttgctttaaagataataatatcaattcctgcaaaataattaagaaaattaatctttgatcacaaacccttgtagcagagcacatctccccatatatacaagcattgtacctagggtggatgcgtcccttctcttgctttcaggaatgtcctactctgtctatggagtagctgtcctttcaccactttacgtgttttaataaacttgcttttctcagcactgagaactcgccctgaattctttcttgcgcgcgatccaagaaccctctcttggggtctggatccggacccctgtcgtaacgtaactgaaaaccccagtgcaaaggcatagcaccctacttaagaatttgcaaacattcattattagttatttcaaatcattgattaactttctctaagccaatcagattcctacctgatgtcgaaaagaaaagcaaaaggtagactgtttcaacactttcagacgcttgggtaaaagatgcactttcatgctataaataatgcagcacaaatactgtacaacagggctttatacttggggaaaagctgccagatccaaactctaaaggaaaactattggagctcatttttcctgcccacgttagctagcacattttgttgacattgaaaaaaaaaaaagattttggtgaaactgaaaaaaaaaaagcaccaacaaccctaccttgaaataaactattgtacctcttatgcctcctcccttctaccccagaaacctggaagaaaaaaagatatacccgagctcgtccaacccctctttgcgtggactgtataggagtatttagcccatcctgcctcctttaatctaacattctgcgtcttctttccttcagcttctcggcgccccctttggccagcactgacatcttagtcatcgcggtccaaaatttacgcacgcgcctttgagggctcacagagcccgtctctcccggacgaatctcatccaatcagagccagccaggaagccgaggctcagcaaggcctcgcgacgcccaacttcccagggttagcgtctctgatgtcatgtgattccaccctccgcctctcacccaccctcgcagagggcggtgcgcttggcccggcccctcgaggcaccgcctttcaattagcactcgctgattggtcgctgctcgcgcggtctcctgggtgacgggaacgcggtagcctgcttggtggagaccgggtgcgcctgcgtacttcatagttcgcgtagcggctcgagcgtggagatgaaggtaaataacttacaaattcccggggtggggcgggaaaacg

SEQ ID NO: 31832 - DNA, 2300 bp, Homo sapien
ctaatgaagaaagtaatgtttctataatggtttatgtgtcaggatgccaagtacctgttccgcttgtacatggctctgaagcaataccgagaagctgcccagactgccatcatcattgccagagaagagcagtctgcaggtaggtccgtgatacgtatgtgttacttcccaagcaggcagcagaatcaagccccagccccttttctgtgtaggaaagagtagcccctacgtttgtaacataggcttgctttgaacccaaaagactaaagagatgaccatttctaggtttcagaggggttaaacaatgtactatcccaggagactgtataaatgtaagagactaagaccatctcttgtcaagtgctatttcctctcccccacaacctcagaggttctgtctcatgaatgatgtctcctctcacccctccagcccacaacccccttcctacagtctcacggcattttctttccattccctgtgtttggccttaacaatatgagacattaggcgatggagggtaatgatgcggtgctgttacagacctagttctttataatatgcagaggcttgatagactcttcaggatggttctgctcacatgtgctctgtcaatacttattgagtgagtaagaggattagtctgatatcttcattaatttttatgagctgatcttcttaaatctttataaatgtggacacaattttggaaaatatgcagtcaaataagtcattactttattcagcttacgttgatctaacaacaccttcttcctgtcagatgcgtgctaggagctcaggatacagagagaactgagccacagttcaaccctcaaggtcatgatttgatgggagagacagaaagtaaattcagagttggacgggatgacaagtgccagactagaaagagaaataggctgaaaaggcacaattaaaataagagcgactgctgggttacccacagcatcctgaaggttggggtagggagagttggaggatggagacgagagaaggcaatgaaagctttacctgagttttgaaaggatgggggagcaggtgacgaggggagtggaggttgctgggagccagagtgctgggatttggggaaatggggaggtggggaagtgctgggatgaggaaaagtgctggcaaggctgcagcatttacacacctggagaagaaagggagggaaaatcaggccagaaaggagcgcagaggccgatcctgaagggcacaagtcctctgctcaggaatttgcacttccaggcgtgagtggcgccattggagggttttatgcaggggtgtgaccttgagttgtttgggtgtggatcaaggcttgagggttttgaaggcatactctgacatcagatgtgggcccagagcaatcctgatgagcactacagcagaaggaaatgatgagaagcattcacagtaggcatgggaagggaggctggaattgggagactgagagttatactcagaactccatggcctggtggacttcagggccaggggggtgccctgaggaagagtaagacatcaaggaggacaccaccatttttcaccagagcaactggctagatgttcataacatcaattaaaataggaaatctggccggtcacaatggctcatgcctgtaatcccagcactttgggaggccgaggagggtggatttcttgagccaaggtgtttgagaccagcctgggcaacatggtgaaaaccttgtctctacaaaaaacacaaaaattacccaggcatgggaggatcacttgagcttgagaggcagaggttgcagtgaacagagattgtgcccttgcactccagccttggtgacagagcgagaccctatctctgacagacagacagacagataaataggaaatctgctgagttgctttgaataagacattattaagagattactaataacaagattaacaaaatccactagtaagatgggggtccatagaatgtcctcagatgtcaccctttgcagtaatgtcgttttaccaccttttttcaaggcaactaccggaatgcacacgatgttctcttcagtatgtatgcagaactgaaatcccagaagatcaaaattccctccgagatggccaccaacctcatgattctgcacagctatatactagtaaaggtgaggcccatggagtgacttgggacataacctgccaggtgtttgtcccccattgagattttctccaggcccttctccattggattcgagtgattgtctagatgtctgtattgttaagtaacaaaacaagatacagaacatatctacaatac

SEQ ID NO: 31833 - DNA, 2300 bp, Homo sapien
aatgtaaacttgctgtgataggcaaaagcttatatccatactgttttcaaggagtgaatttctttccatgccattattctgctaacaaaaaggcatggatcagcagggaaatcttttctgattggtttcactttttttttgtttttgtttttttttcctgagacaaggcctctcaaagtgctgggattataggcatgtgccaccatgctcagtcctattttgggtcttcaaaaatatttccattctggatatctattcctttataagaaaccactccaatacttattaccttaacagagcaatcatttaattatgttcacgctactgtgggtcaggaaatttggacaggccttgactgagtgatttttctgctctcccaggtgttgaatggggtcaacaaagctagtgaaattccatcagttgctggatgggatctgagatggcttcatttacatgcatggtgcctggtggagatggctataaggctggtctcagatgaccacctccctggctttacatggtgctccaagagagcaagacaggagctgccagtcttcttaaagcttaggtctggagttggcatagtatcacttccattgtattctttgatcaaatcagtcataggccagtccaggttcaagggaggagtttcaaagcatatgcagtcattttagatctggtatatttctgagatagagtattttcatgtaaataaatattcctaaagaaaacaatctcacaaagaagttacagtctcctgacttaagtctcatttaaactcaaggaaggcttcaaatgccaaaaaaaaaaaaaagcaaaagttaagaggaatgtaatataaaagacacgtacaactttttatgtcttatttactcatttattgatttataacacaatgaacattataaattggtgtaggtcctctaaaattatgggcaaaaatttgtgtgatatgtctgctaagacaaaaccgaggcacagtaacttgcccttggtcacataaatagcaggtggtggggctggagacctagcatcctggcttcagagggaacagtgcagtgaggccctgttaataagtaacagtctgtctgtaaattcgggataagagtagtcagtgtcatcatggggataaaatgagctaggctagtccagagctgcacgtacaacaataggcgtttaataaatacaagctgtcaatgctcagcctctgttgtattccaggctgttctatctttcgccatagaaatgttggtgtcataaagcgcaagacccaacagggggtggatgggtgagaatttcaaaagtgtagctagagccaaagctggagatactgctttctccattgaactctttatggtctaatctttctcttgaaatcgtacgcaaatgtttcattgtattccgtgattcaattgctaatctattcatatacaactggtttaccccaaagctttcggtatcttttcttttttttgaggcggagtttcgctctgtcgcccaggctaaagggcagtagctcgatctcggctcactgcaccactgcctcctgggttcaagcaattctcctgtctcagtctcccgagtagctgggactacaggcacacgtcaccaccccctggctaatttttgtatttttagtagagacggggtttcaccacattggtcaggtggtctcgaactcctgacctcaggtgacccacccgcctcggcctcccaaagtgctgggattagaggggtgagccaccgcgtccggcctcttgatgaaaccttattacagaatagatatttatacataatatgtaaaacgcacagctaaaacatttatcttactaaagttggtagtaaaaacttttcaaagttactatagggaagtgcattgtccagacgtgtaaccgggaggtacttgggtaccccgcctgccaaggaaaccaatatcggatccccctactttagcgcccccgccaaaaaccgagctcacaccaaagcaccgtggttcctctcgatgtcagcggcccgcctgccctcggggcagcacctgggcaggcgtcgcacctcccgcctctgggcgggacggaagcaaagctcgcgcctcctgacgtcatcaccgcgcgccactgtcttcgccttcttgcacttcgcgggagaagttgttggcgcgaatggatcctgagcctcgataacagattcctcaaccggcccacccgccagccagccagcgccttcatcctggggctgcgatggtgagccgctgggggaggccgtgcggctcggggtctgggggggctttgcaggcctggtgt

SEQ ID NO: 31834 - DNA, 2300 bp, Homo sapien
atcaggcaattcttctgcctcagcctcccgagtaactgggattacaggcatgtgccaccatgcccagctaattttgtatttttagtagagatggggtttcaccatgttggtcaggctggtctcgaactcctgatctcaggtgatccagccgcctcggactcccaaagtgctgggattacaggtgcgaaccactgtgccgggcctcaatcatctttttttagaggtgaggatagtctcactatattgcccaggctggtctcaaaactcctggcctcaagcagtcctccccacttagcctcctaagtagctgggattataggtgtgagccacctcatctggcacagagaccaaactattaaccactctgcttctcattcatatgtgatacttcaaatatttaaaacatttatttatttatttatttattattttttgagacagagtctcattctgtcacccaggctggagtgcagtggtgcaatcatggctcactacagtcttgacctcttgggctcaaagcaatcctcccaccttggccttctaaagtgctgggactacaggcatgcacaaccacacccggttagtttttaattttttttgtagagatggggccttattatgttccccaggctgtaaaacattaaattttttacaggttatttggaggctatcgatttggtacaatatttctttctgtatgtgcatgtatttctttctgtatgtttatctttattccagaatcatgctgaaggtagtctatgcctttgctattttctttttcaggtttttctttcctttttaaaaataaatattgcctattcttcaagggaactttcataataattttctctttttttttttttttttattttgagaccgagtcttgctctgttgcccaggctggagtgcggtggtgcgatctcagctcactacaacctccacgtcccaggttcaagagattctcctgcctcagcctcccaggtagctgggattacaggtgcccaccaccgtgcccagctaattgtatttttaatagagacggggtttcaacatgttggctaggctggtctcaaactcctgaccccaagtgatctgcctgccttggcctcccaaagtggtgggattatagccatgaatcactgtgcctggcctttcgtaataattttcttgaactaaaatttgggattaggccaggcatggtggctcacacctataatcccaagcactttaggaggccgaggcagaagggctgtttgagcccaggagttcaggaccagcctgggggacatagctagaccccacctctaccaaaaaatcaaaaatcagctgggcatggtggcatgtgcctgttgtcccagctacttggaggctgaggagggaggattgcttaagcctgggaagttgaggctgcggtgagctgtgatgacaccactgcactccagcctaggctacaaagcaagactcttattaaaaattaattaattaattaaaaaattagagattagagaattttagttaagttaaataaataaaataaaaaataaaattagagattagaggattttagttaagttaaatgtattaaattgaaaagtatttcatttttccatccacaaagtgctatattttctcattcaagtcttctctcaaatctaccaatacatttttgcaattttcctaaaataggtaacatttattaagattgttcttagatgcgttataattttgtggagaagtgtaatttcttattgtgttttctaattctttactattggtatgtaggaatgctatatacttgtatatgttatttttcttgatatatgagattataaaattaccacacaaaaactctaaaaatagaaaagctatataccttattcaataatgttcaaaacattcagaaaagatttgggtcaatatgaaaggctacacggaaaataatgtgattttaatccagtgtttacatatgtgttagttacacattcaaactcttgtcaccgatgcattttcatctaattttttccataatgagagagaaggagacgcgttggtgactgcaatagggccacctccctcaaattacgttgctctctatgacccatcctcagtctcccagttcaagctaatcattgacagagctttacaatcacaagcttttactgaagctttgataagacagtccagcagttggtggcaaatgaagccaggctgtgcggcaggatctccagggaatgaatggattttcttcagcactgatgaaataaccacacgctataggaatacaatgtccaacgggggat

SEQ ID NO: 31835 - DNA, 2300 bp, Homo sapien
tggcagatggcaaacgggcagtgatatggttttgtaattaaactatgaaagatgacacacgaaaaaacaattagagggaagatatttaccaaaggttaattatagttttttcctggtgtatttaaattctgtcatgaggggaaaaagaagtactttaaaacaagtacttaacttttactttcccttattaatcttgaatttgggaatgtttttcttaagggctttgttttagtttggactcaagggcctagcaggcaattattgccactagggaaaatgaaacccaagtcatgactacattgtgtttgtatagcgctttagagttcccagagcaccttcccagagtcactgagtcctcacagcacacctgtgaggtgggtgcgattactccgtcactatatagttgccaagcctgagtttcaaaggggcagaactagaacaggagtccagggctctctccttcgtggagagacacagaatgagactctgtcagatccaagtgtcaaccttgggagtttctagggatagtctactgtcctttccacccataacccatttattcatctgttggatgaataaatgctatgttctcacaggcacatgggtcggggagacatgatggatgcaaatgtgttatcacttgaacttttcttttcttttttttttttttttgagatggagtttttgctcttgttgccgaggctggagtgcaatggcatgatctcggctcactgcaaccttcgcctcctgcgttcaagcgattctcctgcctcagcctccagagtagctgggattacaagcatgcgcctccacgcctggctaatcttgtttttttgtttttttttttttttttagtagagacggtgtttctccatgttggtcaggctagtctcaaactcccaacttcaggtgatctgcccgcctcagcctcccaaagtgctaggattacaggcatgagccaccgcgcccggcctggattttttaaatacaagttagaaatttgcattcagcaaaagcaaggggtcattgcctaccccaccgcaccagcctttttaaggaattgtgcctggggtcaacctcctcttctcagtgaaatctctacaacaggaatttcaactttgtcttcaatttatggcagggtttagaatctcttttgtaattgcttttaattgagtgtaccaagccaatttcctgatgcatttgaacagaatcacttcaaaccccaccatatataacctagggtttaaagttaaatgaactggaaaatggcttcccaatgttttctcaaacaacttgttttccaagccaggacctgggtgtggctccttctctgttttctggtctccttgggagatttcaagggctggaataggcctggcgtggtggcctgtaatcccagcactttgggaggcagaggtaggcagatcacttgagcctccatctgccagcgcatgcttgacctaaatgagcttgtttttcacagcccgagtctgtggcttcgtccccacagttcagcgatcctcatctgtacgtgtggaacgccactggcaacagactgttgcaccgagtggaaggggtgaggctgaaaacacgacccgctcaatgcacagattttgtaaacatcaaaaaacaacttgagatgttggcaagaatgaaagtcacccactaccggtttgctctggattgggcctcggtccttcccactggcaacctgtccgcggtgaaccgacaggccctgaggtactacaggtgcgtggtcagtgaggggctgaagcttggcatctccgcgatggtcaccctgtattatccgacccacgcccacctaggcctccccgagcctctgttgcatgccgacgggtggctgaacccatcgacggccgaggccttccaggcctacgctgggctgtgcttccaggagctgggggacctggtgaagctctggatcaccatcaacgagcctaaccggctaagtgacatctacaaccgctctggcaacgacacctacggggcggcgcacaacctgctggtggcccacgccctggcctggcgcctctacgaccggcagttcaggccctcacagcgcggggccgtgtcgctgtcgctgcacgcggactgggcggaacccgccaacccctatgctgactcgcactggagggcggccgagcgcttcctgcagttcgagatcgcctggttcgccgagccgctcttcaagaccggggactaccccgcggccatgagggaatacattgcctccaagcaccgacgggggctttccagctcggccctgccgcgcctcaccg

SEQ ID NO: 31836 - DNA, 2300 bp, Homo sapien
ttaaaaataatttattgtaccacaagtagctattggtagagatgaaagctaaagcagaatgatggaatacagttgatgaaactttaagaagcaatgtagcatgtaatcctcatagcttactgtcaggatgaagcctttatgtttacatccaagaactgagttcactgatgtcaacacctaagggaatgttctttgaaccacacagcagagacaattgtcatcaccttggttacagctgtatctcagattgtctttctataatacaggtatatctcctgtaagttaccagcatatggaactgggatgaatttttaaactgtctatcatgcagacagatcagtttagctaacaactctcttgcctttctttaatggtatgtgttgtaagttttttgctttccaaaactttcttctcttctgcctttgaaaaatggcaattgataagagtagaaccagggtggagaagaagcaacaacccaggaatatcagtggtttcttctgcacaaggaataagcagacagtgcactctgtattttcttgggtctgactgcatctagaactactgttctcaaaagggaagcccctgctgctgatcactttgttgtaaaattgtattgaggatttagctttaaaatcagatgtgaagaatccaaatctgggtttagatttctcttcagccagtttgaatgcataatagcctttgattctgactttatcaatcaggtatgctgaaaaagataagaaattaacattaatcacaaatggactatgaagtatctttgaggaagaatttagttttcattgaaacaagctaaaattatgcccataataaaggtagtgatttttattagagggttttttttgacatttattcttttatgatctatgtaaaggagaaggtgaaaatatgtataatttaagtctgaaaaatttgtagtgaaacttgatccataaataatccaaaaactcttggaggaaaaagcaaatttaaggagcagagcaatgaaggttgtcacttttgtttaaagggtcacaagcagaaaaacgttgcctatttggcctgattgtgaacctcagatgtgctcttggtgcagcccaggaatcacagttggttttacccactcactcactgtcgctcgcttaagctaccatgatgtggttatttcacattgcatgcttgtatcgaaacatttcatgcatcccataaatttatacacctgtttacccacaaccatttttttaaagcctagcaagcatggtgaaaataagtaacccaaaatagtgactgtttatcctggggagtgagatttcaggtgattttttaaaaacttctccacgtgcccagttttctataattggtgtgtgttacttttatgattttaaaattttttcaaaaatcccataggccagttttcaggacaaaattcaattgacaggacttgggtgccacaaattggatgctgtcaggcaccagcctgctgctcccattctttgttcttgtcaggtaacaggaatctcgctctgccctgtgtctgaaggggccccgcccttacctttcagcacctcctgaaggtacttccctaggtagtacttccggagccggtcatcctccagagcctggtcgtcgatgccactggcggtgatgtaaatgtccatgtcgccgtagttcctccggacccaccgcagcagcttgcgcaccccccagggaatcacagccaggcgcgtgggggagctcaggcgggtgatgtcctgcagaaactggatgtccctgtccgagtcgtagcggctgccggccagctgctcgtgcatcacgaacctagtggtgaagtggttgagcgcgcagaagtcgaccgtgcccttgagcagcctcctttcggcctcggtgaggcgcggcagggccgagctggaaagcccccgtcggtgcttggaggcaatgtattccctcatggccgcggggtagtccccggtcttgaagagcggctcggcgaaccaggcgatctcgaactgcaggaagcgctcggccgccctccagtgcgagtcagcataggggttggcgggttccgcccagtccgcgtgcagcgacagcgacacggccccgcgctgtgagggcctgaactgccggtcgtagaggcgccaggccagggcgtgggccaccagcaggttgtgcgccgccccgtaggtgtcgttgccagagcggttgtagatgtcacttagccggttaggctcgttgatggtgatccagagcttcaccaggtcccccagctcctggaagcacagcccagcgtaggcctggaaggcctc

SEQ ID NO: 31837 - DNA, 2300 bp, Homo sapien
tttataatagatgtacagggtgccattatcaggtgcattctagaaggtataatgcaaagaaaaccatttcagcatgaactttttatcttgaggggagagacggtgggttggaaagaataatgacatacattatggcagcagacagaaaactcagaaactacatctttttctatcccaacaaggggtcctgatggtgagatgtgactaccaactagtactgcaactgtagatttcctatcttaaagaattcggaaggtatgaaaattcatcattagcctactttttaaaagttgtacccatctagccatgcatggtggctcatgcctgcaatcccagtactatgggaggccaaggtgggaggatcacttgagctcagcctggacaaaatagcgagaccccagccttgattaaaaaaaaaaaaaacccaacaacagaaaaaaacaaacatgttgtacccatctggtctttgctctcagctctatcgcttaaagacccacagatgcctatttttgccaagttcttgcgtattacaccaaataaaatacatgacccattctctgaaagagacacttacgctgtataaagcacaggtttgagaaacctccctttccaaaacaaggaagtctgatacatctgcttaccagtgtaacacccttgatcatgttctgtacatgactacaaatagtccgaacggtagccagttcctttctgttaccccaccatttgtcaacccggagctgtaacagaacaaaaaatgtattctttccagaaatatgcaggcttaaaagacaacagaccacttaccgaattactttaagattctagaattaacccttatcaaagcacatggttttcaactggaaaaatccaaccacctataaaacctcccaacagttaagctttgtagaagttgcaacaaacttcccttctggaaaattaaatcatcaggtttaaatgacctactgccggttcctgtgatttttacaaagcaatcactaggaaaataaaccaaacttctaacaccattaagacgtgtcactgatgaccactattacatttgagctttatataattggctgtgttcagaatctggtttttcaatttcactgaacaggctggtattctggacagcaacatttaaagctgaagcactgaaccttaattcgaaaattgttaaagcaaccaaatgtgatgctgttataaaccaccttccaacgagcaactgaattatcagaagaaaaaccctcaccctcttttttttctttccaagaaggctgagttctacattgatgtgattgaagtccctccgcagggttcctctggggcccttcacgataactgtgcgtcccttcagagtaatgtcgactagaagagagaacacactcgtcaggccacacaacgcttggaacgtgcagtaaagatgtaagtaaaagacatcaagtctcataccattttctggaatgtcgacagtctgattgctgagaatagtcttcattctgaaacacaaacactgggggtgaggccgacgcaaggcccgtttttccaccaaactacgccgcacagagctccactcctactggagactgccaggcggaagttccagacaagatgtcggaggacgggagaccgacagcgggccccagtgtgtcccagcctggaaggagcagccccaaagcgagaattacgaggcccagcagtcgaactcccactcagcccaaccctggaagtcctatgcgggcggtgccatcccggcaagactgaggggcgggaataggccaaaaagcccacaacaggattcgcatctggcgccgccaggctcatatggcgcttgccgagctgggggacaaacaggacaaggttccgagagtgggagccgcgccgcagcctttcccagagcagatggtttcagattcccagtacccccacgagcacagaaacatccttacctcgcagtagacgcagcaaagaaagaacgtctgtcgtcattacgtacttgtatcgcgtaaggggcctgcgtattgcgtcatgagtgcgcgacgcacgtaaggctaaagcagccaatcgtggagcagcttggctgcttgtcataaatggagcgacgtaatttcgacctgtcctttcccgggagttagcgatccctcaacccctgcactgcgctagtcctaaagaggaaatgtctctacgctgcggggatgcagcccgcaccctggggccccgggtgagcggcggggcgaacgggtttgggcgtggggtggggggatcctatcccttcagagcgcccatgcccaataataaaggcc

SEQ ID NO: 31838 - DNA, 2300 bp, Homo sapien
tttttttttgagacggagtcttgctctgttgcccaggctggagtgcagtggcgcaatcttggctcaccgcaagctccgcctcccgggttcacgccattctcctgcctcagcctcctgagtagctgggactacaggcgcccgccaccacgcccggctaatttttttgtatttttagtagagacagggtttcaccatgttagccaggatggtctcgatctcctgacctcaggtgatccacctgcctcggcctcccaaagtgctgggattacaggcgtaagccaccgcacccggcccgaaaatctctggaactaacatatatcacactttcatgtactccacctaccaggaactagatgtttgtctttcaacaagattgaactgcaataactgaagaaggtgccacagtttaaaactgttctggtcctgacttgaatcaggggcgtttaaagtgaagtgtgcaataaatctctcgagctttgaataattgttgaaacgtaggttaataatgcccaattagtttcagacaactggaaggttaaaaccaagcctaacgtttttactttctttttctttttttttttttgagatggagtctcgctctgtcgcccaggttggagtgcagttgcgcgatctcggctcactgcaacctccgcctcgcgggttcaagcgattctcctgcctcagcctggcgagtagctgggactacaggcgcacgccaccacgctcagctaatttttgtatttttaatagaggcggggtttcaccatgttggccaggatgaacgtttttactttctaggttacattgtttctgtgtttgaacgtggcagtcaagaacataagaaatcatggtattcggcttttacatctgaacacaaacgtgtatgagatagccaaaacactacaaaatccacgagtctgcacatgtatctcaaaagaaccttcgacaactcaaagagtgcctgttagggtgttgcacgattgctactgcacttctcaatgtctgccgctgaagcctagcggacaggtttgtgttctctgcggctagagtggtgtctcacacacagtaagagtccaagacagaatagctatgtggggtgctcactgcagtgctccataaatatagggtacaaaccactctaagcagaaaataagtcctcggtgctggcccagagagacttgcaaacaaactgatgccagagactctatatcatggggctggcgggataattacatgagattacacgaaaaacgtttaaaactgccgttggctagtagtaaatgttcagtaaatgcactggcctttattattgggcatgggcgctctgaagggataggatccccccaccccacgcccaaacccgttcgccccgccgctcacccggggccccagggtgcgggctgcatccccgcagcgtagagacatttcctctttaggactagcgcagtgcaggggttgagggatcgctaactcccgggaaaggacaggtcgaaattacgtcgctccatttatgacaagcagccaagctgctccacgattggctgctttagccttacgtgcgtcgcgcactcatgacgcaatacgcaggccccttacgcgatacaagtacgtaatgacgacagacgttctttctttgctgcgtctactgcgaggtaaggatgtttctgtgctcgtgggggtactgggaatctgaaaccatctgctctgggaaaggctgcggcgcggctcccactctcggaaccttgtcctgtttgtcccccagctcggcaagcgccatatgagcctggcggcgccagatgcgaatcctgttgtgggctttttggcctattcccgcccctcagtcttgccgggatggcaccgcccgcataggacttccagggttgggctgagtgggagttcgactgctgggcctcgtaattctcgctttggggctgctccttccaggctgggacacactggggcccgctgtcggtctcccgtcctccgacatcttgtctggaacttccgcctggcagtctccagtaggagtggagctctgtgcggcgtagtttggtggaaaaacgggccttgcgtcggcctcacccccagtgtttgtgtttcagaatgaagactattctcagcaatcagactgtcgacattccagaaaatggtatgagacttgatgtcttttacttacatctttactgcacgttccaagcgttgtgtggcctgacgagtgtgttctctcttctagtcgacattactctgaagggacgcacagttatcgtgaagggccccagaggaaccctgcggagggactt

SEQ ID NO: 31839 - DNA, 2300 bp, Homo sapien
aaaaacagattctagggcttggttatatctgaaaataatgcacaataaaggaacgggacgttaaaattatctcaaattttcaattacctttctcctttctggcgttttaggtttcctttatattcatcccaggtgctcctgtctgcaagatcaccagatacaaaatcttgaaggtctggtccattctgtaggagttccttttttttatctggcaaggagcttaacggtctgactgggctgcaaaaatatctcccaaatacctaaagaaagagttaattatgacgtttatttagtggagtccgtaataatttagttttaacccatcataacacctaaacggaagggtaaagccaaaaaagtgattcagaaattatgtcaaactaggagctctagtattctagggcattagaatataaaagatgactgaaggaaccaaacctaaaagagagtaagagttgactgtttactactgagtttagaatagatttggaaatctgtttttttttttttttttttgagacggagtcttgctctgttgcccaggctggagtgcagtggcgcaatcttggctcaccgcaagctccgcctcccgggttcacgccattctcctgcctcagcctcctgagtagctgggactacaggcgcccgccaccacgcccggctaatttttttgtatttttagtagagacagggtttcaccatgttagccaggatggtctcgatctcctgacctcaggtgatccacctgcctcggcctcccaaagtgctgggattacaggcgtaagccaccgcacccggcccgaaaatctctggaactaacatatatcacactttcatgtactccacctaccaggaactagatgtttgtctttcaacaagattgaactgcaataactgaagaaggtgccacagtttaaaactgttctggtcctgacttgaatcaggggcgtttaaagtgaagtgtgcaataaatctctcgagctttgaataattgttgaaacgtaggttaataatgcccaattagtttcagacaactggaaggttaaaaccaagcctaacgtttttactttctttttctttttttttttttgagatggagtctcgctctgtcgcccaggttggagtgcagttgcgcgatctcggctcactgcaacctccgcctcgcgggttcaagcgattctcctgcctcagcctggcgagtagctgggactacaggcgcacgccaccacgctcagctaatttttgtatttttaatagaggcggggtttcaccatgttggccaggatgaacgtttttactttctaggttacattgtttctgtgtttgaacgtggcagtcaagaacataagaaatcatggtattcggcttttacatctgaacacaaacgtgtatgagatagccaaaacactacaaaatccacgagtctgcacatgtatctcaaaagaaccttcgacaactcaaagagtgcctgttagggtgttgcacgattgctactgcacttctcaatgtctgccgctgaagcctagcggacaggtttgtgttctctgcggctagagtggtgtctcacacacagtaagagtccaagacagaatagctatgtggggtgctcactgcagtgctccataaatatagggtacaaaccactctaagcagaaaataagtcctcggtgctggcccagagagacttgcaaacaaactgatgccagagactctatatcatggggctggcgggataattacatgagattacacgaaaaacgtttaaaactgccgttggctagtagtaaatgttcagtaaatgcactggcctttattattgggcatgggcgctctgaagggataggatccccccaccccacgcccaaacccgttcgccccgccgctcacccggggccccagggtgcgggctgcatccccgcagcgtagagacatttcctctttaggactagcgcagtgcaggggttgagggatcgctaactcccgggaaaggacaggtcgaaattacgtcgctccatttatgacaagcagccaagctgctccacgattggctgctttagccttacgtgcgtcgcgcactcatgacgcaatacgcaggccccttacgcgatacaagtacgtaatgacgacagacgttctttctttgctgcgtctactgcgaggtaaggatgtttctgtgctcgtgggggtactgggaatctgaaaccatctgctctgggaaaggctgcggcgcggctcccactctcggaaccttgtcctgtttgtcccccagctcggcaagcgccatatgagcctggcggcgc

SEQ ID NO: 31840 - DNA, 2300 bp, Homo sapien
aactcatcagattagcatttgtccttgtaatattggaataatttagaaaggcttaagagtgaatgttggccagatgtggtggctcatgcctgtaattccagcactctgagaggccgaggtgggcagatcacctgaggtcgggagtttgagaacagcctggccaacctggtgaaactccattgctactaaaaataaaaaaattagctaggtgtgttggcaggtgcctgtaatcccagctacttgggaggctgaggcacgagaattacttgagcctgtgaagcagagattgcagtgaggcgatatcgtgccactgcactccagcccgggcaacagagtgagactgtctcaaaaaaaaagtaaatgttgattttttacattggtgtgactacttcagaacctgcaaaatagttttatgctgattacatttagtccctctgaaaacaccaaggccataatgctgcctaagacatggaaatagaacctagaaatattaacccttatttgtatagtagcttgctaaatccacatgccctattcctttcatttctcacattggttgtattatatgatggtaaaggcctgagaaaggaatttccttccaaaatactaataactcagattcatcttttgactgaatcctgcctttctactttttctgcatatctaaaaggacacttttaggtggccatgttgtaaaatatgtaaagtggatagccaattctgttttgaattcttataacgagccagtattataaaagtaatgcacatccttgccaggtgtggtggctcacgcctgtaatcccaccaccttgggaggctgaggcgggtgaatcagttgagctcaggagtttgagactagcctgggcaacacagtcagacccccatctctaccaaaaatacaaaaaattagctgggtgtggtggcacatgcttgtaatctcagctatttgggaggctgaggcaggagaatcacttgaacctgacaggcagaggttgcagtgagctgagatcacatcactgtactccagcctgggtgacagagaccgtgtctcaaaaaaaatttttttaagtaatgcatgggccgggcatggtggcttaatgcctgtaattccaacgttttgggaggccgaggcaggtggatcacctgaggtcaggagtttgagaccagcctgaacaacatggtgaaacactgtctctactaaaaattaaaaaattagccaagtgtggtggcgcatgtctgtaatcccagctactcaggaggctgagacaggagaatccttgaacctgggaggcagaggttgcagtgagctgagatcacaccattgcactccagcctggacaacgagtgaaactcctcaaaaaaaaaaaaaaaaaaaagtaatgtatgtctttatagatgctagtaaattttgggatgcaaatttaaccctaccaactttcttttgttttgagacagtctcactctgtcaggctagagtgcagtggcgcgatctcaactcactgcaacctctgcctcctgggttcaagtgatcctcctgcgtcagcctcccaagtagctgggattacaggcgcacaccatcacgcccagctaatttttgtatttttagtagagatggggttttgccgtgttggccaggctggtctcaaactctaggcctcaaacgatctgaccgccttggcctcccaaaatgttgggatttgtgagccaccaccgggcctaaccctaccaacttaaaatagaaacatctcaagctaccttaacttattttacaggaaaaaaatggattacttttcaggctaattttgtgacatttctagatattatctaatagttaggccctttgcacagtgtaggccaatggcaggtaaacatttgttagcaggagactcatttggtgaaataaaattctcagccggcgcggtggctcacgcctataatctcaacactttgggaggccgttgcgggcggatcacctgatatcaggaattgacaccagcctggccaacatggcaaaaccccatctctactaaaaatataaaaaattagctgggtgtggtggcacgtgcctgtggcactgaggaggctgaggcacaagaatcgcttgaatccaggaagcagaggttgcggtgagccgaaaatgcaccactgcactccagcatgggcaacacagtgagactgttgtctcaaaaaaaataaatgaataggccgcgctcccgcccagggaggatgcgccgacgccccgagcgcccggccctccgcagcagcccggcagactgcctctgtcatcaggaccctccgtc

SEQ ID NO: 31841 - DNA, 2300 bp, Homo sapien
gtattttgggagagtcacaacaaaccaaaccgttccaaaactactcttcatgtaaaatttcataaattcaaataaacattccaacccagaaggggtcactaacaaataacaaatgccctactacaatctaaacggaatataatccttctagccccagctctctacagcatattttgcataggtacccaggagctaacgatgggcattatagttggatacatcagcttcacacattttaatcatttccagaaattaaacagtaaaagatgcctgaccagagaaaaatatttaatcagtaagaaagccggtattaattttatgtctaagggttatcatgtaaagctgtggaagtaaacaagaaggaagatggattatgcttatccagttatagattttgttagaaaaaggagtacagcaacgggagaagaaatgagatcttttcaatcagggttgtctaccccttaccttaaactggatcctggccactaataagcacatctcagagcagacagtcagctctttcatttccagaacccccctgaagaaagactactgttctccatttcttaagggatttgaagaaactcaaaggctcactgtgtctttgaggtctgtcgatagacagctactgctctgtatgcccatgaatagatccctaccagcgaacccctcttttctctatactagaattcctaaccctactaagttatcttcctatatatttataggacgtataatttttcaagatctcacacaaacatggtctcccgaggcacccaggaaaggccttccccgacatcaaacagagcaattctgtggtgtagggggccaacaatggattccaggacatcccggacagatatcacggcagtcttagtattttgctctcaagagggctttctggcttcgtttctctttggtttcttaagaggggcggcatgagaaaagcaggagcccctcaggtgagcagactcttaaacacaaacaaaagactacgactctgcggccaaaatgaggtccccaacgagagaaccgcttcctgtggtgggcgttcggctttggaggcggcagggaaatctcatccaagtcaggaaagtgggtaaaggcagaaagagaaggggctggaagactcacgagtcttgaataagaagcccagacgaccacatccccaggacagcagttccaaaatgcggttcccgccctaagccccaaagagacgaaggtcgtgagacgggaagcccgggacccagcgcagcgagcgaccgggagcagcgcgcacaccccagccccgctccctccacatcccgcccagacctgggagcatcccgcccgggcggcggggccagcctgggagcggcgcttacccacttcccagcagcaagcgcagggaccgctcctatcccgatcgttcggacagcaccttcctacgggccgcgccgccgcagcttctccacccgcgccccgctcgatctgagctccctctcggcgcacgcccctccctcaggctgccacgcgttacactctgagtcccgggcctgagcccgtatttaaaggcttttgcctgcgaaggcggaggcttcattcccccgcagccaggccctcctggattctgccctcagctgcttcctagctccccctcccgctacacaaggcccagggccaggtccctatttccttcacggctcaggggcggggagactggggctggtcctggctgggagggcctgccccgcccctggcctagctgggcaaatccgctttggccagctcagcggctccgcccctaccgcgagcggcgctgggcggggctgcgtgcgtggcgtgtccgctggaccaggggacgggggcgcgccgcaggtgtaggagctttgcgcgcctacctggcggtcgtgggtcgaggaggggtcaagaattgttgtctagcagccctctccccgctgccctgtcctggccgaggcaaaggccgcgtgcgctccgcgtctgccaggctttagggctgcgcggacactgggtgggtggtgggccgaggcgaccggaaggtcctggccgcctttccggtctcctcagcaccctggagcgccgccctcgggtttcggtctcctggatctgcgggtcggtctcggcgggcggattactcctcgcccacaacctcgaggccccggggtcaaccgcgccctccgggccggcaacccagggtttagtcagattcctcctgacccaccgcttctgggaaagaggcgcctcccgtcaggaggatgctgagttcctcatgactggaccagtgagtgtccactccctgg

SEQ ID NO: 31842 - DNA, 2300 bp, Homo sapien
gctggcactgaaaattgacttaatttctgaaatcctattaaccgttttgaagagtctgattctaccaaaatactaaaaaagaatgtgaggtgaatactaaatagaaaaatgttgaattcaaaatgaagggactaagataagtggtttttattacaaagcaaactgtattagataacttaaatctatgtatgttcaaaaagatgtacttgtcatatctagtgcaattacttgtttacatatctcttctacccaacctgtgagctttgcaagaaggaaatgagtcttttttgtttggttatttttctgagacagtgtctcgttctgttccccaggctgcagggcagtggtgtgatctcggctcactgcaacagggagcctcctgagcagctgggattacaggtgcccaccgcctcacccggctaactttttgtatttttagtggagccggggtttcaccatgttggccaggctggtctggaactcctgacctcaggtgatccgcccgctatggcctcccaaagtgctgggattacaggcgtaaaccaccgtgcctggccaaaggaattgagtcttaatcccttttgcatcttcagtctttaggataacgtctgacacacaacaggcattaaatatttgttggatgaatgaactgaactgcatagaatgcagaaagcctacatatactggccaggcacagtggctcacacctgtaatcccagcactttgggaggccgagacgggcggatcacctgaggtcaggagtttgagaccagcctggtcaacatagcaaaacccggtctctattaaaaatataaaaattagccgggcatggttgtgggcgcctgtaatcccagctactcgggaggctgaggcaggagaatcgtttgaatctggaaggaggaggttgaggtgagccgagatcgcaccactgcactccagcctcggcgacaagagggagactccgtctcaaaacaaccaaccaacaagcctacatatcctgccacacgtgctacaatccacagcaaactgtttcatccacattcaaccactttcttaaagtcaccatcatgatcctatcaagaaaaccgtaatttatatggtattttaatgtgcctttataaattactaatcactttcttcatgatgtatgttaaaatggcttatgtcacctgatgtaatccttaatgagggaaataaaaggccatgattatgcctggctttttttcttatatgttagatttgagtgttaaaatgacctcgaagcggcgaaagaaaggaacggaactgccctccacattaaaaatgagcaggctccataggttaattttactcttcctcacgcacggcacttacatgttgcaaactctctgctccacagcacgcacagacatcccaaatcccggattgggcctgaggaacatctctgcaaagagcgccaggagggcgtgggggtcccgcctctctcgccagggaccagggagtggacactcactggtccagtcatgaggaactcagcatcctcctgacgggaggcgcctctttcccagaagcggtgggtcaggaggaatctgactaaaccctgggttgccggcccggagggcgcggttgaccccggggcctcgaggttgtgggcgaggagtaatccgcccgccgagaccgacccgcagatccaggagaccgaaacccgagggcggcgctccagggtgctgaggagaccggaaaggcggccaggaccttccggtcgcctcggcccaccacccacccagtgtccgcgcagccctaaagcctggcagacgcggagcgcacgcggcctttgcctcggccaggacagggcagcggggagagggctgctagacaacaattcttgacccctcctcgacccacgaccgccaggtaggcgcgcaaagctcctacacctgcggcgcgcccccgtcccctggtccagcggacacgccacgcacgcagccccgcccagcgccgctcgcggtaggggcggagccgctgagctggccaaagcggatttgcccagctaggccaggggcggggcaggccctcccagccaggaccagccccagtctccccgcccctgagccgtgaaggaaatagggacctggccctgggccttgtgtagcgggagggggagctaggaagcagctgagggcagaatccaggagggcctggctgcgggggaatgaagcctccgccttcgcaggcaaaagcctttaaatacgggctcaggcccgggactcagagtgtaacgcgtggcagcctgagggaggggcgtgcgccgagagggagct

SEQ ID NO: 31843 - DNA, 2300 bp, Homo sapien
tgtgtgaaagaaaattagaaccacgctgtatttacatttaccttggtagtttatttgtggatggcagttttctgtagttttggggactgtggtagctcttggattgttttgcaaattacagctgaaatctgtgtcatggattaaactggcttatgtggctagaataggaagagagaaaaaatgaaatggttgtttactaattttatactcccattaaaaatctctaatgttaagaaaaccttaaataaacatgattgatcaatatggcagatgatttacagtccattatatgacatttgtaagccactcaacactagccttacaaggttcatgaaaggaggaaaacattaattctttctgcctttgctgatataatccacatagtaataatttaagctataatttatttttaaaatgagtgcctcttgggaagcttcttttctgttctaacagttccctgttaaaatgaaaatcttaggccagtgcagtggctcacacctgtaatcccagcactttgggaggctgaggtgggtggatcacttgaggtcaggagttcgagaccagcctggccaacatggtgaaaccctgtctctactaaaaatacagaaaaattagccagggttggtgcatgtgcctgtaatcccagctactcaggaggccaaagcaggagaattgcttgaacccgggaggtggaggttgcagtgaaccaagatcgcaccactgcattccagcctaagcaatagagcgagactccctctcaaaaaaaaaaaaagaagaaaatcttaaagctgtattagggcctgttaggttactgatatttgaatgcctatttacttatttactacattgagtcttttgttatcctctgacctataaaatattttaataaattactggtttacttcaagggaaaagaaggaaaatgagaaacatacatctttttttcactccttatctcattcctgtttggtgatgggatggattggggtaggaaggaatgttaatatgagagaaattttaaaatgtataaaaaagtaaaaggttgtattgttttgctcagtttgaaataaagtgaataccaatagcacttaaaaatgtctgcatgggctgggcacggtggctcacgcctgtaatcccagcactttgggaggccgaggcaggcgaatcacctgaggtcaggagttcgagaccagcctgaccaacatggtgaaaccttatctctactaaaaatgcaaaaattagccaggcatggtggtgtgtgcctataatcccagctactggggaagctgaggcaggaaattgcttgaacctgggagacggaggttgcagtaagctgagatcgtgccactgcactccaatcagggcgacagagcgagactctgtctcaaaataaataaataaataaaaatgtctgcatgacccatatggttatgaagtttttttcctagcaaatgattgcagattatttatgggggctagaagatattttgctatcaatgtaaggatttttttccccttaggtcagtctattcactgtttagatctggtaaattacttgtatgaattgaataaattctctgtatcattgtactgtttaatagtctctgatacaattgtgatactcataaggtattttcccccctttattatgattacattctagatcataaacattgtaagggcatcttttcattatataatccaatattgattgtttgaattcctccttgtacatcctggctttgtgctcaatttcttgaaataatataaccaactctaaattacttgtgttaatagatcggtaacatgacacaggtaagttaaatcctggataaatgagccccacagaataaaggtttttcctcttgctgtggcctactggaagccttcctaactctatagctggtaaagtagagcagaaagggccagaatggcttaagatggagctaaatccctatagcattccattttctgctcttgcctcttgaacttagaaggcttgcccatatatcctaacaatctgttctctgagctgttaggccaatccctggcaagagatattgatgtagtcactgaatctatggctcacaaataattgaaaattggctttgggagctgggcgcagtgactcatgcctgtaatcccagcactttgggaggctggggcaggtggatcacttgaggtcaggaggttgagaccagcctggccaagacggtgaaaccccgtgcctacaaaaaattagccgggtttggtgacacggcctgtagtcttagctactcgggaggctgaggcaggagaat

SEQ ID NO: 31844 - DNA, 2300 bp, Homo sapien
gaagacatttgtatttatgggctgatggcagaaggggtagccaatcacctgtatagattcataattcatataagattaataataaattaatagatacaagtcaataaatacaaactatacatagtttaatactattgtgaatgtaatcaatatcagaatttttcatagctcaagagaaagagtaattctgaattgtagacttaacagtattttttccttcctcctagatttaaacagtcaagtaaaatcaagctgggtaatcatggcagaaggtggatttgatccctgtgaatgtgtttgctctcatgaacatgcaatgagaagactgatcaatctggtgagatgcaacaggacaatcctattctgaactgatctgtatcccttgtatcctcttttcatgaaaatactggttattggagggttttcatctgatggtcactaaagagtatttcataattgaaattccacatttgtttaagttgtaatgattaaaatgtgaccgggcacagtggctcacacctgtaatcccagcactttgggaggccaaggtgggcggatcacttgaactcaggagttcgagaccagtttggccaacaaagcaaaaccccatctctactaaaaatataaaaatttgccaggcgtggtggcacacacttttaatcccagctactcggaaggctgagacacgagaattgcttgaacccaggaggcagagattgttgtgagccgagatcatgccactgcactctagcctgggcgacagaacaagactctgtctcaaaaaaaaaaaagtttgctagcaattatttcattagagatgaaaacagactaccgtctttattattgttattattattattattattattttgagatggagtctcgctctgttgcacaggctggagtgtagtggtgctatctcggctcactacagcctccacctcctgagttcaagcgattctcctgcctcagcctcccgagtaactgggactacaggagtgtgccaccacgcctggctaatatttgcatttttagtagagactgggtttcaccatgttgcccaggctggtctcaaactcctgacctcaagtgttctgcccaccttagccccccaaagtgctgggaatgcaggtgtgatccacctccccagcccagactactgtctttatggtagatttatgttggtgacatttgccatcatgggtagataacacatatgtatattgccttttctactttatatcaatacaaataaaattgtttttagctgtgtggagcttgtttgcctgctaagctgctattgacagttcctgttatgatatagttcatatcctacaccaacatatggcatgacaatacgaatctctatgtaaagcatttcttttttttttttttttgagacagtgtctcactctgccacccaggctggaatgcggtggtgcgatctcggctcactgcaacctccacctcctgggttcaagtgattctcctgcctcaactttgcaagtagctgggattgcaggtgcgcaccaccatgcccagctaatttttgtatttttagtagagacggggtttcaccttgttggtcaggctggtctcaaactcctgacctcaggtgatctgccaacctcggtccccgaaagtgctgggattacaggcgtgaaccactgcgcctggcctatgtaaagcatttctgaaaacaaatcaattatttgacagaggtagatttctgaacaacaagatttgaatagtctcattgagtcgattgtagtgagtctataagcttaaatacagggctgtttatattatactttattattgttattattattttttatttattgtttttgagatggagtctcgctctgtcacccaggctggagtgcagtggcgcgatcttggctcattgcaagctccgcctcccaggttcacgccattctcctgcctcagcctcccaagtggctgggactacaggtgcccgcccccatgcccagctaattttttgtattttttagtagaaatggggtttcaccatgttagccaggatggtctcaatctcctgacctcgtgatccacctgcctcagcctcccaaagtgctgggattacaggcatgagccaccgcgcccagctatattatactttatactttttatgtgcaaaaggaaaaatttgaccattattaacagtgaagtatattcttatattacacattatactggttgagtatcccttatccgaaatgcttgggaccagaggtgttttggattttttttgcattttggaatatttgcattatact

SEQ ID NO: 31845 - DNA, 2300 bp, Homo sapien
taaattattactcaaaaaagaagtactagaatgtgaaaaagcaggttatgtactgaaaagcatatgtggtatgataccatatttgtataaaatatataaatgcaaaaaagtagtttagaagggtataaactaacattttggtgatctttgggtggcaggattattgatttttttttcctatctgcttttatcaacatcttctctattacacaaagtatttcgtataaccaaaaatattagttataggctagcataaaaggtaaaaagctgaaaaagaacttcaagaaatctttccttcttctaaatcagaaggattccaactacagtagtaagaaaaaatatctcaacggcaaacactggagaaaagattcgttaaggggttcatgttataccacaaggacatacccttcaaggaaataatctaaactcataactcttcctgggtttgataaggagcaattaactatcacgtactgttgttctttcttgctgttaaccactgaaacacctcaattaatgagttctcgggggtgaagcggtgttcttaaacaccacgttggaaaaaaaaaaaaagttaggacaaaaaggtttggttttctggtcgcagtgctgtcgacggccgcggagagcggcaagttcggagcaggctacactaaaggaatctgcgcggccagccaccctaagtggaagggaatgcaaagcctcctgcaacctccacagcgctgggcagcaagaatgcctcctaagcgtcccaacactccaacacctggaaggtcttacgctttccaagttataatatgtacagctgctgtttctgacaataacacacacaaactggaaggtctcttctgcaaatgtagctattacgtgtgtgaagctcatccgactctctcgatgcaaaagtaacacattctattaaggccacagcctcggttttgccaactggggcaactgaaaacatcctaccgactctctacagctagcaaaccatctcggctaaaatcctggcacatataaacagccactttggtgaagtctgcctttaaacagcaacacgggacttcgggtagagccggtaaccagtttatcacacactattagttccaataaagggtgctgctacctctttactgtcagccttggttccacttactgagcaaacagaaaaaggggatcctttaaattcgcgacacaataggagctaaaaagctctcgctttcagggtgtcagctttctcgtctcacttatcacaacaaaggacgcatcctagtgacttcaccgtacccagaaagggctgagggagacggtaaacaagatagtgtggatttcaggatttgtgagtttttccttccagctacgactctctttttactccatgatacgcctccacccgtcgacaatctgatcctaaaaataaaaccacccgtggctaccttgcccttgcctgcaaagccccgactctgacatcctgcagagaatacccaattgcaggctcttcgcgggggacgcgggctcggcagcagcggagcttctcccggtgcagaatcgccagcccggccgaggaaacgccaagcccgagaaacagccctgttctgccgcagccgccgcagtccccgagagcctgaggagcccccaggaaaaactggggcgaggggagggtgagccagcaaacgctggtgggagagggggagacactcacccgcccagacaacaaccgatggggcggggaggatgggggccgggaccgaggctcggcagaaagaccgcctggagcttccagaaggctgcggctgctccggacgctgctgccactgccgtttctggccgccggcttcctccccctcctctgttttgattcgagtgaccacgtcactcttagccacaagacccggatctgccggctcccgcgggcggcggcgcaacagattgcagcgcctggagactccagctgccccgcctgccgagcatgcgcatgcccagcgcctgccctgtgcgtcccgggaagccgggcgggagcctgcggcttcggacgcctacgacacgctgtgcgtgggggcgcggagtgcgggggatgtagttccggttgggaggggcgtggctgaggactgtgaagcaatcggggcgaggccgggtgtctgttcaactctcccgcgtatcgtctgtttcttcggcggcggacagtgttctgtaatgtgtctcccgttgcccgagctaaaggttttcctcgacggagtctttagaataccgtggtagaggtagacgcggttacaaattgatgtctgttgagacagtctacccct

SEQ ID NO: 31846 - DNA, 2300 bp, Homo sapien
aatcccagcactttgggaggccgagacgggcggatcacgaggtcaggagcttgagaccatcctggctaacatggtgaaaccccgtctctactaaaaatacaaaaaattagccaggcgtggtggcggcgggtgcctgtagtcccagctactcgggaggctgaggtaggagaatggcgtgaacccaggaggcggagcttgcagtgagccgagatcgagccactgcactccagcctgggcaacagagcaagactccatctcaaaaacaaacaaaaacaacaacaacaaaaacaacaacaacaaaaccaagtactgagaattttgcaacaaccagtacaattctagttttgtaccatactgttctcttaaacacagctgtgttctcaaacacatacgtgcccatgggtgcactcaagcataacagattttgtttggagttgcacaaattaaagaccctttggtacagtgtcagctcattagggcaccagattccatctcaaactctgaatttgagtaagcagagttcaaggttgcagattaagggccaaaatctttattctttgtatctactttgcaattagttaactgggaaacacttcaagttttaccagaaacctttaattttctagaaacctttacctgtgttcaatatccactttaattaaaaagctcttgtaaatgatacttatttggggaaggtgattcagcttgtcgaggggtaattaaccaaattgctgaggtggaagtctgggtaagtgaaaaggtcatcaaatctgagtaagaaagcttgcagctttcacctctccgtcaagactggcagagaggcactttcgtaaaatctttgtttgggattcacttttacttcgccacttgtcccattttaattaaagcttgccaactgaaggacctaagaaaacaatatagttctgcattttgccaaattgggaaatttccagggcccccaaaatttagcggggagactcagagactagaatgggagaataggaagcaccaacttgctctaaaaggaagattgggtaaaagcagcactcttattccagctctacaaccaaagcaactaagacttgggctggctggctgcctagccacagcattccctcctacttccccattatctcctgaccagcaagtcatctttggtcacatatctttaattatttagtttgagacaaagtctcactatcacccaggctggagtgcagtggcgcgatctcggctcactgcaacctccgcctcccgggttcaagcgattcttccacctcagcctcccgagtagctgggactacaagcgggcaccaccatgcccggctaatttttgtgtttttagtggagatggggtttcaccatgtcggccaggctggtctcggactcctgacctcaagtgatccgcccacctctgcctcctgaagtgctgggattacaggcatgagtcaccaagcccgactacatattccttttattaatattcctgttgaacttaattttggtcgtttccggtgcaaaaatgttaaggtaaagggaatcaataacagccacatttgatgtatttttgtaatccccatctccaatttccatccgggcctgagtaaccaaaaacactttacaggggtagactgtctcaacagacatcaatttgtaaccgcgtctacctctaccacggtattctaaagactccgtcgaggaaaacctttagctcgggcaacgggagacacattacagaacactgtccgccgccgaagaaacagacgatacgcgggagagttgaacagacacccggcctcgccccgattgcttcacagtcctcagccacgcccctcccaaccggaactacatcccccgcactccgcgcccccacgcacagcgtgtcgtaggcgtccgaagccgcaggctcccgcccggcttcccgggacgcacagggcaggcgctgggcatgcgcatgctcggcaggcggggcagctggagtctccaggcgctgcaatctgttgcgccgccgcccgcgggagccggcagatccgggtcttgtggctaagagtgacgtggtcactcgaatcaaaacagaggagggggaggaagccggcggccagaaacggcagtggcagcagcgtccggagcagccgcagccttctggaagctccaggcggtctttctgccgagcctcggtcccggcccccatcctccccgccccatcggttgttgtctgggcgggtgagtgtctccccctctcccaccagcgtttgctggctcaccctcccctcgccccagtttttcctgggggctcctca

SEQ ID NO: 31847 - DNA, 2300 bp, Homo sapien
atgggagagaactggaattttaaaatctcctcttggttcctggggcgggagtttaagaaattctcttttgccttgtgcccccactgattcgcctccattggctatttccatgtttgccaccacaattttaattacttttggtaaaaccatgtatttgtgatatttttataatagatattttactgattggctaggtgaagaaagtgcatgaagtataaacttctgaaatgacacccttattacttattccaaaatgttctattcaaaatgcttctcagtaccaaaccattattactatgcaccttagaaaccactttcttttttaaaaattattatctttagagacaggatttcaccatagggcccaggttggtctcaaactcctgggctcaagtgatctgctccccctcggccttccaaagtgctgggattacaggcgtgagccaccgcgcccgaccagaaaccactttcttttgtttgtttgttttttgtttttttttgagacggagtctcgctccgttgcccagactggagtgcagtggcgcaatctcgctcgctgcaagctccgcctcccgggttcacgccattctcctgcctcagcctcccgagtagctgggactacaggcgcccgccaccacgcccagctattttttttatatttttttagtagagacggggtttcaccgtgttagccaggatggtcttgatctcctgacctcgtgatccgcccgcctccgcctcccaaagtgctgggattacaggcgtgagccaccgcacctggcccagaaaccactttcaaacttactttccacttaaaatattttatactttttgttttgttttgttttgtttgagacagaatcttgcactgtggcccaggctggagtgcagtggcgcgatctcgctcactgcaacctccgacccccaggttcaagcgatgttcctgcctcagcctccagaatagctgggattacaggtgcctgccaccacacctggctgatttttgtatttttagtagagatggggtttcaccatgttggccagactggtctcggactcctgacctcaagcgatccgccgcgccagcaaaaacgttttagtcttatctgtactcatttactcattcaatatttattgagtgcctactatcaccaggcacctttgaggcctaggtttacagaaataaggctccccctcccccaccccgagtcccctgaagggtactgtaattgtttccatttctccaattttcactttaatatatgtgaattttcacatgcttcattcagttcagtggttctcataatgtggtcccggaaccagcaccaacagcagcagcaactgggagacttgttagaagcgcagtcttaggcccaccctacactctagggatgggcataggagtgtgtgtgtgtgtgtgtgtgtgtgtgtgtgagagagagagagagagagagagagagattgtgtgtgtgtgtcaagctcggtattaaataggtcaaagagcaacatctggcttctaaacccaccctcaggcctctccaccgagtacctgtctcaaacccaatctgatccaacaataaccagccttaattcaataatctgtgctacctgagatgatgggaataatcgtggtactataaatgttgcagaacaaaaacgactgcagtagattttctggggctacaccaactgaaaatgggccggaccgagatccgggagagcgttttcctgcgctagacacggcgttcagcctccgggttccgggtctagctgagtcagggcggcgttccagccgagtgcggcgtcggaaacccgttcggttgcgcccgaaccttcggtcagaggccagcgctggaagcccagaccacagcacccgggtttaaacaggagcggaggcgccgggaagggccgggggggccggctagggccggccagcttggaagccgcaccctcgcggccccagacgccggcagggcggagccacgcggccgcagccccagccgagacgcgagctcgtggctcgggcgtatgggggctccaacgggagcggctgcgccgcccggccgggtcaacgtcgtgcgcatgcgccgacccggcgccattttggtggccgggcgcggaggtgattccacactgaggcgagcgcggcggccggggtggtagtggcagtgttcgtgtgctcaggtctgaatcgccgagggaggaggcggtggaggaagaggtggcggcggtggcggtggtcgtagcggtggcggaggaggcgggtacgaatcagctgcgggcggagacatggccaacat

SEQ ID NO: 31848 - DNA, 2300 bp, Homo sapien
ttcacatcccttgtcgattttttaaccaggttttttttttttgttattgagttgtaggagttctttatgtattatggatattaagccctcaccagataaatgatttggaaatattttctcctgcaacacagaagtttttttgttttaagtagtggggtcttgctgtgttgcccaagctggcatcgaactcttgggctcaggtgatcctcccacctcagcctcccaagtagctgggactacaggtgtgtgccaccacaccagcttcacaggagtgtttatttttatttctaatttttattattttctttctttctttttttcgagacagagtctcgctctgtcgcccaggctggattgcagtgacacaatctcggcttactgcagcctctgcctcctgggtgttcaagcagttctcctgcctcagcttcccacgtagctgggattacaaacatgcaccaccatgcctggctaattttgtgtttttaatagagatggtgttttaccatgttggccaggctggtctcgaactcctgacctcaggtgatccacctgcctcagcttcccagagtgctgggattacaggtgtgagccactgcatgcggccaggagtttttaactttgataaaattgtcgtgcatattctcgtattttttgctttggtttcctgtacctttgatgtcatatccaaggaatcattgccaaattcagtgtcatgaagttttctcccttatgtttttgctttctagctcttacatttaggtctttgatccattttgagttaatttttatatatggtataatgtaagggtccagcttcactaatttgagagattatcagttttctttttttctgtttttttttttgtgtgtgtgttttgtttgtttgtttgtttgttttttgagatggagtctggctctgtcgcccaggctggagtgcagtgatcttgactcatttcaagctctgcctcccggattcacgccattctcctgcctcagcctccagagtagctgggactacaggcgcctgccaccacgcccggctaatttttttgtattttagtagagacggagtttcaccatgtttgccaggatggtctcgatctcctgaccttgtgattcacccacctcggcctcccaaagtgttgggattacaggcatgagccactgcgcccggcccaggattatcagttttcaagaaaagtgtttattgccttgttgagatatatgttagactacctatgtgatagtatgaaggacttgcaagatttagatgcttttattttacatgcctttatgtttttctttcaaattaaaataaatattatgagtttaatagttgccttagtattaaatacttcctttgagtgaaaatttttctttgctattcaggtaaatttcctttaaataaataattttattaaaaattacataagattttgtttcaggtgacaccatggattttaaaattagattgcttagaaagtccattggaaaattaaatagtgcacttaagtgttgtatatttcattggttatattttgtctttgtgttccttatgttatttttggtggtttaagtcagctttatgctgataacatctaggtagcttttgatatgtatgtgcctttaaacattctctttgaaattactcaaactatcaaatgaaattagagaaagaatttccccttgttattgtgagactagaaagacgggccattgcggtgtcttacacctgtaatcccagcactttgggaggcagaagtggacggttcacctgaggtcaggagtttgagaccagcctggccaacacggtaaaaccccgtctctaccaaaaaaaaaaaaaaaaaaatcagccaggcatggtagcaggcgcctgtaatcccagccacccaggaggctctgaggcagaagaattgcttgaacctgggaggcaaaggttgcagtgagccaagattgcaccactgcactccagcctgggggacagagtgagacttcgtttccaaaaaaaaaaaaaaaaaatgtaaaaaatggtgagtagaaagacaagaatgaacatttgaggactgagtttggctttttgttttgactcatgtcttaaaagaatattgtgcatttaaaagagatgaggtttcaccatcttgcccaggctggtctcaaacccctgggttcaagcgatcttcctgcctcagcctctcaaagtacagagattacaggcatgaaccaccgtgcctggtcctatttttaattttttgaggaaactccatactgtttttccataatggttgtactaatttgtattc

SEQ ID NO: 31849 - DNA, 2300 bp, Homo sapien
agcctcataatacatgcaacttagacttgtttctcggcagaactgcataccaattgtagaacttctgcatagcttacaaataatcaaaatcccaagactgctgtgtgttgatttgctcattattgctgggtgttaagttatatcagattatgtaaacttacctatagggtgaatctgtgttttcttttgagagggtgtcacttttttgcccaggctggagtgcagtggtgtgattatggctcactgcaaccacaagcgatcctcccacctcagccccacaagtagctgggactacaggagcccactaccatgcccagctaatttttgtattttttttgtagagatggggtctcacgaggctagtctcgaatttcttttttttttttttttgagagagagtctcgctctgtcacccaggttggagtgcagtggtgcagtctcagctcactgtaagctctgcctcctgggttcacgccattctcctgcctcagcctcccgagtagccgggactacaggtgcctgccaccaacacccagctaatttttgtatttttagtagagacggggtttcaccatgttagccaggatggtctcgatctcctgacctcttgatctgcccacctcggcctcccaaagtgctaggattacaggcatgagccaccgcgcccagcctcgaatttctgggttcaggcaatctacccaccttagccacccaaagtgctgaggttataggcacgagccaccatatccagctagggtgaatctttatatgccttatgaaactgtcagactttctcatattaagctatgttttcattttttatatgttattttatgctttaattttccatttgaatagaatattattaggataataacatatattagtcattaaggttgatcattttattttattttattcagacaacagaaattcccagctaacatatttattgctttaagctaaagcatctatctacgtctagtctctttaatatgtttacatttaggtgcctatggttcatgcttgaagttttaatgacaaagaatgaaaacaatagccatgcctttatgaagaagatggcagagaacatcaagttaaccagagatgcccagtctccagatgaatccaagacaaatgaagtaagatgagtgttaggccagtgggtgttaagatgtaatagaaaaatatattgtcccacttggttttttttttttttttttggccatacgtagtaatttaaattttagaatgtttacaaaagtaaatgtgtagtcagtttttattgcacttcattacaagtgaattttatttcaggaatctttagtactctgaaaagacattataaccttagagcaagaggataagaataaaatgtacaactatggtatattacgaacttacagtaagagttacagacaaatgcttattctttttgtgtgctttctttgggttggttcatttgtttgttattttccatgcatattggcatccatgttaaattcatatagagggatttttatttatcagaaggctgcataaacagtgctgaacagaaatatggaatgttcaaggaataaataacaaccacagtatccttcttttaactctaaattatacatttagtggaattggtaattatgattattttgcaatactaaaagttatatatgattcgttttcctccctagaaactgtatacagtatgtgatgtggctctctgtgttataaatagtaaaagtgctttgtgcaatgcagattcaccaaaggacccagtcctcccaatgaaattttttacacaacctgaaaaggtaattttcttcctctcatttttcctaccacactaaactgatttcaatgtcaattaccatcaaccattgtggcaaatattgaattgtcttgaccacagagtaaagaaaaaatctgggtttatcaaagagtgggaaattgtcttacacagccctgaacattattctgacttgaacagaagactacacatactgttgatcttatgtttattctaggaatttctagtattaaagttttcagatttttaaaattattttaatctcattttattgaaacatgggtagtatttttgcagataagaaaaattttaaatctttggcacagtgtaaggagggacaggttctctcctctaagcctccatttcttcatctttataatgcagatgttaataatacatatggacaattgctaatatctaggtttatatgaagagtttatcacataaaaccattcaataaatggtgttattaattaatatacagtgcatctat

SEQ ID NO: 31850 - DNA, 2300 bp, Homo sapien
gaccctaaacaggttacttaatgcctcaaaaaaaatatttagatagccaggagtggtagcttacgcctgcagtcctggcactttgtgaggccaaggcaggtagattgcttgagcctgggagttcaagaccagtcggcaacctggcgaaaccccagctctataaaaatcagccagacatggtggcacatgcctgtagccccagctactcaggaagctgaggtaggaggatagtgtgagcccaggacaccatggttgctggggctgtgatcacgccactgcactccagcctgagaggcaagcaagactctgtctcaaaagacagaccaaaaaaaaaaaaaataggttctatatataatggtgacgatttttcttattctttatagagtcatgaggattatatgaaggtaaagtgcttagcctaatgcctagtagatagtaagcactcattaaatatttgctaatttttattatatttgttgttattcattattctgttcctttctttgatcaggattctagcagctatccagtatctaagtagagttgacaactctttgcctaagttaataaatattattgaaacaaccaactatcatttaagccattaagctaaaaaactaatgcatgctacagtagtctcttaaaacaattatgtggaatgtaggaaaagaagcttttacagagtatcatcaaatagtttctcccctgttgatgcaggaatgcagtagtcatgtcactgcctgaaaatactgggatctttgtaaaaacaggccccatttccagatttgtctatttaagttatccaaacaattctaatgttcagcctgatttggggttcacttttacttagaaattcaaatgttcccttcagacacaatgtgttaaatgaatatacagtgacaagtgtggaatagcaaaagtggtttgagattgtgactccttaattgggtggctgggtaccacacacatcagcctcataatacatgcaacttagacttgtttctcggcagaactgcataccaattgtagaacttctgcatagcttacaaataatcaaaatcccaagactgctgtgtgttgatttgctcattattgctgggtgttaagttatatcagattatgtaaacttacctatagggtgaatctgtgttttcttttgagagggtgtcacttttttgcccaggctggagtgcagtggtgtgattatggctcactgcaaccacaagcgatcctcccacctcagccccacaagtagctgggactacaggagcccactaccatgcccagctaatttttgtattttttttgtagagatggggtctcacgaggctagtctcgaatttcttttttttttttttttgagagagagtctcgctctgtcacccaggttggagtgcagtggtgcagtctcagctcactgtaagctctgcctcctgggttcacgccattctcctgcctcagcctcccgagtagccgggactacaggtgcctgccaccaacacccagctaatttttgtatttttagtagagacggggtttcaccatgttagccaggatggtctcgatctcctgacctcttgatctgcccacctcggcctcccaaagtgctaggattacaggcatgagccaccgcgcccagcctcgaatttctgggttcaggcaatctacccaccttagccacccaaagtgctgaggttataggcacgagccaccatatccagctagggtgaatctttatatgccttatgaaactgtcagactttctcatattaagctatgttttcattttttatatgttattttatgctttaattttccatttgaatagaatattattaggataataacatatattagtcattaaggttgatcattttattttattttattcagacaacagaaattcccagctaacatatttattgctttaagctaaagcatctatctacgtctagtctctttaatatgtttacatttaggtgcctatggttcatgcttgaagttttaatgacaaagaatgaaaacaatagccatgcctttatgaagaagatggcagagaacatcaagttaaccagagatgcccagtctccagatgaatccaagacaaatgaagtaagatgagtgttaggccagtgggtgttaagatgtaatagaaaaatatattgtcccacttggttttttttttttttttttggccatacgtagtaatttaaattttagaatgtttacaaaagtaaatgtgtagtcagtttttattgcacttcattacaagtgaattttatttcaggaatctttagtac

SEQ ID NO: 31851 - DNA, 2300 bp, Homo sapien
catgggaatctgtgtacttcgtaggatgggtaaacattaatgattacatttcttgggcagtattgaggatgcagaagtgagacatggccccagggatttcaacatattctaatttcaaaaaatgctgttttaatatctattatatattgttttataatacatatatgtattgttttgtatcctgttttaaatgtaacattatattgaacaacttccaagtactaaaatttattgagtcaattggttcatgttagatagcacattagtctcagcatatctgcataaaattaaggtggaattggcattcttatcacaagacaatcatacttttttccagttacttcaaggaataaattctctattatgttgatgtacattcaagtattttatgtatatactaatgtttaaaaccttattgcaagatttttttgttacaactttttaaagaaaccctgcataggaatgcttcctcaccttatcccctaaaactgagagtaatcctgaccctatacttctgtggaaagggatcaaacaaatcttcaagttaatagaaactcaacagaattctgacccaagaattaaggaaatgatttcagtgtttatataaacaaatagaatcctcaaacctatagaaccgatgtgttcagtgttgtcacctttgtttagtatatagttgctcagataatgtttattatatttattttgtgtatttttgttaaaagtataaaagcagacctggttctaatcctagctccatctttttatctctgtgaccctaaacaggttacttaatgcctcaaaaaaaatatttagatagccaggagtggtagcttacgcctgcagtcctggcactttgtgaggccaaggcaggtagattgcttgagcctgggagttcaagaccagtcggcaacctggcgaaaccccagctctataaaaatcagccagacatggtggcacatgcctgtagccccagctactcaggaagctgaggtaggaggatagtgtgagcccaggacaccatggttgctggggctgtgatcacgccactgcactccagcctgagaggcaagcaagactctgtctcaaaagacagaccaaaaaaaaaaaaaataggttctatatataatggtgacgatttttcttattctttatagagtcatgaggattatatgaaggtaaagtgcttagcctaatgcctagtagatagtaagcactcattaaatatttgctaatttttattatatttgttgttattcattattctgttcctttctttgatcaggattctagcagctatccagtatctaagtagagttgacaactctttgcctaagttaataaatattattgaaacaaccaactatcatttaagccattaagctaaaaaactaatgcatgctacagtagtctcttaaaacaattatgtggaatgtaggaaaagaagcttttacagagtatcatcaaatagtttctcccctgttgatgcaggaatgcagtagtcatgtcactgcctgaaaatactgggatctttgtaaaaacaggccccatttccagatttgtctatttaagttatccaaacaattctaatgttcagcctgatttggggttcacttttacttagaaattcaaatgttcccttcagacacaatgtgttaaatgaatatacagtgacaagtgtggaatagcaaaagtggtttgagattgtgactccttaattgggtggctgggtaccacacacatcagcctcataatacatgcaacttagacttgtttctcggcagaactgcataccaattgtagaacttctgcatagcttacaaataatcaaaatcccaagactgctgtgtgttgatttgctcattattgctgggtgttaagttatatcagattatgtaaacttacctatagggtgaatctgtgttttcttttgagagggtgtcacttttttgcccaggctggagtgcagtggtgtgattatggctcactgcaaccacaagcgatcctcccacctcagccccacaagtagctgggactacaggagcccactaccatgcccagctaatttttgtattttttttgtagagatggggtctcacgaggctagtctcgaatttcttttttttttttttttgagagagagtctcgctctgtcacccaggttggagtgcagtggtgcagtctcagctcactgtaagctctgcctcctgggttcacgccattctcctgcctcagcctcccgagtagccgggactacaggtgcctgccaccaacacccagctaatttttgtatttttagtaga

SEQ ID NO: 31852 - DNA, 2300 bp, Homo sapien
agtgccaaggcttcataggttccatttgaaaactttactctgcaaaaggagatcagccccaggaactagtacctaagacagacactggcctcttatatttcatatcctttaggtatttgtctgatacttcttcactcttaactgcagccctgccatttcagcaggcattaaactagattcctgttacatgtttatatgcaggaaatagattttaaatgatgataggtgattttttttttaattctttgtggtttttttaatcaagtttttttgttttttgttttttgttttttgttttttttgagacagagtcttactctgttgccagggtagagtgcagtggtgcgaccttggctcactgcaacctccacctctcaggttcaagcagttctcctgcctgagtctcccaagtagctgggactacaagtgcgtgccaccacacccagctaattttttgtatttttagtagaaacagggtttcaccatgttggccaggatggtctcaatctcttgacctcgtgatccgtccacctcggcctcccaatgtgctgggattacaggtgtgagccaccatgcctggccactttaatcaagttttctacaatcaatatgtatttctcttaaaatgagggatacagctcctgatgtaaagagtttttcctagccttgcaattactatggttgcaagaataagcagagtttttgggttgtggtgaagtatctaagctagagtttgactagaaatgaaggcaggtaaatttgtaatcagaaagtcacaatgatttgatttgattgtgaaagtcacaatcccctgtgttaagttcatggactcaaagtagctttcccatatttgtacgtcattttaaacataaattatgctctaaggaccttacattcaaaaagggacgaaagcatttttatgaatgatagtggttataggaaatgtttatttcttttttgtttgtttatagtaaatctgatatgtctcgcttgcgattagctgctggtagtgccataatgaagcttgctcaggaaccttgttaccatgaaattattaccccagaacagtttcagctctgtgcacttgttattaatgtaagtaacaatcttatttttgtcaattacttatcttcaaagttgaatacattacttttctatggatacaaatccatttataatgtgaatatatgcacaaaagtcactactattattacctgtttaactgtcttccaattattacattatttattctcccatataattatcttctttttaattgaagacactaaaaatacttaaactgctgttttttatttaataaatggttgccaatttaagtttttctgtgctgctgtaggatgagtgttaccaagtaaggcagatatttgctcagaagctgcataaggcacttgtgaagttactgctcccattggagtatatggcgatctttgccttgtgtgccaaagatcctgtgaaggagagaagagcacacgcacgacaatgtttactgaaaaatatcagtatacgcagggaatacattaagcagaatcctatggctactggtaagtaactcagagttctccgtgtgcaaatatattttgtcaatgtatccatttttaggttttttttttcttgtcatgtgtttctattatagtttataataaaactgggagttttatagaatgctgtcattgtagttatgatgtacttaaaaactgaactcctgagtcctatttatgctgcattaactctggcaaactgcatttttcctatgggatcaggagtgtagtttaatttgaacatattgctcggatgtcagactaaataattttttcctagctttgccagggacctgttgtttaatgggtttaatatctgatacctttgacttcagtatctttcaaaagtgaaatacaactgcataccaggtaccagaaaaagaaattgaaaagtgaagtgtaaagtattttagtatccaggtatcatgttgtgcctaatttagaaataactgagggaaaaaatgaaaacttaagtggttagaactcagtccactaaggcattttataaaggttgtttttaataatgtttttacttcagagaaattattatcactgttgcctgaatatgtagttccatacatgattcacctgctagcccatgatccagattttacaagatcacaagatgttgatcagcttcgtgatatcaaagagtaagtcttgttgtttttcaagaactctaaaaattatgtttagttttcaaaaaatggtaaattttttgtttattatttttatttatta

SEQ ID NO: 31853 - DNA, 2300 bp, Homo sapien
aaattagcaggactctttggcattttgcatctagatcctcaaaaatgttatccttgactctttatttttacactcataattcatgagtataaaagaatcatatgaaagcttatacacaagcatgttcctccagcattattttccatcacaaaaaataggggaatggttaaccatagaatgaacacccattggacagatcctaactggatatcatataatatagtattaccttttgtaagcctcaatttcctcatcttatggagtgaaaattaattgagataaagcctataaagtgtttttcacacctgcctggcacggagtaagcactcacataatagctattaactttgattcctgaatgaatgccatagaaaccatttgaggctccctcattgttaccagtgctcattttaacaatcctgttgtccaagagtgccaggttttcttctctctatgcttagcaacagtcccagtgggttccggctagctttctgcatttcgtaaagtggtcacaataaatacaaaagccatgctatgttccacatagaagtcgaagtagaaagactcccatgccatcccattcattaccacattttaccacgtaagtaataaaaatccacagtgtcggggtgggagtgccaaggcttcataggttccatttgaaaactttactctgcaaaaggagatcagccccaggaactagtacctaagacagacactggcctcttatatttcatatcctttaggtatttgtctgatacttcttcactcttaactgcagccctgccatttcagcaggcattaaactagattcctgttacatgtttatatgcaggaaatagattttaaatgatgataggtgattttttttttaattctttgtggtttttttaatcaagtttttttgttttttgttttttgttttttgttttttttgagacagagtcttactctgttgccagggtagagtgcagtggtgcgaccttggctcactgcaacctccacctctcaggttcaagcagttctcctgcctgagtctcccaagtagctgggactacaagtgcgtgccaccacacccagctaattttttgtatttttagtagaaacagggtttcaccatgttggccaggatggtctcaatctcttgacctcgtgatccgtccacctcggcctcccaatgtgctgggattacaggtgtgagccaccatgcctggccactttaatcaagttttctacaatcaatatgtatttctcttaaaatgagggatacagctcctgatgtaaagagtttttcctagccttgcaattactatggttgcaagaataagcagagtttttgggttgtggtgaagtatctaagctagagtttgactagaaatgaaggcaggtaaatttgtaatcagaaagtcacaatgatttgatttgattgtgaaagtcacaatcccctgtgttaagttcatggactcaaagtagctttcccatatttgtacgtcattttaaacataaattatgctctaaggaccttacattcaaaaagggacgaaagcatttttatgaatgatagtggttataggaaatgtttatttcttttttgtttgtttatagtaaatctgatatgtctcgcttgcgattagctgctggtagtgccataatgaagcttgctcaggaaccttgttaccatgaaattattaccccagaacagtttcagctctgtgcacttgttattaatgtaagtaacaatcttatttttgtcaattacttatcttcaaagttgaatacattacttttctatggatacaaatccatttataatgtgaatatatgcacaaaagtcactactattattacctgtttaactgtcttccaattattacattatttattctcccatataattatcttctttttaattgaagacactaaaaatacttaaactgctgttttttatttaataaatggttgccaatttaagtttttctgtgctgctgtaggatgagtgttaccaagtaaggcagatatttgctcagaagctgcataaggcacttgtgaagttactgctcccattggagtatatggcgatctttgccttgtgtgccaaagatcctgtgaaggagagaagagcacacgcacgacaatgtttactgaaaaatatcagtatacgcagggaatacattaagcagaatcctatggctactggtaagtaactcagagttctccgtgtgcaaatatattttgtcaatgtatccatttttaggttttttttttcttgtcatgtgtttctattatagtttataataaaa

SEQ ID NO: 31854 - DNA, 2300 bp, Homo sapien
aggccaaggcagacagatcacttgagctcgagagtttgctaccagctttggcagcatggtactaaaaatacaaaaaattagctgggtgtggtggtgtgcacctgtagtcccagctactcaggaggccagttggaaggatcacctgagcctggggaggtagaggctgcagtggtcatgatcgtgccactgtgctccagcctagacgacagtgagatacctatctccaacaacaacaaaaaaatttagattaaacatttttagcttgcaactagggtataaaataaaaaaatttaaaaagagataaacatttaacacttcctactaaagtagtggcattgtgatttgtgttggtaaagccagcccttaaataacagcatttagttcagtaagggaaagtgacactgggaataacagtagaatggattttcatgtgagattatcatattttgagatgattgtaatttacaatgtgagtgccaattatgtggttggattgcatttgtttctttagataaaaagatcactaagaattttgattgtcaagaaattcatagagaaggtgacagttgggctgggatttgaagtctcagacttgggtaggcaaatgaatggtaaaacattccaggcagatgaatggcagaaaggcagaagcatgtttggtgtgtttaaggaaaataaataagtacagcagggcgcagtggctcatgcctataataccggcactttaggaggccaaggcaggtggatcacttgaggccaggagcttgagaccaacctggccaacatggtgaaaccccatctctaccaaaaatacaaaaattagtcaggggtggtgatgtgcgcctgtaatcccaactactcaggaggcacaagaatagtttgaactcacgagacagaggttgcagtgagcagagattgtgccactgcactccagcctaggtgatagagtgagactctgtctcaaagaaaaaagaaaagaaaaaaaaaaagacaagaaatgagtactactattttgcttgtgctgaggcaagttagggttaggtaaggcttaggtaattccctacccgtacctttttttttttttttttgagacacagtttcgctcttgggcccaggctggtgtgcagtggcaagatctcagctcactgcaacctccaccttctgatttcaagcgattctcctggctcagcctcctgagtagctggtactacaggcgcacaccaccatgcccggttaaattttgtaattttagtagaggcggggtttcaccatgttggccaggctgaccttgaactcctgacctcaggagatcctcctgcttcgacctcccaatgtgctgggattacaggtgtgaaccaccatgcctggccttatgtgttgtttttgttataaaattaatgcctggctgggcgtggtgcctcatgcctatgatctcagcactttgggaggcaaaggcagacggatcacttgagctcgggagtttgctaccagcttgggtagcatggtgaaaccctgtctctactaaaaatacaaaaaattagctaggtgtggtggtgtgctcctgtagtcccagctactcaggaggctgagttgggaggattagctgagccagggtttctctgtgttggtcaggctggtcttgaactcctgacctcaggtgatccacccacctcagtctcccaaagtgctgggattacaggcgtgagccatcacccccggcctgtggagtctttttttagcctcatgtccagatcacatagcatctttgtttgtacaggaatccatttcttttttttttttttttttttgagatggagtctcacactgtcgcccaggctggagtgcagtggtacagtctcagctcactgcaagctctgcctagccgggttcatgccattctcctgcctcagcctcccgagtagctgggactacaggcgcccgccaccacgcccggctaatttttttgtacttttagtagagatggggtttcaccgtgttagccaggatggtctccatctcctgacctcgtggtccgccctctttggcctcccaaagtgctaggattacaggccactgtgcctggcccaggaatccatttctaattgatgctgtctgagtaaatttgtttgttgctgagattatagtcatctgacaataggtgtgaaagccgtggatgagtaaaatttaaagagtggctagcaacattttatgtacttaattataatatgaattttaaaaaatcacttagtgtatgctttttctttttcttttttttcttgcgatggagtctcgccttgtcc

SEQ ID NO: 31855 - DNA, 2300 bp, Homo sapien
tagccgggcatagtggcgggcgcctgtaatcccagctacttgggagggtgaggcaggagaattgcttgaacccagaagtcagaggttgtagtgagccaagatcacaccaccacactccagcctgggcgacagagggagactctgtctcaaaaaaaaattagcccggtatggtggcacacacctgtagtcccaactacttgggggcctgaggcacaaaagtcgcttgaacctgggaggcggatgctgtagtgagccgagatcatgccactgcactgcagtctgggcgacaaagtgagacttcatctcaaaaaataataaaataatataaaaaataaataaaataaaatatatgtacatatacaaaactccatttaataatgggcaagctactgaggaggatgaaagataaaatcattgttgtttaattaaatgtaacacacaaagaaatatcaaatttggccgggcgcggtggctcatgcctgtaatcccagcactctgggaggccgaggcgggcggatcactagctcaggagatcgagaccatcctggctaacatggtgaaaccccgtctctactaaaaatacaaaaaaaaaaaattagccgggcgtggtggcgggcgcctgtagtcccagctactcggaagactgaggcaggagaatggcgtgaacccgggaggcagagcttgcagtgagccgatatcacgccactgcactccagcctgggtgacagagtaagattccgtctcaaaagaaaaaaataaatatcaaaagtgacagggagagcctaaaaagagagcagcttttggtccacttaatagtttggatgaggacacttttaaatggattctgcctggtactgtaaatgcccaagaacaaagcattgacttttgggcagagttctagcaaatcagcaactgtggagtgtcagattcgcaatgactgctcttgtgtaatacgtcaaaaacaagtcagtgagctgaaatgcagtacctttactatttttaagttgacgttaaaggatgtgggaaaaaaatagaccaatgggtacccatcaagaataatttgaataaacaatcgaatatcattttaaactatggtagtggtcagtttcaagagctgaatgtgatttcatattatcgtatccttttttcaactttctcttcggaaattttgtgtatgctcttgattttttttaaataggtaagtgtatgttcttgcgttaatttgtttcaattacatacattaaattgctcaaacactgctgcgtgcactgtttttacctgatagtggttttcctttggatgacagaaaacgttaatgcttggtaggtttaaaacatttttaaaaaatgagctcttccttatttacaagaatcacccacccaattaataaatgcttatttctgggttccactctcagagatttttatgtttatgtatatttttatattttttagtgttttattttatatgttatatttttatatgttttatgttcatatatatttttacgttaaaaaaacatatatttttatgttttttaatctttggagttggaaacctacgttttcagccagtacccaaagtgattgtgaggcctggtggcccaaagaccataccttgagaacgactcgacccaatgctattttcatgttttgcagctttcaaaatattaacttcagaaatctaaggagggtgggcaactcgggtggctgtcagaagacccgagagtgagccgctcacgctgcgccccattgcacaactttccttgactttgcagatctctccctgaggaggaaatcagttcattttcaccgagcaattaactacctcccaaccagtttcgtctatgtccctcaggatgacccccaaaagtcaccagctcatcgccgctgcgaaagataaagcactgtttgccctgcgtgccctcgcaaggccgcgggaacctgggctcgcttcccgccacccgggctcctcctcctctcgccctctccggtcgggtcctccgggaggcgccccgcgcggcaggtattggcgccaaccgggtggcggcgctgtccgccctgcgcgcggccgcctcgggcccgagggaggcggatgcacggccggcggaggaaggggagggagcgaggagcgcgcgctgctctcgcgtgctctcgcgccgctcgcgtgaccggccggtgtgtgcgcgaggccccggctcccggggcacggacggccgggcgcgcgcctctgcgaggggcgtccgggtccgagtcggcggtccgggccggcgcgaggtgcgtgcgggcgggccgcggggg

SEQ ID NO: 31856 - DNA, 2300 bp, Homo sapien
tgttgagtgaagattgctttgttcttcattccagtctcactttcagaactttatggtgttgatgttcttcttattgccatagtaaacaaactttaaaaacattcagcttgggtgttgtctttgtggcttgaaatatattttccaatgttaagaagagtttatttcttattgttctgacttaagatttgatgaatccttaacagatgttcaaaggaaaataatttaaatgctagtttttattatcatggtgaacatatttcaaaaacaaaatattaatttcctcgacatctttcaagtttataattactagggttctttcatttctaaagtggcatatattacagtttttagtctcttataatggttgtttagaggcagagttaatgttagcttctcagcaacagctatttatctcttgagattctgggttattacaattttttgtttttgaaatttaataaaagcattaaggggtttttgtatagtgatttttttttaaggatgaacatgaagtctgtgatttaacactgggactcgagacctctaaatacaaaattcatacaaaaggaaaaattcccctatttttctatatggatggtttcatcagaaaatttatcttcttgagttctctccttatatattactagtttcttgaaaaagcactacaacgttctcattgtgaataagtgttccagttagacctaaacgacaaaaaccacttgcacttgccccaaatttacactctgtttaaagcaactgccataacaaccaacaatgtatcttcgatgcaaagggacactttgtcatgaggttatttcgcttctctattctgggaaaaaccactgcaagtggaatgaaaagtaaccgcaaagggaggggacggaggaagtaaaaaacaggcaaaaccaccaccactaccatcaccaccaccaccaccaaccagaaagcaaaggtgaaaaatttgcgtaccctgaaaacactaaacatttcacatcagaacccagaacaaataaaccagggaaagcagagttgagagaaaaaaaatggtgcaggcttggggacggactcatactacagcggtcgcaagagggaagagcacgtctttgctttttcttggcatccgaaaactcaagctcgaactgggggcaaaggccagcggctgcggttccaccggctaaggcgcacacattccccgagctcagaccgcacgctggcagggccgatggggctgggcagcctccctccaccccgtggcagtcgcctacccctttgtctccccgtggggctccgaggccgcgcgcccggaagccccccgcgggagggccgcgcgcgagaaggcgggttcccgtgcccgccgcagcggccacggccctagtcaggcaatgccgaggccggtcgctcgcctcgccgtccctcccaacttgcagcctggaccccgcgcgcgtcagggctcgtcccagctctgctttcctttctcccctcacctcgcgaggccgaccttgtgtttgttttgttttttggggctcgggagagtgccgagggctagaaacagctgtggtttaccgcgccgcttattttggcaaaaattccgggcctgttgcaatgttccccagcgccaaacagctcccgccttccccccaagcagaacccgacactcgaagaagggcttgctcctccagggaccccctgataagaaaagtggggaccacggcccgctctcgggcgagacttggggggtgggcgaccggaagcagccgaaccggccgggcagggcttgctctccaacgggagagcgggagcgggagaggtgggagcgcccgcgggctcaagtcccccgggccgccgcgccgaggcggagctcggggacgaagcagaggtcgtggcggacagccggcgggcttgggggggggcggtgggcggcgatccacctgggcgacgtggcagccattgccggcgcctcgagacccctccccacccggccgcccacccgccctctcgcggcgggcttctgcgcggctgctcttccccggccggacggagagcggcagtgtctccccgccgggcgcgctcgccgtgtctcccccgcggccgcagctgcttgctagccttgcgcggcgcgggagagcgcagtggcgccggcgggaaagggctgcggacctgcggcgccgcgttgtgcgttcgacgacgcggcaccggcttcgacgccctctgcccgctccagaagcaggtaaaggcggcgggtgggaggcagggaggcgggtccaaggtgagggccctggaggttaggggtcccggggctc

SEQ ID NO: 31857 - DNA, 2300 bp, Homo sapien
aatatgattttgcatataaaaagctgaaaggaaagcaaagaaggtagatagctatttttctgaaattcattaactaataaatggttgctgctttgcatatcaaaaaacatgcataatcatggctaatcatgatgaaaagggagattttaaaaggaaaataatcagcgttttaaaacggccgggcgggcgtggtggtcactcctgtaatcccagcactttgggaggcggaggcagttggattgcttgagctcaggggtttgagaccagcctgggcaacatggcgaaacctcctctctacaaaaaatacaaaaattagccgggcgtagtggctttcgcctctagtcccagctactctaggggacgaggtgggaggatggcttgagcccaggaggcagacgttgcagtgagctgagatagtgccactgcactccagccttggcgatacggccagaccttgtctcaaaaaaataaataaataagatgcaactatgtaacagtatttagatttaaaataaatactaaaaaaaaaacatgcaactagtgataatatttagcttctactgtgtacatacaagatactatgcctactttaatatactttaatgaaggaaaaaacatgcctctaccataacttaagcccactttttctatgaaatacagtacttctatctccccttcaaattaactaaagtcaacaagtacacaaactggcattcgtacgtactgcgtgctgatttcaactgctttattctttattgttttacaggttagtcttttttcattaactaaattgtagcctccttgcaaaagagcagccatttatttcctattcttcccaccatgtccaccactacagcccctcgctcctaccccccatcctagcacggcacttaaataataaaaggtcctggcagcgaaactcaaaactgtttatttctgacctttagcagtaaacaatgttagaaaggcagatggaaccacgtttatcaaaacacagaacacacgatgtttacatttcctaaagcgcgtcttttagttaaaattaaaggatgagagttaaaacgagttacaaaagacagctggtgtttgaaagaaaaacactggaagtaataaaaacggagtgaaaaggctgatgttgggattaaaagaaaacatttttttaatacagctgcaaatcagtcattgttttctgagaggctaggttcatctccaggattttcttctaggagctcaaccaatggccacctttactgagttaaccagtctccaggcaagcagcccttgctgattggctcaaagatgtcgagtagaaaaagcagccaatcctgccttcaagccagaactgtgccatggagacattacaaccactgcatggcgagaatgtgtacaaacctgtccgtgccacaaatatcagatcctagttacaaagactgccgccgaaaggaagagcctttgaagccaacactgacactgacctgtcatctacattctattactctagctctctttcggagggaaaaaaaaaactattttaaccaaaagcgcatgagagataaactgtgcccccgctaagatgactcactctattgaggatgaatttccaaacggacggcttagagagagtcccgatgagagaggggctctagaagggtcccattgagggacaaagttgcagatgggggcaggggaggcgggacgagggccaaagacacacaaatgccggggaggggaaagtctccccgcagtctccaaaatccgaacgtgtgagtggctgtgtgtctggacttgaactgagtaaataaacggctctgctaggactatgtgctcaggaaggtggcctgaagttcccagaaggctccgcctggcaaacacctaaggcgcctggaggggcgcaaggtcaggtcccggcgggaacagatctgggaggaaacctcggggggtcgagaggggtgtgtctggggcctggaggcccgccaggcactcggaggccaaggaagcggccgcggcccccgccttcgcccggcctcgggctgagcgccagggcccgcctctcgccgacgcctcacttcccttccgtccgggcagccgggcccgcgggtcagatcggaggcggcccgcgccgggccccacattcagggcttgggggttcattcgccgcgccgcccgccgctgcttcaggccctccgcttcggctcggagccccgggacccctaacctccagggccctcaccttggacccgcctccctgcctcccacccgccgcctttacctgcttctggagcgggcagagggcgtcgaag

SEQ ID NO: 31858 - DNA, 2300 bp, Homo sapien
tattttgatgctgtatttgatcaccaagctaatgtggtgagaacctgatcatttcattataaagttatggttttctttttgcttctagcaagtagtaatctatagggtggtactttgacatcaggtaaattttttattttttatttttttgagacggagttttgctcttgttgcccaggctggagtgcaatggtgcgatctcggctcactgcaacctctgtctcttgggttcaggtgattctcctgcctcagcctcccgagtagctgggactacaggctctcgccaccacgcccagctaattatgtatttttagtagagacgaagtttcgccatattggccaggctggtcttgaactcctgacctcaggtgatcctcctgccttggcctcccaaagtgctgggattataggtgtgagccactgcccccggcctcaaatttctttttttaaaaaacatttttattttattttattttattttttgactttttggagacagagactcactctgtcacccaggctggagtgcagtggcacaatctcagctcactgcaacctctgcctcccgggttcaagcgattctcatgcgtcagcctcctgagtaagctgggactacaagcatttgccactatgcctggctaattttttttttcttttttgagatggagtctccttctgtcacccaagctggagtgcggtggcacaatctcagctcactgcaatctccgccttccgggttcaagtgattcttgtgcgtcagcctcctgagtaagctgagactacaggcgtgtgccactatgcctggctaattttttttttttttttttttttgatatggagtctcactttgtcgccaggctggagttcagtggcgtgatcttggctcactgcaaccttcgactccctggttcaagcaattctcctgcctcagcctcctgagtagctgggattataggcacgtgccaccatgcccagctaatttttgtatttttagtagagatggggtttcgccatgtttgccaggatggtcttgatctcctgacctcgtgatccacccacctcggcctcccaacgtgctgggattacaggcgtgagccaccgcgctcggcccacctggctaatttttgtaattttagtagagatgaggtttcatcacgttgccctggctggtctccaactcctgagctcaggcaatccctccctgtacccccccaggcctcccaaagtaataggactacactcgtgagctaccactcccggccccagataaatttctttcttttatttttgtgggacttttttttttttttgggacagagcctctctctgttgcccacgctggactgcaatggtgccatctcggctcactgcaatctctgcctcccaggtgattctcctgtctcagcctccctcctgagtagctgggattacaggtgtgcaccaccatgcccagctaatttttatttttagcagagacggggtctcaccatgttggccaggctggtctcaaactcctgacctcaagtaatccacccaccttggcctccaaagtgttgggattacaggtgtgagccaccgcacctggccaggtcaatttctttaccaacttttcacctaatgattttagcattcattgatgattcttgattagctatttaattattggttaaaaaatggtaattagttttgggttctgttgttccttatacatttagtagctagccaccttctataaagataaggtttctctcatcaactaaggctattttgttacctggaattagtgttctacttaaaggcagaatagatgcttagttactttcttttatacagactttttcagagtgcaatagtcacctccagtggcaataagtgcagtctttcttgtcttttctcttttgtcactttctttttggaatatcatatatattataaatattatagacatttttgactttgatttcttttgtgattatagtttgatgtgaatttgactttaatatataactttcctttcatagtaagaagacatgttggataacaagaagaggtgtagagtttgcatatatcaactgtggccttaatgagcatgttgacagcatcgatgctagacagacagtaagtgttattaaagttgtagagtatgaatattttacacataagatttttttttttttttaaattgagtcttgctgtatcacctaagctgaagtacagtggcgcaatcttgactcacttcagcctcaaactgctaggctcaagcgattctctcacctcagcctcccgagtagctgggacta

SEQ ID NO: 31859 - DNA, 2300 bp, Homo sapien
ctaaacatggtgtttcacttcagccgtgttgtcttctctatgggaatccagggggcaaagtttctctttaatctcagcactggggagccaggaagacctcatgattctgagctatgtgtttatgtttctcccgcgggcaatgagctttctgtgtggtgatatttcctgcttcataccagttgctgaagagcatagaaccacgtggcatacattctctgtaattaacctcacccccagttttagtgtcatttttgtcttcacttctcttggcctcattttcaaatttcttgtttttaattgtttcattttgctaaggtgtaagtatttttgccagatgctctaaatcctttgatgaacaaaaccagaagtagataaagaaaatatccacaagcttatgttctgctcagctgataacatcaccatggtgatctggctttccacagaggattttccctttctttcctttctttcttttccttccttccttccttccttccttccttccttccttccttccttccttccttccttccttccctccccttctcttccttttccttcccttccctccttctgtctgtccctctctctcttttttcgagacagggtcttgctgtgtccccaggctggagtgtggtggtggatcacagctcactgcaacctcaacctcatgggttcaagcaatcctcctgcctcggactcctgagtagctgggactacaggtgtggttgcccagctaatttttgtagagatgggatctcactacgttgcccaggctggtcccgaactcctaggttcaagcaatgctccccgctcagcctcctaaagtgctggcattacaggtgtgagccaccgccactgcacctggcctcccacagaggattttctaggagataatgtgctcttcagaaggctcgaggatctcagctggcagattgagttcttactgtgcattaacaaattgacacatgggttcatgtggaagtcttgtgaacttggtaattgggtgtctattgataagaatgctcaccttgtaccattgattccctctacaactatgctgcaagcacagtcatctgctttcacttctttgaacatgccaacctctttcccacctcagggcctttgcacatactatttgcctctacgtggaatgttctttcctccttctcatccattagagtggcagcagtactttagaataatcagaggggtttaaaataatattgatgtccggtcccaacccagctcaattaaactcaaatctttgagtgtggggccgatgcactgataaaataaaataaaaggcatggagttgactttatccttacggtcggcaggtattttgaccaagctatcaccgtgagcagtagcatcaacagttagttattcagggatttggggcacaggcggttgtgaccacatcacaaaagttcaatttgttgggttaggcgtttagccataacctaagtagttgcagatggtctctacacctggattgcccattaggacaaaacaagtaaacttgtgtttttaggcaaataatgaaactctgaggagtctgaaaaaacaactcatcgccaggtaactcccagcccaggtgctcgtccatacaggggtgaacgcacggcagggggctgctcgaactctcactaagcctgcctctgttctttgcaaaatatttgatagtttttaatgcagcaaagcgaagcagacaatccacctcttgttttccccaagctgatggggggaaagttctaaggtgttgtttcctaagctcaaattaaccaagattggtcagtggcatggactttttttttttttttttttggtaattttacttccatgaggaatcatttggactcttcagtcttcctttcttcagttttacgtagggctttgctggaggaaaatggggctaagggggagagaaacatagtctcggagtagggtgggggataaattaaacgcaaacccagcggtgcggcaaaggccttattctgcctctgatctggggaagtttcatattctaatggagagaaacgcacgtgcacacacacccccctaaacccacacaaatgaaaccccctctgcggagaagccggctacaggaaattgacttaggcacaggaacttgctaatctcttttgtcacattcggattgctcctgctgccccacacacactaacccaaccatcttggggtggactccctgccagcccaactgttgtattttcagttcttccagtgtgaatcagttaatattctcgggaacgagggagaggttgatcctatgagga

SEQ ID NO: 31860 - DNA, 2300 bp, Homo sapien
atcttacgacaacccctcaaggtaaattataataatggtaaatacttctacggtactcactctgtgccaggcactattcaatgtggtttacatgcactacccatttaattctgtacaaccaccttgtaaggtaggtatcattattttattttaatttttattattaaaaataataccatcaaccaactcacaccaggtaggcaccgttattattgcctatttacaattagggaagaggggcttagagaagttaagtgacctttatgagatcacatagccagtggggctgaaaggcagtatggttccagagtctgtgctgtagacactatgcatagttgactttgttgtcaaaggaaccgaaggtcagagacgttaagtaattgccccaaggtcacacatttaagtggcagacattggagccaaacccaagcctgcctgaccccaggtctacatgccccttcttactctgaactacctttctgtctagtaggagttggcaaacttttttgtgtaaagaccaaattgaaaatattttaggcttggttgcaactttatgttgcagcgagaaagcagtcataggcaacatgtcaatgaatgggcatgactgtgttccaataaaatgctatttgtgaaacctgaaacttgaatttcatataattttcacatgtcataaaatattttcctcctttggatttttttcaaccattaaaaaatgtaaaaaccacctgtaatcccagctacttgggaggctgaggcaggagaatcgcttgaacttgggaggcagaggttgcagtgagccgggatcatgccactgcagtccagcctgggcgacagagtaatactccctctcaaataaaataaaataaaataaaataaaataaaataaaatgaaataaaatgtaaaaaccattctcaatttatggccctacaaaaccaggtggcgggctggattcagccatgcgtgggccatagtttgacaaccttactttatagcatcgtgacattatagaatgattagataggcatgatttgcctttttgctctctttttcctagaacagttcagctcaggccccaaacatggatacccaactgagaaaacacgagtctttggtaaacaagatccacattccctaaaagaagttcagagaccacgtgtccttccctgagcacacctcttggggttgcaccctcaactccaagcagtttttcaggctattccaactattttgagaaaagaagtaggaaatgcatttccccatcactttagttttgagatgagtttctaagggtgctctgggtggttgcctagctggctagtcttgtatttgactctgaaattgaaccggactaagaactctagacctcaggcaacgattccttgattgtgctcctgggagtggaagagaccagtcagggcagagttgctggaccagaggaggggaaggggaccacggtcccggtgtgattggggaccagagggcaggacacacggctcagagaggcttcagagcttaatatgttgaaataataaaaggcttcaggacttggcaatgttttgttttaattcaactataaaggggtttaatatgcttcaggcttaggaacataaatactgcttaacattttttattctggtgaacttatgttaaaagttgcaaatcagcatcttttttttttttttttttttttttttgtagaaacagggtcttgctatgttgcccaggctggcattgaactcctggcctcaagtggtccttccacatcagcctcccaaagcactgggattacaaatgtgagccactgtgcctggccaagcaaaccagcatcttgcaaacaaactttcagaacaaaatctgtttcaaacagagatgatctatgtatgaaagtacactgacttaaaaatgatttctttctgtggttttgagagaaaatctagtgattatttgtagcaattagcaacacagtagggggaattattaagataggattcagattggtgaaataaattcttgcaagtaaaacttaagataaaatgccacttgagaagatgttcaccacaaaggtggtaaccttatttttaaaaatgctttttattgaagttttatctacatacaggaaagtgaacaccacgtgggtatacagcttggtggattttcacaaactgcacacacttgtggaaccagcatccagatcaggaagcaacagatgtcctttaaaacatcaagaactgggccggacatggtggctcacgcctgtaatcccagcactttgggaggccaaggtgggtggatcacctga

SEQ ID NO: 31861 - DNA, 2300 bp, Homo sapien
gatgtttgactcttgtaatttttgttttaaaaaacacatgtagcagaatgaaggtatttgttcttcccatccccactctgctgctgggcagaggatattttagccatagaattcactaggattctttgtcagacaggactctattctaaggaatgggagcactgccatcatcctcctggaatggagtcagggatgccccccaggacactggaccccaatgggcaaaggttctcagcagcttcaacctaaaagaggcccctgaggggagaagggaccctgaagggaggggagtggtataggaagggaagggacaccattcaaggtaggccctgtgtcaactacaattcaaccctgtgagtgctgtaaggaatccaagacatatgaggtaaagatcctctacacacaaggaagtcaccacccagctggcatcaaaagccatattgatgaaagacaacgagaaggaagagatgcattgttagtgttgcagggagcacagtggattggggcaggtggcctggatcctgtctctggccgatcactgctggagggaagccactctgcatccctgggcctcagtttcctcatatagaagtgaggcattaaactcaatttcaaaattaccttctgcctctgagattctggagcggatggtttgctgaaggaggactgagcgtgggcacccggaattgtgtcatttgatgaatgagtcagactaggggcgtcagaaaaataatgtcttcacaatcaacacaatgggataggcaattaagaaacactttgccgatggcttgagtgtctgttccactcagaggatacattcccgaagagggatggggtgactcatcaggcggctgtaacctgatgaaacagagctatccaatttcctcgctccaattccaggcaaccaaattatcttaatatggttttccaaagcagtttccccaggcaagaggagagacagacatgagtttccagactaagcagcaattgaaaattgacatttttttataggagtaaaattatatcacatatgagaaatgactgaaactttatatgaagtagcattcaaatgcaaagggtgtcatcattagcaatatcaccattggttattattctcatgctgatttggtcagcctttgaaccagtttttctttttttttttcgagctggtaaatcctgggtgacttggtgagtatagaaattctgggtatgcaaagctgatcaaagatgataattactgatatttagaaagtgctttcacatacagttatctcagtagctctagagagagaaaatattattttccccagtctgtagttctggaaggctcagagaggttaggtgacttttacagaataatagagctcgtcagggtttggctggcagtcaaacccaggtggtcaagtccaaatccaactcacagtgttgctgcttcttaagcgagtgattatccgcccatccagcacaccccctcacatatatactcacaaacatttactatgcaagatccatgcccagtgggacagctgcaggagggatcagaagctgaggcagagaaaaaaccaaaatgccaatatattctggagatcatagaaccgtgtctctttccctcttcaaatgctgctaaaagcacgtagagtctttctggacagccgtcccatggctcagtcttttaggcttcccttagtccctggactcaggctgactctgctcatggtgggtgtagaaatctcccattctgcttagatggagtctctggggtgtcaggcatacccctgttgcctgcatctacctccttttctgtctggttgtttctgctgagggtggctagggaccctcaactgagatggccccccacaacagcactgttggacctaacacaccctgggttcccggcttctcagccactggagctgccagtctcaaattaccggaggggagggagggcaggcctggatctcaggatctcggtcctgcatgcaatgcaagcctgagctctcccgccataaggctgcagcggtgtgggctccttgtgcccagatcctttgtattcatagggggaagtggaagaccacgctgcctgactgagactttattatagaggctcaggaaaaagatgaactggtcccattcctgcatctccttttgctggatctactttgctgcttccagactgagaggtgagaggctggtgacacgtaacctatcttgtctcatctggggctattgctttggtgggaggtggggcaggacagggaagacaaaacagatgattcaaccgcatggaagtgttctgtgct

SEQ ID NO: 31862 - DNA, 2300 bp, Homo sapien
ttttggatctttctgcatctctgaatctcgagaataataataatacctgtgtaaaccatgcactgggttgtgtgatatgtcacataaaatagtagaaggagaaatagaatgatgagggccaggcatggtggctcatgcctgtaatcccagcactttgggaggccaaggcgggcggatcacctgaagtcaggagttcgagaccagcctggccaacatggtgaaaccctgtctctactaaaaatacaaaaattagccaggcatggtgtcaggtgcctgtaatcccagctacttgggaggctggggcaggagaatcgcttgaacttgggagcggaggttgcagtgagccgagattgtgccactgcactccagcctgggtgacagagcgagaatccgtctcaaaaaaaaaaaaaaaaagaaagaaaagaaaaagagaatcatcgccctcccccaacacccattatgttcctctcagggaagcaaggcaagaaaggagagaggaagagagggaaaaaagagaaaaagggaggcccggatgaggcgttaggaggcgggtcagctcactgtgatagagggcaagacgagaaatgttgtgaaagcaaaaggagctgacaggcagggctggggggcggggaggccctgttgccacgccccgggcaggcagataaaacggtcatttatggtacccaccctaacagattagtcagtcagacccaggaggagtgaggtcaattgccctttagtcccaggactaaccggaagcttctgcaacaggaggacattgaaaataagatggaacccatccacataaggtaggagaccaaaaaatgacaacaacccttctgacattttaaaactgtcaagaactgctctgtgccattttctaggctcctggagctggagagctgtcagttcttggaaataacttctgtgtttctagacatttgtactttatagatgaggagacgggctcagggaggttaagttactccctcaaggtcacacagctggagtgtagaaaacacatgatctcaattctaggttcagttttgttttgctttgttttgtttccaccccagcagatattttaaaggtaggaaatgcaaaattctgagcactctcttggggattggaggagtgggtggggacagagaatgggttatcttatttgcctatcctgcctgtgggtgtgattctgcaaccaaagccaattctggcttcttctctagacggtcttggtctctttttagcgagtgggcttgactgtagctaagtaattctgctttttcatgtcttagatgtcccactcagtcctccagtagccgatgagtgcgtgctgcttgcatgggcccaagactctagcaatctctataggtagtttctgtaaaaccaggcagatagatcatccctgggcaccctctctttatctcattaaccctggtggtaccaggaggcacctgacattctaatagtttggtgccagcaagtttctgttatccttcagttgtaattgttaacttgaatggaatgcaaaacttctggtttggagcagagttgggtcttaactgtgaataacttgaaggatatggaaaatgggaagtacctttggttattgtggaggatggtttatgagcactttttgagttgcattttctctgataaataggaatatgtggtcaatgtggagatgctactgcgtctacatattcgccggtgaactccaccctttattaactcttgcctttgacagtttttcagctcagcaagccaagacttgtttgaggattagaacaatgagcttatcgttatgccacctttaaaaaaatcgctctaacgcttccagcgtcaaggtttatttctatgagcctttccggcaactccgcccccaccacctgaaagtttgacattgctttcccccttaaggggaagtgtggaaatagagcctgcttgttcattttcattattgtacattacatgatatcttttcgaccattatattgtgttccctcagtggtgtttgctctgagggtgggacacaagcctgtttagtgtctcgtaaaacatttaccaaaagcactgagccatggtttttgaagggcattccgttgccagagtgtgggaggagagagcaagcagggaaagagagcgccaggtgcttagcaggtacgtgcttcctactttagtatattcatattaaaaatttcaaattgcatacgatttgggttcccttctgcggaaggggcagggatggtgaggggaagacgggggcaaaagggatttctttgcaaactctattttttagt

SEQ ID NO: 31863 - DNA, 2300 bp, Homo sapien
aataaataaataaaagcaaagcaactaccttaaaaccccaaattctggcatttgtttatatagtgatccttctgtatccatggggaattggttgcaggccccccagattttggatgctcgagtcctctatataaaatggtgcagtatttgcatatgacctacacatatcttcccatatactttgagtcatctctagatgacttagaatacctaatccaatggaaatgctagtaagtagttgttatgctgtattgtttagggaataatgacaagaaaaagaagtctatgtgtttagtacagacacagccgtccttttcacatttttacatttttaattttttgtgggcacatagtagtatatatatttatggggtacatgagatttttgaatattcttgatctgtggttggttgacttcagggatgcggaacccacagacactgagggctgactgtacgtagaatatatgcctttgaaacactgttttggattcagattttgtgtcttcaaacttttttttatcaaaatttaagtatatttctgaacagtaaggcattggactccatgccagggggtgcagaggtgagtgttctggtgatctagaaaggagttgagggtcgggcacagtggcttatgcctgtaatcccagcactttgggaggccgaagcgggtggatcatttgagatcaggaattcaagaccagcctgaccaacatggtgaaaccctgtctctactaaaactacaaagaaattagccaggtgtggtggtgcatgactataatcccagctacgcaggaggctggggcaggagaatctcttgaatctgggaggtggaggttgcagtgagctgagattgtgccactgcactccagcctgggcaagagggcgagactccatgaaaaaagaaagaaggaaggaaggaaggagggaaggaaggaaggtggggagggagggagggatggcatttgaggacacgcaaataccctaatgcagagtggaatgagacaggtgacccaagaggggtgctcatgggaaagacttctgtgataggagtaattaatccctagcatgcaggggatttactcctcttgggtttgcataaagaagggcacgcaagggacaagaggtcaagtgagataaaccctaacattagaataaggggctggcccgtgctgagggaggaaggaagatgaggagagggatctgagaggaaactatgccacaggtggcggggagagcaggttagaccaggtggggccttacggctctgagaggaggtgcttttggaggtcagtggcttaagggaaatcctgggctgtcaggaaaggccacctcagcccctggcctgtcagcaatggctcagtgaccttgggctgtttttggatctttctgcatctctgaatctcgagaataataataatacctgtgtaaaccatgcactgggttgtgtgatatgtcacataaaatagtagaaggagaaatagaatgatgagggccaggcatggtggctcatgcctgtaatcccagcactttgggaggccaaggcgggcggatcacctgaagtcaggagttcgagaccagcctggccaacatggtgaaaccctgtctctactaaaaatacaaaaattagccaggcatggtgtcaggtgcctgtaatcccagctacttgggaggctggggcaggagaatcgcttgaacttgggagcggaggttgcagtgagccgagattgtgccactgcactccagcctgggtgacagagcgagaatccgtctcaaaaaaaaaaaaaaaaagaaagaaaagaaaaagagaatcatcgccctcccccaacacccattatgttcctctcagggaagcaaggcaagaaaggagagaggaagagagggaaaaaagagaaaaagggaggcccggatgaggcgttaggaggcgggtcagctcactgtgatagagggcaagacgagaaatgttgtgaaagcaaaaggagctgacaggcagggctggggggcggggaggccctgttgccacgccccgggcaggcagataaaacggtcatttatggtacccaccctaacagattagtcagtcagacccaggaggagtgaggtcaattgccctttagtcccaggactaaccggaagcttctgcaacaggaggacattgaaaataagatggaacccatccacataaggtaggagaccaaaaaatgacaacaacccttctgacattttaaaactgtcaagaactgctctgtgccattttctaggctcctggagctggagagctgtcagttcttggaaataact

SEQ ID NO: 31864 - DNA, 2300 bp, Homo sapien
ctgatgaaataaagaaaaatgagggttatttatatatattttaataaatccagtttgatttttcaacttaaaaaaaaattaactagaactgagaaccagtcctggcctcaccaccttggacttacacttaacctgtgtgatctcagtgtcttcatctgcaaaatggggacaaaatagctcataggatcattttgtaaggatcacataaagtaagaagggtgaaagtgctccataaagtagaaagggcctcactaatggaaagggattatgatttctttctttaaatgtgaagttaaatggaggataaagggtggaggcactgataacattttagccttcaataatcactttttaatatttatgaggagtttcaaaatcatttccctctctttcatactgcttttcaaacggcaagggtcattatttgtccggcccagtctgggataagtaactatcccagggtaagacaccaggtcaagtgccaaaatacaaatgagaattaagcatagcagatgggtgattgctgggccctgaatttccttcccgttagtgagcttcatggaatgcaggcaaatttatctccatttctgttgtcaatcttgtaacttttaagtgagatgaaattcagttggctaccctttacagggactttatttcccattgtattcaagactgtcagcaatgaatataaactgtttgtaaaaatcccatcgttagaatcttccagaaactgaggctgggagagattaaatatcttgctcatggcctcacagctggtgagtggcaatgctggtgctacagcccatgtctaactctgaccacacactcttcttcagaaaaaagccataatgtaaataataataagaagaataacaacaacaataacggcagctaacactgtgtgctaggcaccgttctaagctctttgcatgtgttaactcaaccagcaaagaaccatttttggaacattctttcactaaagtagcccggtatttttttctttcccctcagctgaatgacactgcaacccgaaatcacaactctgttttaggttcctggtggtgcctgcttcctcttctagtttgtttagtcacagaattcgattcctgttggcccattccgcgcctacaaacaggcttagcgctccactgaaatgcgggaggctccttaactcttgtataaacaggtaaggcggagggggtggggcgcggattgcggacatctgggtttcttgggaattgggatggggtgggggttcgagccaactccccagagagcaggcaaggtgaagcgagggcttggctgctgtttctaaatgcagtgtttttttgttccctttctagaaaccctccgtaactctaggtcagagcgcactaaaatgagccacttctgaacgagcagcgcccaggccccaggccctgctgcgaaggccccggcaaaggtcagggccccgtccgcgtgacgctcctgcctgcgcgcggccaagccatgctcggccccaggtaaggacgccccgggagctcgccccgggagctctccccgggcacgcgggggtcgcagagatcccacctcgtccagcgacttgtttatggggggaagaaggggagcggggcggttccgatcggcttgaaattcagcagcaggttcctaatttctccaacgtggttctggctgggtttctcggagcagcccgaagggggccgagcgtctgactcggacagatgcccccaggtggagcaggtgccacttctgggtgtctgaaaggcatgtgacttttggggcggggagagaagtccgtctggtcaagtcccccaatctctgccatcaaggccgattttctttgaaccttcagcaaaggtatctgcgctcctaaaaaacaacaggaatgtggcactggcctttagccaggggaggctcagccagcaggataaaatttcagggcagatttacgggaagttgccggtgttgggagtaaaaatctggtttggtgagtttaagggaagggagtagacgagagacaaccttgctactgtgaggcggatggcctcggcagggggcgggcggcgggaggagagagggagggaaccgggaagggcccgcagactagacgctgagcgctcccgtgcgcagcgccccacgcagccgggacgcggcgccgctctgcgggtggaaccgccgcgcgctcccggcctcgggagctgagcccgagagaacttcgctgccttcgggtcgccgctcccgctttccactgtggaatgtgcagcttgggatagagagaaaccagggtttggggagcggtc

SEQ ID NO: 31865 - DNA, 2300 bp, Homo sapien
gggatagagactcgttaaaccttgttttcaatatagtaaactgttacttacattgaactattattaaagaaaataaactcttcaaattatattttgaatgacaatatttcaaagtttatagctagctattgcctcacatcactgtgtactgggtgatgcatgataaaatatatcatgacctctaagacaccttccatatttgtaatcttctgtgaatgtctgtatgtgaaagagagtgatattttgctagcatctgggaataaaaaagatatataataaaaatgaaaagataaagataaaacaagactattttagagtgtgtgtgttgtgtggatagaaagatggcagaaggggggtaatgcaggtatgtacacgaatctttataacaaaaatgaaaaggtgacaaaatacaaatatatccatctttaatttcttgagggcaaggtctttgatcatttcttttttttttgagacggagtctggctctgtcacccaggctgcagtgcagtggcccaatttcggctcactgcaacctccgcctctcgggttcatgccattctctggcctcagcctcctgagtagctgggactacaggcgcccgccaccacgcccggctaatttttttgtatttttagtagagacggggtttcaccgtgttagccaggatggtctcgatctcctgacctcgtgatccgcccgcctcgacctcccaaagtgctggggttacaggcgtgagccaccgcgcccggtcaggtgtctgatcatttctatacattcattattttacttgtagggctgaacacaatgccagggacacagcaagaatttaatatatacttgttaaacgaacgaatgaatgcatgtatacataaaatgttacggaatgtttaacgtattccggggataatgaaagtgggtggatttctgagagaaggggtcagggttagagttctgtactgctaattttttccccattatccattctctccttcttctacagtaatagttcccttatttttagctggacacatttaccagcctcttggttgctgggtatatgactgagttctgaccaataaaatgtgagccaaagtgatatgtgcacctttcaggtcattgaaaaatatgggctgccctctctttccccttcatcctactaaccactggctggaaatggaaatggccttagcctaaagaaggaagggcaaatccctaaggaggaaaggcagaggtggaattaggaccagttgtctttcaactataccagagtttttcaaactgtggtctttgggctgattgcatcagaatcgccagttacctgataaaaatgcaaattactgggtcttagcaactcaaatctctaggatgggttccaaggatttttttttagctggaggcggtggttcacgcctgaaatcccagcactttgggaggccgaggagggaggactccttgagcccaggaattcgagaccaccctgggcaacataatgggaaccctgtctctgttattaaaaaaaattattacagacggcgcagtggctcacgcatgtaatcccagcacgttgggaggccaaggccggcagatcacttgacgtcaggagttcgagactaacttgatcaacacggtgaaaccctgtctctactaaaaatacaaaaattagcagggtgtggtggcgggcgcctgtagtcccagctactcgggaggctgaggcatgagaatcacgtgaacccgggaggaggaggctgcagtgaaccgagattgcgccactgcactccagcctgggcgacagagcgagaccatgtctcaaaaaaaaaattattactatattttaaaaatattttaaagaatgtgtagttttaacagggacttcaggaacttgtgagttaaaaccacggaactacgtcagactacctcaaaaatatccccaaatgtttataaacaaagccaagggcacgcactcaggcccggtgaggtccaggaactgtgcaagaggcctctggctcggaggggctgaaacaggtgtctccgcgcgctgggggaagagcgactctcccggcaacaggtagcacccgccaaatcccgcgggaacggccctcgcgccgcgccccctgccccacctccgctcgcggttgccatgaagacccggtccgggagcagtcgactgccggagactcgggaggctgagctttcctcggcctgagccagccagaccccgggcaccgcgctcacccctcttcgccgccacgtccgcgaaggcctcacgcgcgaggccaggcgaggccccgaggcgcccacca

SEQ ID NO: 31866 - DNA, 2300 bp, Homo sapien
aaaatacaaataaggaaagtggggaaaggaaaacatttcctaggtactggtaatgttttgaaagccttgatgaggagatgataggataagctaagaagttgtcgtatactggccgggagcggtggctcacgcctgtaatcccagcactttgggaggccgaggagggcggatcacgaggtcaggagctcgagaccatcctggctaacacggtgaaaccccgtctctactaaaaatacaaaaaattagccgggcgaggtggcgggcgcctgtagtcccagctactcgggaggctgaggcaggagaatggcttgaaccccggggggcggagcctgcagtgagccgagatcgcgccactgcactccagcctgggcgacagcaagactccatctcatttaaaaaaaaaaaagttgtcgtatcctgaagtaagcgggcttttgaaggaacctgtactctgaggagctaaaagcttgagcaaataaggagctgccgacctagtgactctggtgggaacgtggaacgttagccagaaacttagtgggggtgaatccgaaagattattttattaaacttagatacaaggtagaatggaacaataaggaattagttttaaaaacattttaacatcgaaaaatattagaaccattgagaaatatatgaagttggtccttgctaacgacttggaattattttaagatagaattaaagaaatagataatacgactttggagtataataatttgtaatagtcctttaacaagtaatggatagttttagaacagagaaaaaaaatgtgaaatgtaggccaggcacagtggctcacacctgtaatcccaccactttgggaggctgaggtgggtagatcggttgaggccaggagttcgagttcagcctgaccaacatagtgaaacccagtctctactaaaaatacaaaaattagccgggcatcatggtgaacacctgtagtcccagctattcaggaggctgaggcatgagaattgcttgaacccaggaggcagaggttgcagtgagccgagatggtgccactgcactccagcctggatgacagagtgagatcctgtctcaaaaaaacagcaacaacaacaacaataacaaaaaacaaaaaacaaaacctcatgaaatgtaaaactaaattgggaagaaatggagtttaattaacctttagtgatagtactggaatgggcaacagccacatacatggtataaataattggctgtcatgctctagtgagttctagagaggcagtataatacagagtttaaaaatttgggtcctctggttagatttctgagttagaatcctggctgtccacttagtagctatataaccttagacaagttgtttaatgtatgtttaaacaattatctcaatgttagaagggctagtaattcttcaagaggtcgttaaaataatctacataaagtagcattcagtatatcttcattaatattgtcaatacatatatttaaattatttttcaaaaattaaaaaatgtaagacattatttcttaatctgttatgaagacataacatttgcttttctgaattttttcttccaaagtttcttttggaaagttagtattttaaaccatatccttgtgtgttcccagatctgactatagcccattcgtttttatcttggaaaataaatcttattttctctatccagtattagtctcgagactgacggcattttctcttctgtgtctaaatgacttatatgactacttggatgactatctcatagcaacttggagaaaaacaatattaaatattttcaatattgtttttgaaaagcaatattaaaatgaaacagaattaactttattgttctaatttttaagtcaacattttaatatctatttagttttaatagatattttccatgaaacacttttattggtaggcaaaatgattgaaaaattatatgatgataacaatatgtaaaaagtttttaatggtgctatatttaaaagcatttctttttaaaattcagatacagaattccttaaagatcactctcaaggaggcatctcagtggacaaacttcacgttcttgctcaacagcagtatgaacagctaacacatgcaatgaaatgtaaggttgtcataggcaccatcttgttaaaataaggtgtacattttagaaatattagtctttcacgatctattataatcaagcaatgaagtgtgagccatgagcacattttccagaacattcagtcttactgccttcaaataacaaaatatttatctttaccaatttaatctgtttttagaa

SEQ ID NO: 31867 - DNA, 2300 bp, Homo sapien
tgcacatgcaaaaggactcggctatttacctgaagattgactagctacactaaagaaaatgaactccgccatccgaccttccatccagttgctgatgctttgtcttcagagaatttacccttaaccaagcagtgttagacaagcatgttctctcgtcttgccaccatcatgtgatatgaaaagaagcatgaataattttttttgctgtaagttacatcatgcgcagtggaaggtctttttcttattgtaaatattgtgaacattacttaacttcacacacacacagagaagagtgtggccccacccctcctagtgaactaacgctgcgtccttggaatgaatgatgcgtgagttagtttcactgtcttcttggctggacctgtcacaagcaacctttaagtcctacagcactttgccctgttttcaacattggagtaggcactgcatagcagataccattgaattgctgtaaaaataggatggcgagtttgtgttttaatttttcataaaattgaacctgttggttgacaaaattggctgttggcatcagtatagaaaccaactggcagctttccctgacaagctctttgacacatggacaccatttcatgtctacagctgtttgtgggatgttggaaaaaaatgaaacttcaaaattgatgaaaaactaaattcgaggaattaaaatcgaacaaaacatagcctttcttttccgatggttttcaaactgattatttttaaaagagattaataaaatcataatgcattttgggtgggacatatttcaaacttctgccttatattgtacggtgcagctagagaattatagttcactatggccattctctacataaacattaagatgaaatactcctcatcagcctttcatccttagtttgagaattagctgatatgcaatttgaagttgaggaaatatcattgatatttctatcatgcacgattattttagatttctaccaccgtgtgatttttgctagtccatgtgctagaggtaaacgttctgctggaattctgcatccagctctatccccctctgatgctttttgcccagaaagctgtctgtccatcatgtattgtccatggcaacaaattacattaggttgaacctttccttgattttatgtatttaatattagaatttgttggactcaactagatatattttttaatttatattttttccattttactttgaagatttgaaatgttcatacctgagcaaagtctacacaggagtaatggactgtttaacaagtttcccaaaacagcattttcctgctccttcgtatgtaggtgagaaacttagctggaaagacatacaaatttagactctcgttgacattgtcgttttaaaaggaagttgctaaggcgatcaatctcaatattagtcttgtttacttcttcttaatgtcaaaattaacatttacaacatccaattataaaagtaatgctttatgtttatacactgctatgtacttgtcaaaatggtttccacattcttatcacatctgagccttaccaggtagagaaggtactaaatacactttagaagtaaaaatatgaagtaccgagaggctaaacccactggcctaagatctcaccaaagttcatgaaaaccaggactaggacccacggctcccaaagcccgttcttgctgtgttgtgctgcctccatatccgtcaggaagagcctttccagaatgattctgggcatatactaagaagagcaggtatggaaagatctattgtcagggaatcttagaattccctacacgagtgggagaaagatgtccaaattccttacgcagtggtattcatgatggtgccctatctaagtccaggactgttttcctacagcgtgcctcaaaagtgttgtagagggcaggattctacattcacagcctgttccatctacgagattttccagatgctacttgtggtagacattcctaactcatggtacttagccaccagagatcatgatggaatgagtgggtggcttttctacctgccattccctcagaattcatgaggggtgggggacagggggaccggaattgtcttagcaccccaatgttatgacaaaactatgctactttagaaacgcagtctgtttttcaccaattgacatactactgatctgaagtaaccagtgccatcataagaaattactgcattaagaaaatccttgctgtgccctttgaaaagctgttcagaaatcatttacagtgatctttcatctcggtcgctgtagtgaaacattttagtgtgataaatttc

SEQ ID NO: 31868 - DNA, 2300 bp, Homo sapien
cagcatggagttgagagaagggggcaagttggagagagcaggaggaggcagagttggcaggacttgtcacacatgacttcctgccagcagaccctcagctgtcacacttgacgtaccctgtggacatctggcagacccatctatttgttgcttctgccctgctatagacagagaatcagacaaccaaactcactggaatgatgtgtaaggaaggagaggcagcctttgaaggggtgacaggtacaatcctgttaacttgtttcatatctctgagcttgctgctgtctgttctggctgctgaaccccaagtcttaaaccctcttctagcctcacttgcagtttgtgttgtgttccagacagttgtggttgccaaagcagtttactgtcaataactcttccaaataattgaagtgttactgatcgtagattcagaaacagcatgagttaaatcttgccctccctagaaagacaactgttaactagaaaagcataatataaaattttctgcacagaacctggtacttaggaggagcttagtaaatgttgaacaaatgagaaaacacctgatcctcatttaaacatgaacattaaagttgtctgtacacctgtggtgtgttttaccaaacccaaacaagacctatagttaaatactcccttgattttccatgtgtatttcctattttctgttcctttctttgtaaaaggagcgtatgagactttgaatatagccaaaaacatggctaatatgctttgcctattttgctcttttttttttttttttttttttttgagacggactctcactctgtcactcaggctggagtgcagtggcgcgatcttggctcactgcaacctccacctcccaggttcaagcaattctcctgcctcagcctccctatttcactttgttaattggctaatcaaataacttacgcttgcccagaaacaattagaaagaggaagtactttcagtgctcacagaatacagtcagtgagagaccttggattttcctttccaactcatatatttatatgactagtggctagccaggactcttacttaaagtgctgaaagtgctgtcacttagccaattggacattttctgcttccatgtatatggggggaggggcgctcagctagagatgacaatgttggggtgcctgtgggatcttggcttcaagtcagctataaacaaaaggtgtcttaaaagaggtagggattacaaaagggtgtaggggtgtactgctaagtgctttgtgtaaattggcagatgatctgtaaacactttccagctcgattcagaattttctgcctcttgaaatctgattattcagatttataaaactacaatttggtttctgtctttctgcccaaaggctttctggctgtgggctgcaatacctcccttccccaaccacccctccccgccccccatttcccccactcgccccacaatcaggatcgtagaaacccagcctggtgcggtggctcacccctgtaatcccagcactttgggaggccgaggcgggcggctcacttgaggccaggagtttgagaccagcctggccaacatggtgaaaccccatctctactaaataggaaaaattagccaggcatggtggcgggcgcctgtaatcccagctgctagggaggctgaggcaggagaatcgcttgaacctgggaagcggaggttgcagtgagccgagatcgtgtcactgcactccagcctgggcgacagagcgagactctgtctcaagaagaaaagaaaagaaaccagaaacccagcaggcctagagcatcaactttttctaaagaggttcagtgggtttgaatgaagtttctaagtcttgagagtccaaaaaggaaacgttcgttacaggaagggagtatgttggggtgggggatcctccttgccggccctgagccagtcccctagcagctggagcatctggcgggagcacctagcgggagcacttcacgggagtgcggccgggtggggcggggccacgcgcctccccagcagccaatgggcggccgcggcgggcggggcagggagggcgcagggaggcgcgggcgccgctctcttcaacttgagcccggggcagtgcgcgcggctgcttgagcgacggcaccgctggctggtgccggcaccctggggcttgtcgtagcacctggggcggcatccccgcccgacttcggaaggaccgggaggcaaaggtgaggaagttggcgaaggaacggctctcctttgtttgcaggtgcgttcagggggaacgggggtcgagcccaagctcgctcg

SEQ ID NO: 31869 - DNA, 2300 bp, Homo sapien
agagcaacaatctggaaggagcctgaacccctgagtggcacagagctgttcttccaggtggcagtgcccactgcagctgtggcatgagaactaacctctggcactgaagccagtggactgcagagtacttgtggcagcagcctgccctatacccttttataatacacagaaggctgaggtgagaagatcacttgagcccaaggtgttcaaggctgcagtgagctatgatcacatcactgcactctagcctgggtaacagagcgagacggtggctcacaccagtaatcccagcactttgggaggccgaggagggcagatcacctgatgtcagcagttcaagaccagcctgaccaacacggcgaaaccccgcctctactaaaaatacaaaaattagctgggcatggtggcgcatgcctgtaatcccagctacttgggaggctgaggcaggagaattgcttgaacccaggaggtggaggttgcagtgagccgagatcatgctactgcactccagcctgggcaacaagagtgaaactcaatctgaaaaaaaagaaaaacttactcaagcttaactctacggaacagtagcaaggctaagccgtgctttcagggacccccgaatgctgctagtagaagacatggctaggaagggagatagagactgccaaaaaaaaaaaaaaaaaatgggccctttccacaacgactttctatatacagcagctacaaagatcgcctcgttccattctgagtatgttattactcaaatgttccttctatgaagagctgggctgtgctgagttcccatatctgggtcccccgttctttttcttaatgctttgaaaatgtggaaactattctcagctcatggacccacaaaaacgaggctcaggaacatggtgtgtccacctttgctttccattcactcatgtggtcttatctcttcaatgaagaagccagactgtaaggacagggaccatgccatagccttctgtgtcctgctgctgcctaacatagtatttaggacgtatctgacccagcctctcctcccctgccaaccccgggacatttagaccattcaccatctcttgtcaagatgaacagagtagcttcccatttgggctggcaaaaatacctggggtgtgttttttgctctgccacaaactacatgggtcacctaaggtaatcacactcttctgtcttcagtttcctaacctctaaaataaagagactgaaagacactaatactaaagcaccttttaaatctaaaaacctatgagtcaaagttttgcatattctaaataattaatcccaatattcctcaggatccctgaactcctccacaaaattaagcagtgttttcaaaagaagtcaaaacaaagcagcagaacagcactggcatgaaaacaagaacataaagtacatgtgacaaaggccttttttaaaacatcctaaccaggcacaggggctcgcacctgctatcccagcactttgggaggccgaagtgggaggactgcttgaagcctggagttcaagaccagcatgggcaacaaagtgagaccccgtatctacaaaaataaaaataaaaaaaacacctgtagtcccagctaactcaggatgctgaggcaggaggatcgcttgagcccaggaatttggaggctgcagtgagtgatgatcacgccactgtactccagcctgggcaacagagcaagaccctgtctctaaaaataaaaagaaataaaacaacttgggccagggtcttggtggataaatacagctgggaataccttagaagagaatatgaaaaaaaattcggtacagtggacactatattctttagacaaaagttcctgagatcataatcagatagaacaatcaagtcaaagataacctcatttggaaatttatgaataatctatgacacagaaagattttattaaaagttgttcatcaaaaccagaaaagaaaggtattaaacaccttcaaggaagagaagtttggctacacaatctgtaagcataagcaacatcacagggtaaacactgaacctgaataagagagcactgtttaaaaagcactgcacacatcatgactgttgatggttgtgtgagaaaacattttaaatggtccattttcaaggcatgataaatctaagtcctggcagccaggctgcaaatgtaacaaaccacatggctcatgcacctagaaagtcacaataagctaacagaatgtagaggaggggtcagcccattaaagggaagaaagttttcttattgggaaatgaaaattaagcggggaagggaatg

SEQ ID NO: 31870 - DNA, 2300 bp, Homo sapien
taaaagtaaatatagtggtctaagttcccattttattttgaaaagctgcagtttaggtgcctagaccaaaaatgaaaatgacaccacatgtgcaatagtaataatgggtctaaatttgaagtgtctttgctctcagagaggcttgcagagtttggtaagtgcatgttgcaccaggcgccatggcttacgcctgtaatcccagcactttggaaggcctaagtgggaggatcacttgagctcaggagttcaagaccagcctgggtagcataatggaacccccatctcaacaaaaaagttttaaaaaattagccaggtgtagtagcatgcacctgaatagtcccagctactcaggaggccaaggcaggaggattgcttgagccaggaggtcaaggctacagtgagctgtgattgggccactgcactccagcctgggtgacagagtgagaccctgtctcaaaaaaatttttaaacaaaataaatgcatctttcgacgcacaagacatttaagcttagtttttttctgcttttagtggtttttaaaactgtatcaatgttgtgagtaaaagttatgggtcattattcacttctcattttcaaagaacttcagttgaaaagtgatttagctgaaaagttttgatggttgatttcttatacaaacagatttgcctaaccagtcagtaaagcaattcacaagactgtccctgagttttattagccttgcttgcttatttccccaaatcttagatgaaaaatacttgaatattcactaggcctagtagaaagaaaagacattttctcattgtctgaggtggatggagcagttgtttagatttggaaatcagttattgcaagagctctcgcaacaaagccaggcttcatgccttgcactataattacgtttagaaaatcatttcatgatcaagtattaatttgtgaagaagcttttgaagcaaaaaaaaaaaagtagagcttttatgaattagagaaatttatgttagactgtttagagttgttttttgttaggttaaatttccgccaagtgttgatgtcagtctgtgttcttcactaaccctctctccccatcattctcctttttttcttttaagtgaaaatatcttgacccccaacttttggggccctcagccatgggcattccctagtttccaaacaaacacggtacccgtccctcattccacccccaccaccagaaaacagttctgtttggtttatagggaggaaaatgattattatggaattaggtatgctagttattgaatacttggaattatattgtttgcttttaaaattaccttaaggaaataacttcactgtctgcttctaataatgtttagtcatttatttggtaagtaattaaagcaccatcactctcctgccctcgtcttcaggtgataatctagacatagagggagtgagccaacaagttgctgttagagttaacttgttccctaacccatcttgtgaatatcaatgctaacaacagtgtcttgtgttttttttttttcttttcttttctttttctttaaatcaatgtgcttttttcctatgtgaataattatatgtctagaaacagccatggagtgattttgctgttctgaatgggggaaagattaatagtgacatttggaaggcaagtatattgtcagatcttagatcatttaatattttatcctttctgcatggctgtggctgtatatttttcttctttgtgaatatcatgcattctgcagggacacagtgatcgggcttcttgctaggggcattcagctcacactcctgttgcctttttttggtgtctcccattgtgaatgccctaggttccccgttgttttgtaagaacaggagtttgcaccagtcagcattcaacagtccttgcatgcctttctctgcctaagctcacgtacactctctgcctcttgctgggaagacgtttctcccctttgatatttgaggcaatgaatggtcttctcccccattgtacattaacaaggttctattttcctctaggatttgcatgcagccactgttaacccggaccccagtttaaaagagtttgaaggagcaaccctacgctatgcatctttgaaactcaggtaggacattagtaggatcgacctgctgtcaatgtatggctttgtgcagatagtttgcaatagaattctaagtccacttttctgtttttctgcctagaaatgccccacaccctgatgatgatgattcttgtagtatcaacagtgacccagaagccaaggtttgtaaagacttgctttcagccaccaggt

SEQ ID NO: 31871 - DNA, 2300 bp, Homo sapien
ttggagaaagtttgtcatatttgatgtaaatgaatagttgtaaatataggaggggaaaaaagatctttggcccagtcataacacatataatgccagtttccatttccttactgagttttgtgctaaaggatttccttaagagtgcccgtgttaagtttttgtaaaatcactatacagagcctttgtttatttaaatctgtaaaaggtgattgttggacatttgccatctaactcatgtttccataacatgagagctggattctgacagtcttaatactgtttttagcttttgctttacagatacccttatgtccaaagagtaaatgcattaaaaattttaaaaaccacacacacgcagagaactgttttaattaggtactgaagacttttctgagtacttgttttagaaaatactcttcttttactttctgtagcctcaacatatagggtcccttggggataatttctgaaattctttttgtgaggtaactttgtttttcttgtttctttataaatttctccacaaagacacaattatcttgggtcttcctaattcatcatctgattatccttttttaaagttcaacttaacaacaaatattgctcacatgtaaacagtgatgacaatttgaggccatataagcttgttttctttttgaaaaagaaattctagcttaaaattttattttgtacttgatatttcaggtcctcatctcacatccatattagtagccctacagtggtccaaaccgaaattggtcactggcccatctggaaatatgagaaaaattgggcatctttctctcaggaaaatgtacatgtacaaaaccccgcacccatttcaggggttcatagctcctccgagctaacaggttaagattgccctaggttattaattttctcttcataaagactgaacactgcttctgggggtagagtgaggggaaaggtaagggattgggcaacattcctgccctttattcattaagagaaattattttttaaaagtaaatatagtggtctaagttcccattttattttgaaaagctgcagtttaggtgcctagaccaaaaatgaaaatgacaccacatgtgcaatagtaataatgggtctaaatttgaagtgtctttgctctcagagaggcttgcagagtttggtaagtgcatgttgcaccaggcgccatggcttacgcctgtaatcccagcactttggaaggcctaagtgggaggatcacttgagctcaggagttcaagaccagcctgggtagcataatggaacccccatctcaacaaaaaagttttaaaaaattagccaggtgtagtagcatgcacctgaatagtcccagctactcaggaggccaaggcaggaggattgcttgagccaggaggtcaaggctacagtgagctgtgattgggccactgcactccagcctgggtgacagagtgagaccctgtctcaaaaaaatttttaaacaaaataaatgcatctttcgacgcacaagacatttaagcttagtttttttctgcttttagtggtttttaaaactgtatcaatgttgtgagtaaaagttatgggtcattattcacttctcattttcaaagaacttcagttgaaaagtgatttagctgaaaagttttgatggttgatttcttatacaaacagatttgcctaaccagtcagtaaagcaattcacaagactgtccctgagttttattagccttgcttgcttatttccccaaatcttagatgaaaaatacttgaatattcactaggcctagtagaaagaaaagacattttctcattgtctgaggtggatggagcagttgtttagatttggaaatcagttattgcaagagctctcgcaacaaagccaggcttcatgccttgcactataattacgtttagaaaatcatttcatgatcaagtattaatttgtgaagaagcttttgaagcaaaaaaaaaaaagtagagcttttatgaattagagaaatttatgttagactgtttagagttgttttttgttaggttaaatttccgccaagtgttgatgtcagtctgtgttcttcactaaccctctctccccatcattctcctttttttcttttaagtgaaaatatcttgacccccaacttttggggccctcagccatgggcattccctagtttccaaacaaacacggtacccgtccctcattccacccccaccaccagaaaacagttctgtttggtttatagggaggaaaatgattattatggaattaggtatgctagttattgaatacttggaattatattgtttgc

SEQ ID NO: 31872 - DNA, 2300 bp, Homo sapien
ggcgcggaagtgtttcctgggtgagcgcggcagcgggacccgtttccggaaggctgattgcatcaggtgtggagcagggcgcctcctcggcccaacctggcggcctctgcgcctgcgcgcgccgccccgcccccccccccccccccccccccgccgccgcggactccaccgcgggttttcctctccgtcgggaagagaccgacctgggaggggcaggctccgctcacctaccccggacccccgagagagagcggggtggccaggccgggttccggggatctgaggggagctgtgaggtccgggaatagagtgccttggaaagaggacccgtctgcaaggttggaggctggtcgatctccgctcctgacgggaatggtggtcttgggctggtttccttgcctctttggccttgaagatcacagactaagaaccacaggctctccagttcagagagcctgtattttccccaagaggtctactgtggccctcgactgtccttggtccacggacgtgttaggtggatcttggggtgcagagactcagtcccaagagtaaacacttttcatgaatttatagggatttctctgtgacagtattgtttttatgttgtaggaaggagggacatgattgctggcctccagctcggtctgagggagataattgttaattggagaggttattggagtgcaaaagtcagaaaccaccttccacaaggcagcccccctcccatcccttcgtaacaacctcactgagtctgcatgagggtccctctatacactctattcgcaccttgtgcatttccctcccagcactctacctgtttgaaataaccgttttgagtgattatttgataggtgtctgtcacccggccggactataaattccatgaaagcaggggcctgggcttttaaattcaccactatcctcaggcctagtacaagacctcgtggatccttaataaactcatgtaggaaagaataaagtaatgcccaccccactgcatagagtcctcataggaagaatcacgtgagtttttaattcgagatccttggtaggactgtgtgtgtgtgtgtgtatgggtagggttctctaaagtgtatagtcctcacaccagcagcatcagcatcccatgggaacttgttagatatacagatgcttgggccccaccacatatctacccattcagagacacagattgggactcagggatttgtacttcagcaaaccctccaggcgattctgatccaggctccagtttgacaaccgctgccctggtgaagagcaatcctaaggatactttggggatgtcattcacagcgtctggggcagagcacggtttaccgtttactgagactcgactcttatcagggctttgtttgcacgcttacaattagagttatagataatattattggcaatggaaaggaaaacctccttttcctctccggcagttgtatctctcccctgatattatcttgtgatttccggatcaaagaagagtgtgtgtgcggcatatgcctgggggtggggataggaggtagaaggaaggagaaggtgtcgcctacaacttgcagttagcctgggtgggtgtgggcagctctcctgtggggacattttcctattgcaagggaatgctggcgtgtgggagaaaagccagggctaaggtaacccaactgccttttggtgcagacagacaccagccacacggaggggatacccgggctgcactgcacgtcctgcctttgggtcttactgggggacccattgcctccctgcgtgttcccaggcgattggggagggtgcctcccgcaggccctgccgcctccacctgcaggggtcgccctgggagcgcggcccgcctccttctgcccggcccccaccccccggccccgcctttctcccattcggccccctccccgccgggtccctccagccttccctcgcgcagccgctgccaaagcctggagaagtggaatctcgtcagcgccgctccctgcgcgggactcgcggaacggcactgagcatgctcagttgccggagcccgttctggtctcaagtaggaagctagtgcgctgtaaccgcatctgatctgggcgctccgggaagggcgagactggagcagagccgctgggcgccggagccgaggcgagcgccgcgcgcaccactggtgagcccagctttcttccttgcctttgccccggattccggggcagcacgagagtgctggggaaacacccgggtagcggcagcagcgtgcggcgagcggctgcgggttcccccggcggcttctcctctgctcc

SEQ ID NO: 31873 - DNA, 2300 bp, Homo sapien
aatgtcacttccttcaggacgccttcctgatcccctccactaggttaggtgctcctgatctctgctccctttcatacaactcttatgactgataaaaacagcacgagggggccaggcgcggtggctcacgcctgtaatcccagcactttgggaggccgagacgggcggatcacgaggtcagcagatgagaccatcctggctaacacggtgaaaccccgtctctactaaaaatacaaaaaaaattagccgggtgtggtggcgggcgcctgtagtcccagctactccggaggctgaggcaggagaatggcgtgaaccggggaggcggagcttgcagtgagccgagatcgcgccactgcactccagcttgggcgacagagcgagactccgtctcaaaacaaaacaaacaaaacaaacaaacaaaaaaacggcatgagggaaatttccatgtttattgtgttcatctttgtatgcctaattccaaactttccaagctcggcacccagcacacagtaggttcttaatatttgttgagtgaatgaataaatgaagtaaattggaaatgtaatttgtctttgtctaaaggcaagaactcattcaatataacctagtcacttgtcttgaccttcacctctttttttctttaacaaccttattgagggaaaatttacataccataagattcacccattaagctcctcttactaatttttttctctctcatttttgtgtgtgaaggtcattttctaatggcaaaaatggaaagaaaatagaagtagaatgttgtggaatcttagataaagaatgggctcttggagcccagtttagcagggtttacttctcagttttacttttcaattgtgaccgtaagcaaattaacttctctaggcctgggattctgatctgtaaaattgcactaatatgagtctcttcacggctcctctaaggattaaatgagagacacatgcaaaggatccccaaaaacaataactcaaaaaatgttgattccctcccttccctctgtcatctgttaacctcaacttcctaaatagaaggtctattcttttaccatcatcattattctcttcggtgcctatttttaaaaaatactcaaccttcttgcttccttcgctacctaagtatttctgcaagcccactttgttctgcagcttagctttcctggcacaattcttatagattttggtcccttttaaaattcattcttcagcaaatgctttctctctccatcttttgactagagatcattagagatcacctgagatcattagagaacagtggtttccttggttgccattccctttcttcttcattgggagtattctgcggtgaactcagacattttatttttcaaagcttcccattcttttaaaaatgcttttccttttacagcctctcgctcaaaatcatacccatcttttccctggatctgttttctcaagtctccaatcgcctgccttctttgtgtcttgtattaccctcacatcccccagctttctactgctctcccaggaccaaccatttcttccgcgggagtcacattacatcagcattcctaatgcagtatctgttatctaccagattctgttttattctaggtagtcacttaaaaacgaacctcggtactggtctgacttaacatggaggaggaattgtctaaggttaaacgcaaactgctgagagatttggggcggggggcacacatttacattcattcgtattaaatatatacctgttgaatttgtgctttttctcaaatgcttcagagactcgagctttagagtaattgggatggtgaaaggatgggtttccagaaacttcgcccaaaattaaagactccatcaaaaggactgctccatacactcaaggaacacccaccaacaaatcccgtctccacaaccaccagattatctcaccggcgagtgagactgcaaggtttgggggcccggccgtaccactccgcgctgcgcacggggggttcgtacccatctggccgcgaccgtccgtttccccctcgcttggttctgcccctgctccccctgcacaggcctcacagtgcgtctggccggcgctttatagctgcagcctgggcggctccgctagctgtttttcgtcttccctaggctatttctgccgggcgctccgcgaagatgcagctcaagccgatggagatcaaccccgaggtgagcgccaggtgcaccgctacccggagagcgcgaggccgagggagggggagccgagtcgctgatcggttcggttttgcctttttctttgcatttgccttt

SEQ ID NO: 31874 - DNA, 2300 bp, Homo sapien
tatcccatatacttcatagatgtatataccaggtatatacccacaaaaattaaaaatttaaataaataaaaaaaaacacaaaattattagctcctaaagggcatagtctgtgtccccttgtggattcttctgtatcttccacatagtaggttcttaacaactatttatggatattattgatagcagcactaggtttgaattctattatggttctaagtctgtgggtctttgctagcgtgaatttgtgattggtaaaagctcagaaaaagcaaatgttaccttatgattataaaccttaaaagatgtaaaatgtattttcactgaaggaaaaaagttttatttaaatgccaatttcaatgccagatatattagagatatgataaaatttaatactcattttcaaatggatttagatataccatctgggctagctcgcttcccttcctcctagttactccatgcagtggaacctgcctatattagcccattctcacactgctataaacacatacctgagactgggtaatttataaagaaaagaggtttaattgactcatagttccacatggctggggaggcctcaggaacttacaatcatggcagaaggagatggagaagcaagtgccttcttcacaaggcggcaggagaaagagaacaaagagggaactgccagacacttttaagccatcagattttatgagaactcattcactaccatgagaacagcacggtggaaactgctcccatgatctaatcacctcccaccaggtcccttcctcaacatgtagggattacaattcagattataattcaagatgagatttgggtggggacatggagccagatcatatcactgcccaaagccatatattgtattagtgtaccagagtcattttgtggactgtttgctttgccatgtttctttatggaaacaaggtcatcttctgcccacacgtctttagccctttcccatgcttgccttctttatctcttctttgtatacttttccctccctctgttttggacagcagggtggaggtgaggatcagtggtctgtactcagcaactgcttgtttgtcaggtccagctttggtctgtttacattcagtccccttgttcgtgcctttcacaatgattctgctggatgactatatccacctcattttaggtgaggaaactgagggacacactgtaagtgggagtctggacaggactggtaagacagcttggtgtgcagttaggagcaaatctggcgccaggctgtctgggcttgaatccaaccctccctgtccaccagctctgtcccctggtttcctcgtagggatgataacagtcctatcttacagagctggaataaggactgagttagtcaattatttgtaatgcacttagaacagtgcctggcacagtataagtgccacgtaagtgttttcaaagcaaataaactaaagcctgtctgactccaaagctggtaatggtggaatttgaggcctgctttttgttccattcccctattatagcagcagaattggacaaagattaaactcggattctggatggggaacagagatttagaggctgaggcacccagggacctccagccaccgtcagaaacctcttgttagcagccattctgaagaggggaatccattagcttgaggttaggccaagaatactgagctcctccggacccagcgctgggctcacgtaggtcagagctccctggtggcctaccagggtatacccaggcaacaatctaaaaggtagtgtgtgccccctcacccgcaggcgggacctggcctgcctctcccatgctatcattcccgcctggtgctctccacaccagctccagtcttgctggcccgctgtgggctcctccacggggaagctcattcctaccttaaggccttggcatccatctggaattcttcccccaaattgttacacagttaaatctccctcactcatgtcacctcttcaggacatttccttacagacaccttccttgatcgtcacttgggctgtagtgcaaaacagaaggcatgctcaagtgggagtggccaaggagagtttaaaggaagggttagaaagaagtgagccggatcgggagaccattatgggatggggaagcctttaccatacctaggcctgggaggttgagtgggacaagaggagatgaggaaccttctggaaaccccctaaccacctgcaggaagggacgagataaataaatgcacgtctctcttcagctcactgaccatctgcctacctcccgttaatggaaccgcgactcacaggtc

SEQ ID NO: 31875 - DNA, 2300 bp, Homo sapien
acagcagggtggaggtgaggatcagtggtctgtactcagcaactgcttgtttgtcaggtccagctttggtctgtttacattcagtccccttgttcgtgcctttcacaatgattctgctggatgactatatccacctcattttaggtgaggaaactgagggacacactgtaagtgggagtctggacaggactggtaagacagcttggtgtgcagttaggagcaaatctggcgccaggctgtctgggcttgaatccaaccctccctgtccaccagctctgtcccctggtttcctcgtagggatgataacagtcctatcttacagagctggaataaggactgagttagtcaattatttgtaatgcacttagaacagtgcctggcacagtataagtgccacgtaagtgttttcaaagcaaataaactaaagcctgtctgactccaaagctggtaatggtggaatttgaggcctgctttttgttccattcccctattatagcagcagaattggacaaagattaaactcggattctggatggggaacagagatttagaggctgaggcacccagggacctccagccaccgtcagaaacctcttgttagcagccattctgaagaggggaatccattagcttgaggttaggccaagaatactgagctcctccggacccagcgctgggctcacgtaggtcagagctccctggtggcctaccagggtatacccaggcaacaatctaaaaggtagtgtgtgccccctcacccgcaggcgggacctggcctgcctctcccatgctatcattcccgcctggtgctctccacaccagctccagtcttgctggcccgctgtgggctcctccacggggaagctcattcctaccttaaggccttggcatccatctggaattcttcccccaaattgttacacagttaaatctccctcactcatgtcacctcttcaggacatttccttacagacaccttccttgatcgtcacttgggctgtagtgcaaaacagaaggcatgctcaagtgggagtggccaaggagagtttaaaggaagggttagaaagaagtgagccggatcgggagaccattatgggatggggaagcctttaccatacctaggcctgggaggttgagtgggacaagaggagatgaggaaccttctggaaaccccctaaccacctgcaggaagggacgagataaataaatgcacgtctctcttcagctcactgaccatctgcctacctcccgttaatggaaccgcgactcacaggtcagcctcccagccaaaaggggggaaggctatcggaaattaccccgcgctttttctttccatgtcattatcttctcctcttttatcttaacaacacccgccacaattatcttcttttgatttacatgtttattgtctgtcccggcccccaattccctctacaatgtagatacctcgagggcaaggacttccaggtagggtgtgtgtgggtagggtgtgtagggtgtgtgtgtgtgtgtgtgtgtgtgtgtgtgtttccatctctgcgtccccagcgcctggcccagtgcctgacgcatagtaggtgcacagtgactgttggttgactgcatcgacagactaggacacaggtagccttcctggagaagaaaagctcatcagggtcgtttttctttttcttcttacaaaaagatcaggtggctgtgtacttcccggcgccgggccaggggctgccccgccttgcccctacctctgcggccaggaaggactgcaggtgctgcgcggccagtgcccgcgcgtcctactgctccggtgccgcagcgcccgctcccccgggcccgggtgcgccccactgggcgcgcgtctcccatatgatgccagacccatccgcccgcccctcagcagccggcggggcgcagggacgtgcggggcggccagcggattccctctatcgggccgggtgtgaacgggagggagacacgcagcgctcgctccgggttatttttagtccgtagctgtgctccccctccccgggggcggagcggccctcgaaggtggggaggagaagaagctcccggcgcctccgcgctcgctcccgcgggtcactcacggcgcgttggagcccgggcggcgccgggaacagctgccgcggcgtcctctagcagcgcgcggctctcccgggacctgcgccggccgggggcggggagaggcggggaggggaggccggcgggcgggaaggggcggggagcgcgctcctgcggcggcgacggcggcggccgtcctcatcccggcgcttgagaggacgcgg

SEQ ID NO: 31876 - DNA, 2300 bp, Homo sapien
agatatatatctatatctatagatctatctatatatatgtctatatgtatgtgtatgtatatatttaaggctccataggtgattctggtgtgtgaccagggttgagagctgtagggctctctctgtgaacactgtgaagaatgacatttaagggatgaatagaaagaggaacctgcagagaaactgagatagggaagtgagaaacgtggacaattaagtgggagaactcctagttgttaaatgttgaagacaactaatagtatcagcagctaaggcaagaggaattttcaagaaggaagggaggaacacaattgtcaaatgctgccaggaaggcaaataatgaactgaaaagtgactgctgaatatggctaaaaaggttgttagagatctaggctggagcatttcagtagaatggtggggcagaagccagactgcagggggctgagcagtgagtgggaggtgagagggattagacagtgaggggtccttcacattacatcctgctttcttttttttttttgagacggagtcttgctctgtcacccaggctggagtgcagtggtgcgatctcggctcactacaagctccgtctcctgggttgacgccattctcctgcctcagcctccctagtaactgggactacaggtgcctgccaccacgccgggctatttttttttttttatttttagtagagacggggtttcaccgtattagccaggatggtctcgatctcctgacctggtgatccacccgcctcggcctcccaaagtgctgggattacaggcgtgagccaccgcgcccggcctacatcgtgctttcttggtcatcacagaatcctcagcagtcaataaactttgaataagtgaaagtgtgggtattgggagagtaaggattaagttgatgcaacatttttagcctgactggttgggcacatggcagtggcatttgctgagatttgaagcaaagccagaagaaagggctgagcttgattttgtgttttaaatatgcaagggagaagatgctaagtgcggttgtagatatattaagtttgatgctctttttctgattattctgtaagtacagcgttgtcttcaaagtccactccaaatactaccaagtattacttggtgttgatcagaagtagggtttcccctcaactttgtatgcttgacaatatgatagaacttgaaaaaaagaggaaatctaggaatttaagaaaaaagtctgaacagcatcattttgggatataagtgaagtagaactgataggaaggggaacacatcctctttgcctgaggaagttggagtagttctacctctgttatggcatttaaaaattgtatatttaatttttcagtgtatttaacttctctttgtcctcttgaagttgggaacattcagttgtactctgaaccagtggatattgtgacctggcgctgtgccacttgggccagcttttgcttccttaatgaatgcacttccttcatctgttagtgataagcaggcaagtgaggaattcttatctgcatctatggattgaacatctgtttctattccactgtgtttcagttttaacttctttgcttagaaattaatgtgagcaagtgagcctcctctttttaaagccattttggattgagagtatttgttttctgagcattttatatgcattaaattgataatttagattttttttctaatgttttgagtgatacagaaatcatcatcatgggtttccttaaatttctgtggcaatgggcttattaaaaatgtaattttgtgcatggtgatttttggagggatatcaaacttatcctatgggtgttcagttttgtcagagagttatgatacattttattctgcatattaaaaatgttccagaaaggaaagcaaaaaaatcaccatggcaactcagtagaatgcccttattttgtttttctgaaaggaaaattctaaatctgagtaagaggtataaaaaagagcagtgcagattgtgtctctggcttccaggaagtgagctcataaaagaatgggtttgatgccctgggtgactctgtgttatttaggaccccatttgttttttctcataaggaagagctataaaaaggtggcgtatatattgacactactaaaacagatctgccaaagagcctgttgaatttttctttgtaatgcaactttttggagccaactgtaagtgtcaaggctaaggatgaatggatagctgcaggggttggtgggggaaggttcttaaggtgtcatcacaccacttttgacacttcaacactgaaggagtgctac

SEQ ID NO: 31877 - DNA, 2300 bp, Homo sapien
agagaaactgagatagggaagtgagaaacgtggacaattaagtgggagaactcctagttgttaaatgttgaagacaactaatagtatcagcagctaaggcaagaggaattttcaagaaggaagggaggaacacaattgtcaaatgctgccaggaaggcaaataatgaactgaaaagtgactgctgaatatggctaaaaaggttgttagagatctaggctggagcatttcagtagaatggtggggcagaagccagactgcagggggctgagcagtgagtgggaggtgagagggattagacagtgaggggtccttcacattacatcctgctttcttttttttttttgagacggagtcttgctctgtcacccaggctggagtgcagtggtgcgatctcggctcactacaagctccgtctcctgggttgacgccattctcctgcctcagcctccctagtaactgggactacaggtgcctgccaccacgccgggctatttttttttttttatttttagtagagacggggtttcaccgtattagccaggatggtctcgatctcctgacctggtgatccacccgcctcggcctcccaaagtgctgggattacaggcgtgagccaccgcgcccggcctacatcgtgctttcttggtcatcacagaatcctcagcagtcaataaactttgaataagtgaaagtgtgggtattgggagagtaaggattaagttgatgcaacatttttagcctgactggttgggcacatggcagtggcatttgctgagatttgaagcaaagccagaagaaagggctgagcttgattttgtgttttaaatatgcaagggagaagatgctaagtgcggttgtagatatattaagtttgatgctctttttctgattattctgtaagtacagcgttgtcttcaaagtccactccaaatactaccaagtattacttggtgttgatcagaagtagggtttcccctcaactttgtatgcttgacaatatgatagaacttgaaaaaaagaggaaatctaggaatttaagaaaaaagtctgaacagcatcattttgggatataagtgaagtagaactgataggaaggggaacacatcctctttgcctgaggaagttggagtagttctacctctgttatggcatttaaaaattgtatatttaatttttcagtgtatttaacttctctttgtcctcttgaagttgggaacattcagttgtactctgaaccagtggatattgtgacctggcgctgtgccacttgggccagcttttgcttccttaatgaatgcacttccttcatctgttagtgataagcaggcaagtgaggaattcttatctgcatctatggattgaacatctgtttctattccactgtgtttcagttttaacttctttgcttagaaattaatgtgagcaagtgagcctcctctttttaaagccattttggattgagagtatttgttttctgagcattttatatgcattaaattgataatttagattttttttctaatgttttgagtgatacagaaatcatcatcatgggtttccttaaatttctgtggcaatgggcttattaaaaatgtaattttgtgcatggtgatttttggagggatatcaaacttatcctatgggtgttcagttttgtcagagagttatgatacattttattctgcatattaaaaatgttccagaaaggaaagcaaaaaaatcaccatggcaactcagtagaatgcccttattttgtttttctgaaaggaaaattctaaatctgagtaagaggtataaaaaagagcagtgcagattgtgtctctggcttccaggaagtgagctcataaaagaatgggtttgatgccctgggtgactctgtgttatttaggaccccatttgttttttctcataaggaagagctataaaaaggtggcgtatatattgacactactaaaacagatctgccaaagagcctgttgaatttttctttgtaatgcaactttttggagccaactgtaagtgtcaaggctaaggatgaatggatagctgcaggggttggtgggggaaggttcttaaggtgtcatcacaccacttttgacacttcaacactgaaggagtgctactagggtgagtttgattagaatgattctagcagagtgtcaaaaaagaaataatacatagtcaatgaattgatacattgattaatagtaaaaagtagaatcaagccatgtaccatttttgtagagagactggtgggcagatcagttgtcaacatggcatccagtagtagcaccaaact

SEQ ID NO: 31878 - DNA, 2300 bp, Homo sapien
agacaacatggcacactggctaggagggcaggtcaggagccagactgcccagcttagaatcctgggtctgccacctgctagctataggaaattgggcaaattacttaatggtctgtacttttgtttcttcatctggagaccagggataataataatgcttatatccaggctcctgatagcccactgagcacttttgtgtaaattagaaaaggcagctccccagggtggactctatgggcttgggtacagacagtagctttatgtgaattaggaaaacaggactcttccttcagaggagtttgcgtggtttagcaaagagagctcaggctgggtgttccccccaccatgacaacctgtgtaagcagctgtggtagctctgactaccacaccgggtgctgaggagtaaacgagttgatgaagattcaataaaagatgctgttattatcatcatcattattttgaggtgacaagctagagtagaagagggttcagaagagcctgtagtttcgtgcagagtaatcttagaaaatgaagcaatttgctgaaagcccttggttattagcaaaactgtggctagaacacagttgtcttgacttttggtttttgccaatcctgactaggcgttgctacacaactatgtgattcaaacaaaaggaccattgatagaggataggggtgaggggcactgcggtcagtcccagccccaggtgccactgagagccattcaaataacaaactcttagaagatgatgggttttcctcctaaaaccaaacagtatatatgttcctttgtccaggatttaagtgttcatttaaaaatataccatgaagtaggcatgtggggatcacagctaccaccttaatggtggacttgaggaatattagtagatgaagatgtatttctgtaatatttgaactaaacagctcttaaaagtagcatttctcgccacagtgttttctgagtacaactaagtggaaaaaaatacctttgtttcttataagagggaaaaacaagggagttgagctactgtgcaagttaagctacatttttccagttccctgtaaaacctatttcattataaaatgtaacacaagtacagagaattacatgaaacaaatacatagcttagctaattattgaaggtgaacagtcttgtaatgactactcaaatcaaaaattagtattttaccaccctggaagcacatttgttgctatccctcaatgatcactccttccctccttcctaaaatcctcttctcattttccgttgatcacttccttgcttttctttatagttgtgttgcccaagtcaagcccttttaaaggataggctgattgaactgtgatcattctgtctttatgctgagcatttcaccatgttttattttcatttggtaatctaataacttgtttgggtgaattctattagtttcctaacttgagtttgatgcctttttaaatgccaagaattggtgacatacaacagttttgtggttactttggattcttacctaaaaattatccagttattagaatatcaaatagtgaaatcgatcacttcatcagacagctctacaactgttacaggactgtgtgttcttggcagagcctctagttctagttctttgcctgaactcaggaagccaaggggctcaaccccttcttccttcccatcctcattggtaacgtcatgtcgatttgatggctagtatgtgccatttctatgtagtaagcagatgaagagtgagttgaacataaatgtagtgaccaatagtgaactggcaaatgagtgtcattagtgaaaataaatatgaaaaactcctagaaattaatgaggtggcactggacaggttgttgacctgagtattttccctgggctgttgaactactttcagccctagcccccaaacattttattgtgaatgtgttgaaacattcaaaagaaagaaaaagaaagggaagggaaggggaggggagggagattggttcaaagagacccatatacccaccacctagtttcaacaattgttagaattttctttatttgcttcctacacacacattccactctactattttttcggtcatttcaaaataaattatagatgtcaaaaccctttccatttattttagtatgcatctccaaagtgcaagaccattcctttatataaccaccatgccattatcactctttttgtttgttcaaaatagtatttcacttggtcctccaggctagagcacagtgctgtgatcacagctcactgcagcctccaactcttggctcaagctgtcctcttgc

SEQ ID NO: 31879 - DNA, 2300 bp, Homo sapien
ggaaatacatatttcagctgacgtctgactcctttttttccatagttatagcttacctagaggataactttctgtggaactaattcttagcatgtattccaaacccaggtttatagggatttggttgtttgacaacaggaaaaaaataccaccaaatgtatgaagtatgagaccatgctaggctgaaacagcacttctcttaaaacgtgccttcctctggattgtttttgtaggaagtttgtcttggcaagcatttcaaaagaactcgctagacgcctctcttgtaattagctggctttctgctagaatgttaggtctaccttcatctcaaatggtacaaaaattaattcctctctgtcgctctgtccacagtataaaatactagatttctgagtagtttgatatctaatttttcctttctaaaatttaactatattcagtttaagtttttgatttaacttaaacataacattaaaaataggatgattgatataatgttatataggaatggtacttttcctcttttccctcagtgttaaaagaatggtactttttcctcacaaaaacctatatccccagccatggaaagaatatcagacaaacctaaatggaaggatattctacaaaatacccgaccagtattcttcaaaactgtcaaggccatcaaaagcaaggcatatctgagaaacaaggaaagtccagaaaaagttaaggagacataatgattaaatattatatggcattatagatgggatcttaaaacagaaagagcatattagggaaaaactaatgaaatccaaataaaacatggatttagttaatagtagtgtaccagtgtttatttcttaactgtgataaatgtagatgtaccataggaatgtaagatgtaagacatgagttatactgaaactctgcatattatctttgtagctttctataaatctaaaaactattctaaaataaaaagttcacttaaagtaggatgaatgacaataaagataaaagagcataatgcaaggaaactatgaaataggtaaggaaatacagaagttattaataaatattaaatgtcagcctaccacttgatgtatttgtgtcaataaatggcaggataccagtgagtccattggcatattaatccaataaacttttataaatgatgaattggttgtaaacattgtgttttatagcatttgaaaattccaaatggtaactccgcacacgatgcttctgctcacatatttcagcatcctgcttttagaatctgcagaaagaaatagttcatgtcctttagggaggtttaataaaaagcaacaggtggaaaatggattttgcagtagcatgaacagccataaccataaatactagtacctcagaattataccagcagaggactgtaaacacattaatctcccagcagtgcagaaattccattctcagatgtcatctcaatttcaggcacaaagattgaatgcctccatttaaattcaaaacactgaaggaatatgatgatccttttttttcatggggattcatggagtgagtttgccagtttcctcatctataagatggggttgataaatcccatctcagcattgtgggattaaatgagatgatatacataaaatacctaatatgatggatggtacacaggatgttttcaataaatggtagtttactttttattatgctcatgaacattaggatggtcttagaatcccagaactagaagccacttagagatttactttttgaaacattgttattttacaaataaggaaactgagaccagaaggcagtgacttgcctggagtcaggcagcaactttgttccagagttgggactggagtgagtctttgttcctcgggtcccacttgggtgctttttctagatccagatttcctgacagtactgcaaacctactgtgtgctagtggctgacacaaagctctctgcacaattccaatcctggcatctctacttctgaagatgccattccttttcctcagagggaatgggcttctccgcctccctctccaataggtgtggcaatcagctgtcttccagttccctttcactgcatcagcatttcagccgcagcagcctgcttgtggacagagcaggggttggcagtggtgacgactgttttgggaaaggaaatgtaagggcatttcggctgctgtgctggggctgacgaggagcacacaggagagatgcccctcccatctcccagagtgggttggctggagttcattgcggagcatgaggacgtgtgggggtaagtaaaattcattataaaag

SEQ ID NO: 31880 - DNA, 2300 bp, Homo sapien
ctccttctctcttgcactaatcatgcttcatataacatttcagtcaacagtagacagcatatacacaatggtcctagaaaattaaaattcaagttgaatatccctaatctgaaaatctgaaatccgaaatgctccaaaatccaaaacttttgagcaaagacgtaactctgaaaggaagtgctcactggaacattttggattttggattttcagttttgggatgatgctgaactggtaagtgtaatgcagatatttccaaatccaaaaaagtcaaatcctgaaagcttttggtcccaagcatttggataatggagactcaatctgtagcacattttactgtatgttttctatgtttaggtatgtgtagatgcacaaataccattgtgttgcagttacctacagtattcagtacagtcacatgctgtacagctttgcagcataggaacaatgagctgtacatatagtctaggtgtgtagtaggattggccatctaggtttgtgtgagtacacactgtgatgtttacacaacaatgaaatcacctaatgacatatccctgtcattcagcaacacataactatatttatagttttgtgatctagtcataatagcatttagctgaggatcataatccaggttagcatcatctacagaataaggaggcagtaagtgtctagtagtagagaagatgctgatggtggaactgtaactgtaccaaagatgatcaaatattttcagctataccgtttgggatttggagacagagtcctgtgttagaatcacagctttgccactaactgtgtgacctcagtcaagttacttaacctctctgattcttatttttctcttctgtaaaatagggataatgctaaccatgttttaggatgagtggttgtgaggattaaataacataacatgcaaaaaacatcaagtgtagctgcagacacataataagtgttcaataaaagtgacctttgttttttagccatttggcctattctcagtaggtaaataatccaagataattacttgcatttccaaagaaattaaatatgaaaccatatccaatttgggtctataattttcagtgagtcatgagttcttcctttttcagttagtcaggcctggcttttgttcaagtcctggttaacttttgacctaagagtaagctaccttaatttccataactggaatttctgccttcctctggagggttatgccggctctactcacccaggccatttgacaacctgttcttcagggcattaatcagtcctctgtctggaggctgcagggtgctcctctccgtcctgcccttgtcctcttgcccactcccttctcttgatgcaaagctgtgtgtgtcttgtaaattacagccactctgtcccccgcaaagggcctcctgctgcggagtatgtcagaggctcaggatataattgatagaagcagccagcaaaggcacttcctgcaaaggcattggctcccgtgggcatcctagacagtttagaccagtttccaaaactgctaacatgaagaatatttatttttcctttctattgggaatgcagaggggactttcgcgagcatcccagggaatctgcagtgtggcattccagtctttgcggatgagaacatgcctctctgccagtgttatccacagtcctaattttaagcgacagtctggatgatattaaattgaggtttatctttgagtgaccagagttatttttgttttagtcagcctggactattgtaattaatgctaagacactggcgggaacaaggcttttattataatacgagggtgaggatggctttgactgacctttcttctgctggagtttcagtgttttagtatgtgctgcttgtgctggaaagaatttataatcacaggctgtcaaagacagccattgttctccctgctctgaacatgtgggtcagccacaagtgctttcagctcccccagcgccaagagctggctgagagcgagagcatgcctggattcttctgaggcatcaggaaaagcgttttgcatatttttcattgcctttctttttttttttttttttttaacttttgcctcagaaagacagctccctttcagagcaggaatttcccttcaaggtagcaggagatgaacgcgtgctgctccaggattttacagaactgattctgcagcaaagacaaatgttgcctgtatttgccagatagtataaacaggagcaaaagttgcacagctaaaccaggggctcattcccaggacagacatgcagttatggattccgaaagacaagtcaaggtt

SEQ ID NO: 31881 - DNA, 2300 bp, Homo sapien
caaaactactccatcctccaaagaaaaatcacatttttgccactagatgctattgtaaaaccttttagaaacttgaaagttttgttgtttaaaatttctttgtttttaaagaattcagtgatggtttccaccaatgcattaactttaaatacctttcattttgagaggcaaaatttgatttatggataaaatatatatacttatgagagacgaataaattcatagttctcgagaacccatggggatattttatgagttaataatgccttttctgaaaccaactttagcctttatcttaaaaccttttaaaatttatgcaatatttcatacacactttaaaatttaactttagctttttacaagaaacttctaccaaaaaatgcaatagtcattaacttgctctctttaattatcaaaatataatctagctagtatttaatttaacattttatttatttttactaagtaaatattgtaatagcaggataattttggacttcattctagagtcaattggctcccagtgaaagacaatgtaaaattacattgattttgttttccaattacagaagtaatacatagtcattatagaacattttggaatatataaaatgtatgtaaagagaaggaaaagtcacccaaaacttaagcacattaaaaataatcacaattaacatttttgtattttcttactatctttttttctatatgtttatgtataggcatgtatataatcatatacatgtaaacatcaaactatgtatacagtttacatttcctatcattagtaagtattttcacgtatcattaactattattcaacatcttattttttcatgattatattgcctttatggacatgcagtaattcattcaatcattccccaattattggatatttaagttgtttcaattttttttactattgtaaattccatcaagcataaaactgacacaattgaagtactactgagagagaggaacacaagcattagagtaattactggaggtgccatggagatgaacatgacagtgatgtaccaagtggattggacagtgaggttcaaatcacagagacttcttagtggagaacaaggaagaaaggcaaacctggagtcccagccatagaaacagaaaggaaatgattgatatgaaaactagtatgttagaaacttagaaggacttggcaaatgatgaatattcatgaggtatgagtcaaagatcacttgaaagtttatgtgatgggaagaactgctgccataaacagaaattgtcaaatttggaggagaaggccattgaccctagaggtgaaaccgaagctctgatggactctcacagctggagatgaaaatacgagttatacacggagaatgtaatggtgaatccatgggaataattgatatatttgagggtaattcagcacaagtggaggaaaacagggtccagttgaaatctttcagaatgacccatattttgatgaaaaggagtaagaaccagtgagaaaagagtagtctgaaagtggggaggagagggaaaaggagagaatgaattagaactccagtaatagagattcactgggagcccaggaaggatgagaactgcaggctaaaatccacaatggtaagggccacaggcaactatgccaagacaggccactgagaagttaattgtaacctttaaagaaccacaaaaagacttcactggtgttatgaccctaagccagcttgaaaggctttcaagaacaagtaggtgatagccatgattttgagcttttggtggtgaaagaaaagaaaatgtgggatgtgcgtccaaggcagtcataggaggtttggtgagatggtgaaccgcatgggtgtcctgttctccatagaatgtctccttccaaccaatccaggctctcgccatgaagctgcctgggaagtagaagagggaattcatatggccaaaccactttgttgacctaaaaattactgcttaaaaaataatttttagaacttttaaaggaatcatttattcaagggggaaaaaaatctctttttcaggcaaccactgagaaaacggaaccgaatagtcaagaggacaagaatgatggtggaaaatcaagaaaagggaatatagaacttgcctcatcaggtttgtttcataagagactagttttaaggcaaatcatggtaactgtttaagatgtaatggaaatagtcaagaatttttcctactgagccacaggaaagtagtaattagactccaggagtggtgcggttgtgctgccacctagaggcttcctggggaagttctgcccg

SEQ ID NO: 31882 - DNA, 2300 bp, Homo sapien
taaactgggagtcaaacgttgggaggcaggcagaatttcccacctttgcaggtttcgttttatcagcatcacactagttactattatttattacccttccaaatttacttgcttttcccacttaaatctaaactgaaaggaaaaatctgtatcattgcaagtaaaacatataacttgaacagaatgaataccctaagtaaaaagcagtcattgcgaacctcatctgtggaacctcatcttggagttcatctgtggatcaccagagtcacacctgccctactatggaaaaaagtgttttcaggacttcttcagtttgttcgtgtgtgtgtttttgtgcattgtgccttttggtcatctggtaaacattattctcagaatattttttaagcgtaaaataaaatacacaggattaccaagttattcttggtatcatgtggtgccaaatatatatatagcccctgaatactgttttgttgactccaggataagaacccctgccagctgatgagcaaatggaatcatggtctttgaatcaaacacttttctcacttagactatgtgaatttctcccttttcttcctttcttactgtacggctagctcttagataaagggcgaatggtggccactgtgattgcaacagcttttatttcctgatttcacttgagagtgtttcctttataaagcaaagcacccatgcttacaggcttacctttttacatagcggtcattttgatcattgctgatgacccttaactgtttcatttacaaccaggcattactgaaacatgtttttgccagcctccactacaaggaaatgctatgaggttaatgactggtgggttgtcagctttgggaaggctagaccttatcatttgctgtgtagcaccaacgttcatttggacacctcgttgacctctgtaatgcagaatgaggtgattagttttctttaagattctcttagagttgaatatattattcataaaaattccttctgaggataaattctaacattaatttattctgaggaccaaattagggatcagcatatgatgaaacaagtgctctgtggtctcactcgccctgaggtcattgatctatagggaacacagccaccagccaaagagtgaatcagagaaggtcctgcgagcagctgaaaaaaacataaatttatacagccacgctcctcattcagacctatgcacagtgtcaaccaatgcttattttagacatttttgttttaataagtttggtaatctggtctttcagcaatcagctaatcagaagcaacaaaccagaagaagggtgtttctactaaaggtcattcatattagggagaaacaaaattaagtagcaataacaagaaaaatctgttttacaaagcaaacataagaatttttaaagtctgtaattttggaactatttacaagtagtaacaagtagtccaacatgcctcaaaaattccctaagggcatcagatactaaggcactgttcgacagtggttgtttataataatgtttctttgtcagcaggcaaagtatactgtctttaatgtgctttgcataaatttgtggggggttatgtaatgtctttagaataatatccattgaaaagtaatactactttaatgtttagcacttatggagtaagatttgttttaattatcttatgtggaacatctaaatctcctgacattacagattcagttttgtgtggtaccatgaagagaatttgtgattgttcaataagaaaataagagagtaatgtataattccaaagatgtaatattgtcttctggtttggagaaaagtggtcattacgtttttacgctcatgtttgatttatctaaaaaattgacgctctgttaatgtagagaaggatgaaagcgttttagggaagaaacaaaaaatgaaatgtttaaatttaaatgttaactgtttgaactgaatgacttctataacagccatggatccttaaattgtgtgtcacctgtgcatttatcaatggacagttcttgcaatatttatacctgttttccattgtccaggtggtaaagccaaaatctccagaacccgaagcaacgctgacatttccatttctggacaaaatgcctgaagccaaccaactacatttgccaaatctcaattctcaaggtaaagaggacatgttttattttaggtctgcatgttctgggcccatctgtagtaaactattacttaatttaaaggaagattacgtcctttatgttgctattcctttagccagggtgtttgccagagtctgtgatagctgaatttatg

SEQ ID NO: 31883 - DNA, 2300 bp, Homo sapien
gcctgtgctccctacatccacatctcctgagtgcaggcctcggcggcagagttgcgttcagaaaaccagcaagcacatcccccaacccgaaatccgagggaacgaagaaacttggacgatctcagccttgtgcttgacaacctatcccccacctcccttaagtggttggggagggggatgagcgtgggggaaattccatgtgtggagtccaaagggatacagccacctcccggcccaaatgcaaattcatattcatgagagcgggataaataaagacaaatctccgctgtaatagcacttggattcgcatccgtctttgctggcctttaggtttaggggactgaagacagatgtttgcatcccttttctcctcttgtctggtgaccataaagaaaaaccatttagagcgttgcaatttgtttcccgccgcagtaaaaccttgtatacatttattttcatttcacccccgtgcacaaaaaagtgcacactggtcaccaagggcccttctttatcaaatacgcattgtacaacatacaactgcaataaaactatcagccctccccataaaactatcaccaggatcctcggtaggtccggctccctgcactcccgactttagcgcttcctcacgccccgaggatttgcaaccacctgaaacgagcctgaaactcaccctgcaaagaagcacaaggctgggggaccgctgtccccgtttaatccattactgcgtccgcggcagtttagtgcgcaataaaacacggtggcaggggagagcgggagcccatccactccccggcactagcatcgaattaaaccacttagtttggcaaacactgaacgcctaaatgcccctataaagactttatgagtttgttactttaattactgacttgttacagagcacataaagggggtaatgaatgcaataaaactaattatctacacatttaattcatataaaatatccagggtttgtttacaccacacggcgattcagctaagctttccccctcttgtccaccgagaggaaggatttaatgaaatagtttcccttattctgctagggcctaacaaaccaaatgaaaattaccctccgcttaaatcatggggccactgaagtccacaaatcactgctcgctcctttgtctgtgcctcgctgccagcacccaaaagcctgaggaatcggacaagaaaggtgcccgacctggagcccttgcctgggcatttacatggcaagaatttccctcactacagtccgcaaacctaaaaggcaaacagacacaatccccgggtctgtggaggattgtgggcacctgaaaaaaaaaaagaggcgagaaagagggagagcgcccgaaagagatgaaagaggagatacatttgggtacacttcatgctcgcttgccagttatggtgtaattaaaacgaacaacctcacagaaactcaaaccaaccaaggcttgcgctaatgcaaacagacagaactgagagcaaagaacacaacggtcgagaatccagatgtttcacattcgaaagctttcctcagatttttttattattatttttaagtggctgtataccctgagtctcttgaaagcacatttagctgcaagaagaaatgcaatttataagatgctttctctctgtctctcttttttttaaccccctctaccaggtgtatttttaaagaaatccgcttatcgttcacataaacccccttggcccacttactctatgttacagggcgcctgagtcttgccaatgtcccagtcctttataacatttcatgcacttcggggggtaggcttgttgttaaattgagcgtgtaacactcttacaaaacaggttttctatgacatcaaggtttcttctccctaaccgagggggaaaaaaagaagaggacgaagaagggggaaaacacacacactatctcaatttatgcctaaggtatatgatcagttaaaaaggcttaaaagctcggggaaattggatcagggagaatcgtcacccaactttcattatttccaagtagtgtgattgaattaaagggcagggagctggttagaagggaggatcaggggctcggtgcgtaatggtgtggtattaaattctaattagagatgcaggaatcaatgatagggaggttggacagctcagttccccagtgccagcccaatagacggatgagttattgtcatgtaaaaagcgccagcaataagaccaaccgctttgctattgtccaagtggaaagagccaagtttattatgaggactatatgctctagagacctcagacaaggcatc

SEQ ID NO: 31884 - DNA, 2300 bp, Homo sapien
attaggtaacaacagagcaccttccctccctgtttcctcccaatgcatttgggccacagcttttgaaggcgcccagccctgccactatcccgcctttatcacaggctgtatggggctttatctggaaaagcctgggctttgcccctggcttcatcaatcatttggaccagttcacatctccttcatggtgttccgcctcattaaacccatcaagggcactgcagagaggctgtggggcccaggaatgcctccccattgcaggcgtgaaaaaggctgcacaaacctgggggagagggtgcccaggatgacttgcacggccaccagatgttcaggcctcactcttcttgcaggccaggatctacttcgggagatttcttagaggtacacttgggaaattaagtgatcaccccaggctgacaagcatgcacgcctcagtcttcttaagaaactcatgtgtgtgctggtgaaattggagaccacagtttcacagaaagtgaagtgttttcaggttgacagctgcaaatgctggttggaatctgacactgaatttaggggcttctagggcaaaatgaatcatcaaagtgccatccaggtaacttagacacaacccagttctatatttggggaaaagagacttccacaaattttctaactgctattctactgagtagccactcagatttctatttttggattgtcattatgattattttatttatacatataatcaaattacaagggtttttcctcacacactaccttgcaacagcctttggaggtagccagagcagggatcatattttcaatgtcattataaaagcaaaaaagccaaagctaagagagatcgaacttaaccaagatcatatggctagtaattgatgggtttacacctcattgtttctcctttacaactttaaaaaagagaagtccaggacagcactattgttcatgtattattttctctttggtacaatgtctaggatatgatatcaaatatctagatacaaatgtacttccctaagggtcttccccagcctattagaagaaagaaaagaaataagaagtaaaaacaaacaaaaaaaccaccatagccccgttatcctcttattgatagagtgaaattagtctcttagaaccaattagttgtagagaaggacgtgcatttcactggttgtgagcaggggagaagggcaaggagggaggaagggaggaagatagccataaccttagattggcctcttaacatccagtttgtggtacaaataagaatcaagttccatctcatacagcaccacccgggggcccaaagtagtagcccctggacctcctcttgcacccaaacaactattttatgcaccaggcatgtatatggcagtgaacttcaccctaagccctgtgctattacttctaaaacttacggggaagctaaggaggcagtgaagacacctcctcagccctggtctcccccaccagcacaccacctagcacagacagcaccagctcacggccgccgcagtccctgggtggcctctacgggaatcctggggcagagatgggattacgaaaccctaaaccactcccgctgcgcgcgaatcacgtctggcaggctgctccagcccgcagtccacacacccccgggcctttgcgccaccgcaccaatttgcatccccaacgaatgcgcgctgccctgatccccgagcacgcgggtattaatgatcataaaaaactgggcgattacaaaaagagaaagtgctaaatcccgggagctggggcaagatttcaaaaggcaacacaccgaatccaagtctgtactttaacttttttaataacgatttttttttttctgggctggaagctcgcactgaatcctggaggaattgctaaatcggattaaggttatattttgcaacagactggatggagcaataaaggagagcgcgcggaaatgggacttcacccatcaattagatctctattagcagccaatgcaggcttcaccacaggaaatgtcacgtcccagccctagcggaccctttcgttccccacccccagctctcacctcccctgtccctggagttaaacaactcttctggcgcacacattggaactaaacaaacccttttgtgtggaatacggtttttgtgttttgttttttgtttttcttattgaacttgttttggaaccctgtaccacctgccttccccaaccccagcgcagcgagctaaccccgggacactcccaccccggccggctgaacaggttgcagcgcgacacctgcgctgtctgctgggtcgctcagg

SEQ ID NO: 31885 - DNA, 2300 bp, Homo sapien
gtcattcattcaaaagagattgctatggtttataactgtagcagtgttatatacaagtatgggacagggacttaagctcttctaaaataatttttattataggcagttctgtagcctctatttatttgattttttttttttacctttaacacctcaaataatctcttttgggtctcttattctattttgcccctttaagggattataaatatccttctccctaattgctctttctccaccgtcccacagctgtttgcttcatgtgaataggagcaaagcccaaggagaggacaccttcaccctccaacccttctgagtaaaacggagatcctatccctaaagcaaggctccaagtcaatgggcctgtgcacaatagaagaacatctggcctcggggacacgtttacctctaggcaaagagcaggagcgcagtattgagtattgttgtaaacaataccatttggaaacctggttccgctcctgtgagtccagcaaacgcctcaaagacgcccttttaggatttctttaaattaatctgagacaacgtgggaatactctctatatagtatctagcctactggatatgtggtttttgttgttgttgttgtttgttttatttttatttttggcacggcactgaagtctgtgtaaataaaaggcccagataaactcggcgatgggcctttctgtcaaaaccaggctggctttacatggcaaaaccagggccttacgtgtttggacacctgactttccatgtcgcccgtaaaatcgctggtagggaaacattttaatttagtaggcaccttatttttaccgagatgcttaaggctgtcacgagctactactcttgatggtagtaggaaataaacacgagcgatgaaaacagccaaaggatgtctagaggaagcagagaggcggacgagccatgcgtgttaccattcatttaaccacaccgggagggcccggcctgctccccgcgcgctccagcagagggcgcgcgccgccccgcgctccctccctccccggtaattgatggaggctgccgaaaaaagataattagttttatgtatataatatttgatcatgaaaatattctttgccttattttggtataggagatctgtaatatatgttaaaatagttaattttttattatctctttgtttggcggcagcccggcctatccgaaattaccggagcatcaactgaaaatgtaggcaatgtaagcaatgttaaatctaatttttctgtccaaaacctaattagccattttaaaaaaggttaacgccagcgcctgagacggtttttgtttaataatcctattactgacggctcatcatgtataaaatggtgcagtaggatgcaaaatttccacttgtttataagtgtatcgccgagaaatgtataaaataatcgagaccggcggaggcaggtcagagccgtctggaatgcgcgcaccttcaacgtaagtagccggcgcggccgctcagggttcgagcccccaccttggccgggcaggggacaccttggccgggcacctcccgggcttccgacaaaaaggcctcggactttatttgggcccgcgttggatttctggcggaatcgccctcggggtcgtttgggtttggaggcttccgccttgcagggggtttcacagggttgcagcctcgctcgggcccaggccagtgcggatactcgggccagggcagcttcgggttcaaggagggtcggcttctgagccgctgcgaccgccgcccccgccctgcactgcacccgcctccgggggtgggggaggggtacttgccgcggaacggggtctccgaggaccctggcccggagaacggagggagaagaagggacagcagtgagggccgtgcagggccacccctaaatgcccctcgaccggctcgcgtcctgccaagggcaatgtgcagaagccctgggcgcgggtggagtgggacagttctggaaaattctggcccttctgggggtctgggatagttgggaaagggagaaaatggggcagggcgcccagggggcgggggcgggcgctgggctcggtggggtctccggggagcagccgttactcctggcgccccccgtccgcctttagcgatggtttgggaacccgggcgctggaaaggcgcgggtgcggagggcggctgagccgcgcggctgcggcaccgtgggcgcgagacccctgcggagaggagcgcgcggacgccgggggaagcgcctcggggcggctggaggcgcagcaccctgggggagccggggcgcgggagagacaaaactgttcga

SEQ ID NO: 31886 - DNA, 2300 bp, Homo sapien
catcactttgctccactggtttcaccagcaggggctgcttgtgtgtgcaaggaggggcctgagatatatggctgtgcagatcacatcatttgtagtgatttattggttaagaaataaagcatgatgggtgggtgtggctaccatagggtaatcacacccccagggtgagactatactacacactaccaaattccccccaggggtgtgattagctcataaaaccctgcctcccagaactgccagactctttaatgtcatttatttattaaaaaagagtgggccagttgaatctgttccatacagtgtgactgtcactgaggctggtctttctgtaaaacaagagaaacaaataaatccgaagcccaaggatctgctatctgctagtgcttcctgttgaattttgaaattcagcccgtggagaccaaaatagcacaaaatcgaccttaccagtccttgtggacttttgtgctcaaggccaatagccattcggactggccagcagaaaactaggagattttattgatttcatggtctttcacttgcataacattatgtagccttggggagacgcaaactaataaaacatttcagggctggtaatttttcattttttgtgcttatttgtaagactggcttgaaggatttaaagaatgatgaactacaataatgaaactgggtaaactgaataaaaggcccttggtctgaactcgtcattcattcaaaagagattgctatggtttataactgtagcagtgttatatacaagtatgggacagggacttaagctcttctaaaataatttttattataggcagttctgtagcctctatttatttgattttttttttttacctttaacacctcaaataatctcttttgggtctcttattctattttgcccctttaagggattataaatatccttctccctaattgctctttctccaccgtcccacagctgtttgcttcatgtgaataggagcaaagcccaaggagaggacaccttcaccctccaacccttctgagtaaaacggagatcctatccctaaagcaaggctccaagtcaatgggcctgtgcacaatagaagaacatctggcctcggggacacgtttacctctaggcaaagagcaggagcgcagtattgagtattgttgtaaacaataccatttggaaacctggttccgctcctgtgagtccagcaaacgcctcaaagacgcccttttaggatttctttaaattaatctgagacaacgtgggaatactctctatatagtatctagcctactggatatgtggtttttgttgttgttgttgtttgttttatttttatttttggcacggcactgaagtctgtgtaaataaaaggcccagataaactcggcgatgggcctttctgtcaaaaccaggctggctttacatggcaaaaccagggccttacgtgtttggacacctgactttccatgtcgcccgtaaaatcgctggtagggaaacattttaatttagtaggcaccttatttttaccgagatgcttaaggctgtcacgagctactactcttgatggtagtaggaaataaacacgagcgatgaaaacagccaaaggatgtctagaggaagcagagaggcggacgagccatgcgtgttaccattcatttaaccacaccgggagggcccggcctgctccccgcgcgctccagcagagggcgcgcgccgccccgcgctccctccctccccggtaattgatggaggctgccgaaaaaagataattagttttatgtatataatatttgatcatgaaaatattctttgccttattttggtataggagatctgtaatatatgttaaaatagttaattttttattatctctttgtttggcggcagcccggcctatccgaaattaccggagcatcaactgaaaatgtaggcaatgtaagcaatgttaaatctaatttttctgtccaaaacctaattagccattttaaaaaaggttaacgccagcgcctgagacggtttttgtttaataatcctattactgacggctcatcatgtataaaatggtgcagtaggatgcaaaatttccacttgtttataagtgtatcgccgagaaatgtataaaataatcgagaccggcggaggcaggtcagagccgtctggaatgcgcgcaccttcaacgtaagtagccggcgcggccgctcagggttcgagcccccaccttggccgggcaggggacaccttggccgggcacctcccgggcttccgacaaaaaggcctcggactttatttgggcccgcgttggatt

SEQ ID NO: 31887 - DNA, 2300 bp, Homo sapien
tttgtttacacatcctggaccatgaagaaaggtagacctatagcttatctgctttatatctttgctttccccagatcctgccagcctgactccttttccctaattaggactccatgcttaggacattcttctagaggaggtgatatggtttggctgtgctcccacacaaatcttatcttgaattgtagttcctataatcctcacatgttgtgggagggacctggtgggaggtaattgaatcattgaggcagttacccccatgctgctcttctcatgacagtgagttctcatgagatctgatggttttataagggggtttcctcctctttgctctgcacttctccttgttgctgccatgtgaagaaggatgtgtttgcttccccttctgccatgatcgtaagtttcctgaggcctccacagccctgcggaagtgtgagtcaattaaacctctttcttttataaattacccagtcttggtgccctgtgtcccaacagctctagccatggctgaaaggggccaaggtacagcttgggctgtggcttcagagtgtgcaagccccaagccttggcagcttccatgtgatgttgagcctgtgggtgcacagaagtcaaaaattgaggtttgggaacctctgcctacatttcagaggatgcatggaaatgcctggatgtccaggctgacgtttgctacaggggtggagccctcatggagaacctctgctagggcagtgtggaagggaaatgtggggttagagtccccacacagagtctccactggggcactgcctagtggagctgtgagaagaggcccactatcctccagatcccggcatggtagattcaccagcagcttgcaacttccacctggaaaagctgcagacactcaatgccagactatgatggaagctgggaggggtctgtaccctgcagatccacagggatggagctgcccaaactgtgggtgcccacctcttgcatcagcataacctggatgtgagacatgaagtcaaaggagatcatttcagagctttaagatttgactgtcccactggatttttggatttgcttggggcctatagcaccctcattttggccaatttctgtatggaatcagtcagggtggtgggagaaattataaagataaagttataggaaatagacacaaaccttcttggaatgctgggagttttgcatagcttcagtaaaagatttgactgaaggcagctgaattctcttaaaagcttacataggaatgtagaggagtttatctaaatagcttgtttactcatgtggtcctaagactatcctttgatcatctgtggtgcataactgctctctacttgggaggtcggcaatgttaattaccctctagtggtgtttactcaagacctttgtcatttaatctgtactaaataaatgcgaacttctctggctaattgaggccatggctgctgactcttcacagcaccctcctcagggtctgtgagtggccccgtcccctagcccgctccttcattggatatctgtgtctgagtgcatttgttcatcagtcactgggtcagggtctgtgggtaggactcggcactcccatttggaacaagcatatttacccaatgcctatagctccattgtatctaggaagtaactaacttgcttttgattttacagggtcataggtggaagggacttgccttgtcgcagatgagactttggacttggacttttgggttaatgctggaatgagttaagactttgggggactgttgggaaggcatgattgtgttttaaaatgtgagaacatgagatttaggagaggccagagttggaatgatatggtttggctgtgttcccatccaaatctcatcttgaattgtagttcccataatccttatatgtcatgggagtgacctggtgggtggtaattgaatcatgggggcagttagccccatgctgctgttcttatggtattgagttctcattagatccgatggttttataacatgctttcccccattttgcttggcatttctccttcttgccatcatgtgaagaaggacgtgcttgctcccccttctgccatgattgcaagtttcctgaggcctccccagccctatggaactgtgggtcaataaaatgtctctcctttataaattacccagtcttgggaagttctttatagcagtgtgagaatggactaatatagcaggggtccccaccctccagcccacagaccagtactaacctgttaggaactgggcctcatagcaggaggtgagtgctgggggagcaagcattaccac

SEQ ID NO: 31888 - DNA, 2300 bp, Homo sapien
acctgtgttcaccttggggtggagacttaatatttaatgtattacagttaggctctgtacctcaaaaggtgaagcagagacgaaggcacacaagtgcatggcctctgtaaagtggccagaaccagcctatggtcagtggtcttatctggagaacgttactgaaatcagtctcttgtgcaatcaaagctgtagctatggttggtatagcaggggttcagttagtgtctgtgagctggattagttgtaattgttttaatattgcttctctctaggccagtggttgtttagctgccagagggaaaaaaaaaacctcttgtggtagaacatagtttattttttaagtgtagggggtgcatgacttaacccttgcctggcatggccttaggtcctgtttataatttggtatcctattcccacaaagagtttgttctgtcaatgttatgatctttattgtaacattaacatgttaaacataggctgacttcctagaactaatttgaaaggaaaaccctaactttccacgcctaagtagttgctagtcagttgtgtctaaactacaaaagggagggggtataatgaggcatgtctgatctcctgtcccatcatggctggggtccccttggccaagaaagggatctatccagtcagtcgacagaccccttacttaggattttatttttagtttatatatatataaatggcttcacaacgaatttcctgacttttaatttgcccctctgttcatcctccaccctgttgccagagagaactttctaaatctcaggatgtcacacttctgattaaaattgttccatggttctctggatttcagggtcaagttcagatcctttcctcagtacacccctgcctgcctctctagcgcaaatctttcacaatcccctgactggtaccatcattctggtcacactcaactagtcctctcgctgtcctgttacttcttgcactttctgttactctgtatggagttcccttcccgttttaaggcagaagaatatggtatggcggtagggaacctaatgccctttctcgctgacttcctagaactaaattgaaggaaaatccttactgtccacgcttaagtgaataaagggccagatactactccctttgcaagccccaacctgttctgcgcagatttgggaaattgaaagtacctctgattggttgctttttgtaaccaatcagacgtttgcatagaagtgtaactttgtaacttcttcagcctctgattggttgctttgcgcaaccattcagactgattgcgggccaccacttcatttacatgaagtgaactccaagtggccaatgggaaacctctagggggtatttggacccgagaagactctgtatccagggcccttgagctgctgtctcactctcccacactctggagtgtactttcattttcaacaaatctctgcttttgttgctttattctttccttgctttgtgcgttttgtccaattctatgttcaaaacgccaagaacttggacaccctacaccagtaacactttcagccaactttttgtcgttcaagatcaaggcccggacttaccttttccaggaaacctccccagatcccttctgatttaggtaccgtcctctgtgctccctgtgattaaatcagcctctacacatattacacaatcactatgctctgatttccgtttacttgtttctcttttgcaatctgtgtcatattcctctttttatccgccgtgccaagtatggagcctgtcacatagcaggcctcataaatacttattgaaagaattaataatagacgtagaaccaacgggcttagtaagcccctggagaaaggaatcaaagatgtttctgaggcctctatatcaggaagtgcggaaatttcatggtttgagaatgggcaggaaagatcatttgtgagctgtatttaatgcaaaagttgctcccccatcctgatttcttagctcactgggccaatcggcggaaggacaggtggggctcaaattaggagaaaaaaaccacacttcccgtcatgcctctgggcaccgctcccgtttccccctctttgtcaccgcctcttccccacggaaatgaaaggagcacttccgggttcggcaataacctggagccggcggcgtaggttggctctttagggcttcaccccgaagctccaccttcgctcccgtctttctggaaacaccgctttgatctcggcggtgcgggacaggtacctcccggctgctgcgggtgccctggatccagtcggctgcaccaggcgagcgagacccttccc

SEQ ID NO: 31889 - DNA, 2300 bp, Homo sapien
agaagttcatttaacatccagtgtgtctaattcttctggaagtggtgtagtaccattgttcttctggcatttttaaatattaaacctttttggatagatggaagccttatacaaaatctactttattttagcaaggattctctgtccttttgtatagttggtaccttactaatttaaactctaatatcaatctaaagagaaatttattatgcaatttgtatttaggtttttttttttttttttggaatgaagttcagaggtagatcctcctggaagaaagaaagcaagcgaactttttaaagaaaattagacttgaatatttaagaatgtcccttacagagaaaaggccaactataatactaagctaaaagttatgaaaaattaataggttcttttatagagctaagaatgatgaaaccatcaatacttccttcttcctaaaaatccagatcaaaacttcaggttaggtttctaagtttaggacatgaatattatttttttctggaaaagaagatgagtatatgtgtaataagacaagtagaactgagagatttagttttttttttttttaagttttagttcagaataacattaattttgagagattgaggtaaagaaccttaactaatgctaaggagtttattttgattaacataggttattctgaccaccacctcttccttccttaatctccttagaatctgacagtctcaaagctgtcacacaaattagactaattttgacactttgaaatgaaaacttcaaggaagaagtagccacggacagttatgtttataatcagtaggtggcactctttcctcaggtagccccccattttcacatgatgtgtttgaaggttaaatgccaccaaaagtgctgagtcagctataaaactaagtccctgaattccatggcccttttaaatatgtaatcattcaagattgaaaaaaaaaattaagcattttttgtttgtttgcttgtttgtttttgagacggagtttcactcttgttggccaggctggagtgcaatggcgccatctcagctcactgcaacctctgcctcccggattcaagcaattctccttcagccctccaagtagctggggttacaggtgcccgccaccatgcccagctagtttttgtatttttagtagagatgaggtttcaccatgttggccaggctggtcttgaactcctgacctcgtgatccccccacctcggccttccaaagtgctggattacaggcgtgagccactgtgcctggcttgcatttttaaaatactgaattattcaaaagaagtaccctgtcaatatgtgctttctaggaaaacagtaaaataggccacaatttggagtgacaccattcagatcaaggtctatccagttttttcttttcatgctaagtgcctacatcaccgaaacacactaatataaaattatcctttctccttcattttcagatgtgtaaaaaatggtacttaaagtgttttcatgatcattttgtaggtagactagatatagcccgttgaacctcttttaaaatttagacttttgatagtaatataaaagcatattgaaatttgtagatattatatgaggaatggcacctagatttgaaaattatgcttggcttgtagagacaactagtttctctcgctcttttttttttttttttttttttttttgagacagattctcactcagttgcccaggctggagtgcagtggtgcagtcttggctcactgcaacctctgcctcctgggttaaagcgattctcatgcctcagcctccctagtagctgagactacaggcgtgcaccaccacgcccagctaatttttgtatttttagtagagacaggatttcaccatgttcaccatgttggtcaggctggtcttgaactcctggcctcaagtgatctgcccgcctcgacctcccagagtgctgggattataggtgtgagccactaagcctggctgagacaactagtttcccttaactcattggaattctctaggattaggagaattccacagagcctatatgatattatagctcaacatttagtataccaaaggcatacccgtgtaaatctaggagttatttccagagattgttttaaggagcagtcttatattcagggtagaaagttatgattggatctgctgttaaggagaacaaaggagcttctaaaggtttgggaggtttactggtagtaactattctaggaaatatttatgttttaaggtgatgttcacatgggttctttagaaggaacatagtcaagtgtgatggattaact

SEQ ID NO: 31890 - DNA, 2300 bp, Homo sapien
aaaacttcctccatgccttccagagcagactagacccgtagttccaactttctttatacacacccctttttttccatgtgcctgctcttccgatggtggggtcaggaggtttaagaaggaaaacaggcaatgccttaaatgtctgactgccgccatgttgctatctgctttctgtaggtcattgttagaatatatggggttcctaacagccccactgataactcagtatcaagcagtcctctatgctttgatagccctttgcaagacttctgcatctgtcagctgacttccatttggcagtggtgaaacacattcttctgatacatagaaatcccttgtcccatgttatgttccatggcaagtgtgtgggcctcaatctcctgtgctctctgtgatcccagctctggggcctgtagattccgacaggatccatagtccagatatcaccggatttctctgtagtccctaccaactctccccagtcctccaaaattcctggaaattcatagcgtaaggggagtcagcaagctttgtggcaaaggaaacatccagatggggactggagatatcagcctcctcttgaagacaccccaaaactttactagtatcatgtaataggtactaatgtcctgaacagaacatgaaagacactaaccattaatgaaacaaatggacaatttggataaattcataatttatttacttatttttctttctttttgagacagggtcttattctgtctcccagctgggctggagtgcagtggggtgatcactgcagcctcaactttcagggctcaggtgattttccctccaagactcctaggctcaagtgattttccctcccagtctcctgagtagctgggtctacaggtgtgcaccataccccgctaatttttgtattttatttatttatttattttttgagacagagtcttgctctgttgcccaggctagaatgcagtggcgcgatctcggctcactgcaagctccgcctcccgggttcacgccattctcttgcctcagcctccagagtagctgggtctacaggcgcccgccacgatgcccggctaatttttttaattgttggtagagacggggtttcaccgtgttagccgggatggtctcaatctcttgacctcgtgatccgcctgcctgcgcctcccaaagtgctgggattacaggcgtgagccactgcgcccggcctaatctttgtatttttttagagacaaagtttcaccatgccgcccaggctggtctctaactgtattttaaaaatacaggcggccgggcgcagtggctcacgcttgtaatcccggaactttaggaggctgaggcgggccgatcatgaggtcagcagatcgagaccatctggctaacacggtgaaaccctgtctctactaaaaatacaaaaaaaattagccaggcgtggtggcgggcgcctgtagtcccagccacttgggaggctgaggcaggagaatggcgtgaacgtgggaggcagagcttgcagtgaaccgagatcgcgccactgtactccagcctggccgacagagcgagactccgtcttaaaataaaaaataaaaaaataagaaatacaggcagggcgcgtgggctcatgcttgtaatcccagcactttgggaggctgaggcggacaggctgcttgagctcaagagttccagactagcatcggcaaagcagggagaccccatctttacaaaaaaagtagcctggcatggtgttgtgagcccatagtcccagctaagtagggcagaggtaggagaatcacttgagcccaggagttccaggctgcagtgagccgtggtcgtgccactggactccagcctgggtgaaagagcaagaccctgtctcaaaaagagaaaggaaaaaatttaacatcaagaacttcctttcatcaagacaccactgagagaatacgacaacccacagagtaggaaaagagatttgtaatacacatctgtaacaatggacttcctcctagaatagagaggataaaaagtagcaacacttccgcttgcacccggacggaacttcctgtcacggaaaagaacatcctgtcacggagaagaacatcctgcagaatttcctgtcacgaggaacattccgcaggaggaaatggaggctgaaaggctgcgactcctcgaggaagaggccaagctgaaaaaggtagccagaatgggatttaatgcatcttccatgctccgaaaaagccagctaggtttcctcaacgtcaccagttactcccgtttagccaacgagctgcgtgtgagctgcatggagc

SEQ ID NO: 31891 - DNA, 2300 bp, Homo sapien
tagtaaatgattaatattactactgctgctattagttttaaattatcaatatatttatttataaatttgctgcctcttccaatagaaaataagccctatgatactagaatcttacctgttatgtataggtaggcaacgctgaatgtgtctcaaatggagcataaaaacaaagtctcttggtaaggatgggatttagggtcaaaggaaattcccctaaggaactctaaaactgacattatcttaagttttagcacttggggaagtttcaaagactttccaaaaggataagtatatcatgatatgtaggtataaataccaagacaactgcagagttattttaatccaagtctgttgaggctttattatgtgatacagcattgtgagagttaaggtaacagaaaatgatacactttgttcttcaaacttatttggcaaatcaagggtactggaggtttataacaattagtagtgtctaagtcaagttacaccccaactataccaggaaaaagaaggacaggaaagcacacactgtgaaattttactgtgcaccaacatattttacacatcaggtgggctgttatggaaattaagaactctgcacaaaatgtattttttttaaaagttttatcaagaaaggaacattttcttctaaaaatgattagtacagctaaacaaaataaaaataataatcctatcgcacaaattaaaaataaaacctgagaagttttgatcaggcttgcctaaaacgagttgaaaccaaagccattttaagaatccaaaatatgagattagttttgttcaaaaagaattatccataaaagttaatagatgtttgcatagttaccataaaataagaggtaagcctttatgtatttttacttcataaagttgaatttctattaaaatctattacaagaaagggaaagtaactttccagtaatattcagattttttagtaatattgagcctacatttatgggacatcattttttaatgtttgtccactgaatattttaagttatgtttgtcataggaaattaaatttgcttaccattcttaacgataatctctttcctcatttggttatacttatctcaattagtataagagacttgttgatttttttaaaaattaaggacatactaaatttccccgagatagttattttgcagtaatatagataagcgactcagattaactttaaaacaaaccaccatacattccattcaatttatttttgccaggcattgttttagcggctttatacagccatgtacaaaatagacaagattccagcatcatgatgcttattttctattctaggacacaaaatagaaaaaaaaatctcaaatagtgataagcgttttgaagaaaagtatataggacagccgggtagagaatgaccaggactaccatagctagggtggtcaaggaaggcctctcttgagtttgagttaagagctgaatgagcatggcagagagaaacagttaacgtggatactgttcaggtttctttctccctgggaccaaaatgtttcgaagtctgcatacctccgtttaccctaacttgtcatgaacataaaacctcttatattgcaggcaaaaatctgaggttcacagattagtagggcaagtagctgattccgaagtgtgtacttgcctttatgatactggatacacactggtgttaacaaggagaacgatgtacgtggcagacgttcggagagtactggacatgttggttctaatttgggtttatcctggcaggctctaggtagagaggctcagaaaacctgcgtccatccttcccatctttcctcccatttccgaaaccacggccccggtttcgagtccagaaaaaaaggaataagtagaactcccaaaggacagctttcctggctgaacaagatgtaaacagtttacgtgatttccaaccaagcgcaaaagtacaggtgcaaaagaagacggcagacaccaaacttcccctgcagccacgccctccccactttgggagtctgggtccccgggaaggaaggcctccctattggtgctcaacgtgttacgtcacttccgctacctccacggcaggcgtcgctaaatgacgttgccgtttccgggtcacccaggcagcttgtggcggcgaagccatcggtgttcgctgatgtccagtctatggagtcagttggtaccggtggcggcgcggaggcagaaggcggtgtccgagtaggggcctctgccccaccaggatgttacccggcttggccgccgccgcggcccacagatgtagctggtcctccctg

SEQ ID NO: 31892 - DNA, 2300 bp, Homo sapien
tttccatcacacaagaatcttaggagttaaattgttaagtcattggtatgtgacagaattctcaataagattatttgcgtatttgtatgtttgactgttttggttttttggccagcagagttgagtacttaatttagtgagttaaatttatgttcatgctcccaactgtgatttctgttgagtataaattatttttactactttccaatatctgttattattaattttctcatatttatatttattgaaattatgttagtcacagatttaaacttttctccctcctttgtgcacgaattagagaaatcagatgatctatctttttttcagtcttcctcattgtcacagccactttggtatatatcaagaaataggtattcctataatttttaacttttataactattacatcaacaaccaattataatattgatttagttctgacacaaattttgtgaattaagtggattaggcattgctgtctccactttaatagaccaggatgagcataatacaagatgttagtgattgacccagctcatttaagtgagtcagtgacagggagaactagaatatatatcttttgaaagctgatccatacatttttactaacatgtgatggttattgatgttttttaaatctaggtttaatttctagaacttgataacattacatagtcacagactttttatttatagattgtttcattgctttaacaaaatttccataggaagatccatgattaaatatagaatgactatttagcagtgacttgatgaatatataagcctttcagaatttaagagaaaggaaaataaataacatgtaattgacacaaactctttatgacatcattcctttgaatggatattaccacttagtattaatctacatataaacaaataatgactgtaaatttttaacttaaattcttaagtagagggatgatattctaatccatgttctttcttcttttcgttttttttgtttgtttttttttgagacagggtctcactctgctgcccaggctggagtgcagtggcacaatcatggcttactgcagcctctacctccctaggctccagtgattcttccacctcagcctcctgagtaactgggactatggctgtgcgccaccacgcctggctaatttttttttttttttttttttttttttttgagacggagtctcgctctgttgcccaggccggactgcggactgcagtggcacaatctcggctcactgcaagctccgcttcccgggttcacgccattctcctgcctcagcctcccgagtagctgggactacaggcgcccgccaccacgcccggctaatttttgtatttttagtagagacagggttttgcaggttgcacagtctagtctcgaactcctgacatcaagtgatccacccacctcagcctcccaaagtgctgggattacaggtgtgagctaccgcaccttgcttatttttcacttttttttttttttgctttatctcctaggccgaagtacagtggcgtgatcttggctcactgtaacctctgcctcccgggttcaagtgattcttctgcctcagcctcctgagtagctgggattacaggcaggcaccaccaaacccagctaatttttgtatttttttttagtagagacggggtttcaccatgttgaccaggctggtctcgaactcctgaccacccacctcggcctctcaaagcgctgggagtgagccaccacgcattacctaacttttcacttttttccccatatattagagatggcagtggtgtgcccatagcagatacaaatacaagtactggtgagggaagtgaatctctacatattatattgtggtgtctacactgagcatcaagagtaattttttttcactgtctctattttttgtatacaaaatgtcatctttaaactgatctttaaaagccattcacatcaatatttctctaagatggggatcagtgttgttgcttttatctgcccttagtaatcctctttaagtatataaactatatgcactttgtctgaataaattcaacatgtttctttctctagtgatctagaacaacttcgaaaaatcagacgacgaagtccccatgaagatactgagtcttttactgtatacttgagatcagatgtggaagcaaagtaagaacatagttctttcagaataaaagtgcaaaccaaattttggattaataaaaatacattttagacagagtcagaattttttaaatgactttttaaaaacaatatttttgtatttgcaaatctgtttatttgt

SEQ ID NO: 31893 - DNA, 2300 bp, Homo sapien
atatatagtcatctcttggtatctgtggaaataccctgtggggatatccctgggataccaaaattcaaggatgttgaagtttcctatataaaatggcatatttgtatataacctacacacatcctcaagtatactttaaataatctctattataatacctaacacattgtaaatgttatgtaagtagttgtcatactgtatttaggagacaatgacaaggaaaaaagcctgttcacgtttagcacagacacaattttttatttattgagtattttcgatacgttggttgaatcagagatgcgaacccatggatacgaaaatctgactatatttttaaattgtgcttgaatagataaaacattcacatgattctaaattcagaatgctcaaacagatttataggaaacattctttctctcaaccttgctcacagctatccattttcttttcccagaggcaactaatgttataagcttgtgatatatccttatagagatatttgatgtatatattcacatatatacatgtttattatatatatttcccctgttctacaaagatgataaaatagtatatatattaatgaaccttctcataatgtaagtacacagccattttccagagttgtgtttactgaaaattactacatcaacaggacataacacataatgtgctttaccatatggtagccactagtgacatggggatatttaaatttaaattaattacataaaataaattcagttcctcagttgcattagccacattttcatgtgctcagtagccacatgtggccagtgactgtgttgtacaattcagatatagaacattttcattatcacagcaagttgttttggacagtcctaatatggtggattaaagtaatcctagtctctctttaatatttgagagtgtctttacagtgtacagcataagagtgcctggtttctgttgttggaggcaggaggataaaattctggcttagctcttagaaatgtatcaatacaaatagctcttgggctataacttaaggctaccaactggtaagtgttactttcagcaaataaatttctcatgttcaaaatgaagagtttgaatttgacttcctctcattcaaatgcataatatacattctgaacattagggaacaattgaatcatacaaaagtgttcttgaaccatcaaaatttcttacccaagttcataaattatgtttctgaatgttcatgtcagtttatcttgtggcccagcaaagggctaaataagtatgataccattcatcacataaaggtctcagagaacaaaatatgggattggtgggcccaggtggtgagaaaggaaggagttgcgggtttatcacactttatacaagaagtaagttcctgggccaggcgcggtggtttacacctgtaatcccagcactttgagaggccaaggagggcggatcacgaggtcaggagatggagaccatcctggctaacacggtgaaaccccgtctctggtaaaaacacaaaaaattagccgggcgtggtggcacgtgcctgcagtcccagctactcaggaggctgaggcaggagaatcgcttgaacccagcaggcggaggttgcagtgagccgagattgcgccactgcactccagcctgggtgacagagcgaggctccgtctcaaaaaaaaaaaaaaaagaaagaaaaataagttcctggacattgtgtaaattaaatatttctaaatctataaattaaatatttctaaatctatttttagatgcactagaagagttcacaatttaaagaaatcctcctgtaatgtatgattatttatattttgttaaatcctatttaaaagagattttataagatgacttctagattactcctggaactatggcagatcatgttgaggttaaaagagcattaagggattggatgatagatggtctaatatcatcactgcttgaagttccaaggaattactcaaactgatccaatttccttatgacattttctatatggattgacagcccatgtcaattattgaatatttactatatacaagctatgatatactagatgcccgtgaggcccttcttagaagaaggaagatgatggcagtgttgtcaaccagataatcattcctgatggtcaaggtgggggatgtcccgtcctgataatcccctcatccaataaccaggacagaattactcatggctgtggtatcttgtccttcctgaggtcaataaggcctgccttgatcagaaccaagcaattgtttatccatcatgggccagtgatttcaagtata

SEQ ID NO: 31894 - DNA, 2300 bp, Homo sapien
tactattctatcagctcctatgagacccctaagagaagatatcagcaaagtcactatctgataatttaggccacaatttagagcaagatgctcacagagtgctaccagtaattttatgaacacttaaatacattacatctatgtacaatactcagttaaatacaatctcaggcaggggttagtggtcagctataattttaaaattgccttcaactccacacttagagtaaatgctcattttatttttaaaagggtgattcttaagtacttcacttttctatgaactcaggacgcagacataggtgactgcccacatgaaaatctgaaagctgatcatttaaaacttttaaatatttttcctctgggcaccttcccctcccccttccccccacttttaaaagctaaatgactaatttgattatttcagttttatagaaataatcactttttgatgtaaaggacagcatgtccttttcaatagaaaatatacaatagaagtattgttcccagtctcttaaggtgtttaagtggtgaggaggatatacatttaaaactacatagaagaggaagcccccaggtacaggaaattacttcttcagaagaactaaaagatttctctcctcttaactccccacactgccaccaccccaatttcttttcaaaagccaggacttattggcaaattatctgggagtaaagtgggaggaaaacatttcaatgcaaaattcagaactgctttatagaaaggaaagtgtggggaggtttgttatcatttatttcctccagtatatcattcaatttcagctgtctcacgtctcagaagtagctcccccatttctcacttacgtgcctaagaaacatctccctggcatctcattctctttctctttcaccagcatttcattatttcttaactgtccctctcatgcttgtctccttttcctagtgatccacgtgtcctcatttagcagttttcagaagccagggagaaacattgcaaataatgttaaatatgattaatatcttgaattccttgaaatatgacatgcatgagttacaatgaaacctcttttatttccccatgaaatgcttttgcataatgagaaagaaaatgtcctctatgccctaatcagccctgacagttcctggactcccaaatacttatatttatggcattatttatttcatctctaataaatggattgggggggggacacagcaccatctgaggaagctgcaggagagagggagacaatctaggggggaataatacagaagctgaaccagcaaggcagagagaaaaagcttccaaagggaaggagaccagggaaagagaggccaaaagatgtgaacccccagaagaaaatgggtcaccttcctaagaataaaaggaaggctctgaaaaggaaacaaacttcagagtgcagagatgagggtcctacatcaaggagcatccagaactctgacctggagaacgaaaaaggaaggctgaaaagcaaacctggggcagggtatgctggttggcctagaagaggggtgatttgggatagggagcaatggaccctctgccccaaaaagtggctgggagagaccaggacatctgcatcccatggaggatcttcctcccaacgactgagatctctcattcaaacggctactgaaattgggcaccctccagaccctcgccggatggcgccagttgcagtgagtaaaacaatgcaaggagtgagttctcgtgtttccctgggcttgcaagtacatatacatatattaaaaatgacactgttgaaagtaatcatcacctcaaagggaggtatcaggacatttccccactcaattgcacagaggctactggctatgggaagtgaggagttgacttcaaataacctggatgcgtcagtgcaacacagccgcacactcccgagtgtctgactttgggcaattcccttcaacctctcagagcctcggttttctcatctttataatgggggggaaatcatggtgtcatgcacgttctcggggcccctacgggaaacaaatgaaaacgtgaaaaagttctacgccttgcgagcttttatgttccgcatgagctcagaggccgcgatgctcggggaaagcaggaccccaaagccccgtaaacaccgcgcgaccacccgggccaagatcttcaagaggttcttttcagaaggatcggagagcaattcccgattggtagaagaacttgctgtaatacacacgtactctgacgaccccgccccaacgactagcccctcctctgtgcaaccccgagagtttggggt

SEQ ID NO: 31895 - DNA, 2300 bp, Homo sapien
agcaaaggttgctgctgcagcagaactttatgcagttatgacgtaatgaaattcctctaaattttaacaaaaactaatattaaaaggtgtggttctgggaaagttattagcagtaaacatgtcataatttttatcatctgattataatcactatatctcatttttgctgtgtttctaagtgacattttcctgtaattgctcaggatatatatacaattgaaacaacactcctaaaaaacaactagagttaaaaaaaagattaagtctggcaagaccttttttttgtaaataaaaaacccaatatctaagaaatttctgcaaaacaatttcccatatgcttaaactatttaactaaaaaactgtttcattgtttgttattgaaagctccaacttaatttgtttttacttaatagcttcgtattgtcctaagaaatatgtaactctaagagagcaataaagttaaatatttacacggtcccacttaacgtgtgaaatggacatgtattttcagcagccacataactaaatgctaatcccaatacctaaaattagaaatcagaagtaattatttaattggaatatactttaacttagataaaaaaaaaaaaaaaagaaatcgttttaataggagatttttaaaaaagtttctccggaatcgactcggttcatcaggaagctgcgaacgtgataaatgcgtttgaccgcgcaccttgtgtcgctggagctgagaacactttgttccttttgtttcactcaacttgccgacatctaactcagggacacgggtatgcagcttgtttgacaaataagccgagatacaccgaacatattcacacataccaatagacgatgattggaagttcaggatgcagtcaaaataaatgcttgcgtttggcccaggtttcacataacaccagtttcataaggcacttaggccgctaacggagcagtgcccctgaaaatagcccacaggggacacatcatttaaataaatgtgtttctttccctgaacagaagttcagttctgctcaattatcattaattttgctcctttatttcctttgcgggcgtgaacggagaagtcgtgctctttgaggttttgcgagctggccttggctggcagaggtgaccggcaatccttcagccggcggaaaaagtgcgagtgtgtgtgtgtgtgtgcttgtgaaaatgtgccgttcctcccagaaaaagtggaaacgtaggtggaaagctcagcacatgttggcgacacctaaaaaccatgttctcggtcctgaacctttagaagcggtatcccaggaacgagtctgagtctgtgcaacagggcacagatgattcgacaaacttcaatgactgcaccgcattcatgcattatatccattgaaaagtaaatccagcgtctccactcgcgcgcccacgtgcgtggataaacgcgggaattcggcagccctcaacgtcactctgcagagatttccgggctgtgagagagttggggtgtgcggcgggggaggggagggtctgatatcttcaggttgagagtcaagtcctgggggagcggcatgggcgggggtggccggggggaggcggaggatggagcgcgaaccagaaagcgcagaggaccctcggcccgcgccgcacccgctgtgattagctccagaggcgcgatccgggagggcggactctttcttaaccctcattgtctcctcctccctcttcctttttaaaagacgccttgcgggcagagctgtcagcaaccccgcggccgtttgtacttggccgcggcggagctgactcctgctcctgtgacagataggggctggggctgagcggccgcctgtctggggtactcgcacgtggggaacaaattcttttcctccggctcctctcgggacccggcgatcgccacaggttgggactctgtgcggcgctggagttggcagccccgggcgctatggctcccttgaggagtggggagggaggtggccggggggttggcgcgcccctcgcgcggggagcgctatgagccgggcgaagggcggcagcgacagccccagcaactgcctctgccggcgcctcccgcaggccctcgccaactcgccccgcgcaccatgctgactcccggcctgcggaactcgtagtgcagcccctgtcgcctccccggcccctgctatcccacgcaggactggcttcggccgccggggccagcagcttgcgacgtgtccctggggaggcggaatcgctgtgcgccctgagcccgggctcagcccttcgctttccagctgcgtcctgctcccggccgc

SEQ ID NO: 31896 - DNA, 2300 bp, Homo sapien
gcttgccattatggataaagtgataatatcagggaaaggacacacggtaatctatagactatatcatgcaatattcttctctgtataagtgacttgtttcctgtatcaatgacgttttcaactttgctgatgagttaatgggacacacatgtaaaaaatggattgctctatacaaaacagaggtaacttctggagttccttcagttattacttgtaaataagcagaattgaacctcaaccccatctgaggactaattaggaattacaaaggtgattgctcataaatgaactatcgtcatgctgctgcgcactgatttttaataagaactggttatggcttcatatagaattacacctaaaatgttaatcagaaaagcactgcatttcctccagtttctgttcgctaacttttaaagctgattattatttttactattttccttgctatgttagccctttaattttgtttcagactcatgttcattaagccagagcaagcctgctttatacaaggagaccctgggccttggaagaaataaaaatgcccagtgatgacagtccagataaagctgtgttcattttttacgtttagaagaccatactttaaatcatgactatcactgaaacagatagattcatttattgttgagtcctgctttaccctgagatgttccatgaacactgagaatacattttctttgttctaattccagcctctgaatcagagccaactagagtgggctcttcataaatatgcattgactgcctgagtattaatgtagggcagggctctgattagcaagtgctacctgcaggaagcagaagaaataccacaaatggagataggacgctattagcagattttatttcattttttcctgaggcttggaaataatcacttctctctcaggtcaaacctctccagctctctcccttcaggatgtgaaaagatctcaaataaaaggcctctatgtgaggatctctttcgctggttgctggaggaagagcatgaaatgagggaagaagcaaattgcttctgatttattgtttctggtttattcctttcctgccagttcagcagctcgccagaaacagcacaaaaccttacatcttaacttgaaggtgaagtatttgttttgacaactttttagcatagatctcggtatacaaaataaaaggtaatgaggctatgatagtctgaaggacatcggcaaattaaaatttaacatatttatggattttatacaaagactcctctcccctttgcagataaaacgactgcatccaactttatgcagatttaactaaaagaaaaaaaaaaagtcttttgtgaaccacctgggccaatacttagttggcttaattgctatttcagtgccttgtcaggctgcagagcctgaactagggagatgcaccgggcccacttgcaggcggggcccagatgcacccaagccccatggacaagagcaccatgggcaccaggggcctcccgacctggcagcctgttgctagtgggcgaggcaggaggacaagtgcggctcaggccacgagtcgggctgggcgtgcagagaggttagaattacacccagatggcgaacagtcagtcgttcctttcctgctctggctgggagctaaaccttgtagtcccagaccctttcgccttcgcctgccggctcagacccaacagctctttccggacgacgggcggctccactgcgatcaaaagccaggggtagcgggaggggattcgtgagaatgcagcagccagagcagtctttcctttctgagcaagatgtgagagagtccgagtggcctggaggaggaaccgggtcaaccaactccacagggcggagcgaaaacgctggaggactaaggaggctaagagttgatcccccctttgagtcgtgatacggtccgaagcggggcggggcggggcgaaggaggctccccctggctctccccgcccctcacccgccttccttgctgagcggccgcgggagggggagcgcgagccccgcaggcccctcccccggcgccggcgcccgagctccgcccctcgccgagccgcccctccgcggctgcagcaagagctcgcccagctctgcgggcgccgccaccttcgccgccaccgctgcctttctcctcctcctgtcggcgtgcgggggccgcgcccggcggcagctctgccctaggtgggcggcggcgcggcccaggctgcagctgagcgctctgcgcggcgcagccgggtctcccgcgtgtaccacgccgtgacaggtgcagagtccgggctgaggacccac

SEQ ID NO: 31897 - DNA, 2300 bp, Homo sapien
gagcagatgcttcacgtggatcaagaggcttctgcccagagggcctttctataatttatgcaaagaacacaaatgggctgttaaccctagccaaatctacaacattgatgcaatttggagatattctccattaagtgctattcccacatgactcaggaagagaggtggcgagtggcagatgaaggcgatgctcctccattaaaatgacaggtactggcagggcgcagtggctcacacctgtaatcccagcactttgggaggccgaggcaagtggatcacctgaggtcagggagttcaagagcagcctggccaacatggtgaaacctcgtctgtactaaaaatacaaaaattggctgggcgtggtgacacacacctgtaatcccagctacttgggaggctgaagcaggagaatcacttgaacttgggaggctgaagttgcagtgagctgagattgaaccactgcactccaacctgggtgacagagtgagaaatcatccaaaaaaaaaaaaaaaaaaaaaaaaaaaagacaggtactgattattgatgatcacttttcattttccctggtccctccagaagaggaaactggtcttacaaagctttttccagtaaaaaacagtgcttatgtttaaagaaatatttctagtattcaagttgagtgacacgttattaatggaatctagtttgggggatttctactttgagttttagttcctatgatactggaatttcaaaataaaagcacttaaaaatatcctttatggtaagtttttaactacctaagaattttttattctttatttttactctctgcaatcatgttaggacagcttaaaataatcaatggcttttgaaggaaaatctttaccaaaaaaggttaagggactgaaaaaggaacaacagtaacaaaccttaaagaagcgtttattgctattttctttttctctttctgttgctagctatttgatctttcctaatatagctgattctcactgttacctctaatttttttctgagagcttttgaaaactatttctttgaaagaaagtaaggcaaagcaacagtttagtctgtttatcagacttcaatattaaaatattagaagtacttttggaaaacttcttaacaaatcttctgttactttaaataaagctcccagaaatttatttcttcaacttttcccctattatttcattaaagtgtgtatatctggagaatacattgtcccccagatattaattaattaagcaatttagttaagcattaattaagcaattttatatttgtttttattacagttgctgttctggtcagaatgattgccaatgatagcaacctctaacaaacactgcactgaagttaattgtctttacatccctgaagggggaaactgggaaatgatggtgattctttgaaaatagtcattccatttttttttttagatatgcctgttgagctaccttttccttgtatacatgtgagcaacaatatttctaggtatagatcatttatagctaaccaagttcccacaatctctgcaaacctttgtacttttcttttttctttcttttcttttttttttttttttggtttttttttgagacggggtttgtccaggctggagtgcagtggagcaatctcggctcactgcaacttctgcctcccaggttcaagcaattcttctgcctcagcctcccgactagctgggattacaggcatgtgccaccacgcctggctaattttgtattttttttttttagtagcgacgttgtttcaccatgttggtcaggctggcctcgaacttccaaccacaggtgatctgcccaccttagcctcccaaagtattgggattacaggcgtgagctgctgtgcccggacacctttgcacctttgtacttttcaacagctgtgcctgttccactccctccccaacccactgcccctccacctccaaaggcctccttaccatgccagatagaccagatgattgtttcatcttgttgaatcttaacttgctaccctggagatactgcctacattctaccctggagatactgcctacattctaccctggtttgtagttttcagtgtgatgatatacctgaggcaagtgtgttggggtaactaagagtaatctttttcaaattggtttataatcaagcaaatttctcactggaactcaaagagagggagacaagctccttcttttctcacacctccagttggggtatgtttttttctcgttacgaagaaatattcaatacttttaaaacttggccaattgccagattcatgatgcc

SEQ ID NO: 31898 - DNA, 2300 bp, Homo sapien
aaggttgtggtgaactatggtcatgccactgcaccccagcctgggcaacagagcaagagcctgtctccaaaacaaaaacagaagaaaaccaaatgtgactccgagtatcttgaagaaatataaagactatccctattgattaattaggaaggtaatcctggcaacatcatatagacacctttatattacaaacttacagagtttattcataaacactaatctggtccttgcatgttccccctcaggatagctgctaaaatttcaccaaaccttttcttttttttaaatgatatctctttaaaattattttaaattgatctgtaatatatatacatattttcagggtacatgtgatttgatacactcatataatcaaatgaaggtaaatggaatatccaacaccttaaatatctatattttattgatgttaggaacacttgaattttgctcttctggctattttgaaatgttaactatagtcaccctactgctctatctaacaccaggacttattccttccacctaatgcatattggtacccattcatcaacctctctttatctgctctgatatggtttggctctacgtccccacccaaatctcatattgaattgtaattccaatgtgctgggggagtgacccggtgggaggtgactgagtcctgggggcaagacttctcccttgttattctcatgatagagctctcaggagatctggctgtttgataaatgtgtggtgctttcccccgctttccccttgcctctcctgccaccttgtgaaggaggtgcttgcttctccttccaccatgattgtaagtttcctgaggacttcccagccatgcagaactgtgagtcaattaaacatattttctttaaaaattacccagtctcaggtagttctttacagcagtgaatctactctctgtcttcacccaatgttttctactcacttgactttctttacttactctcatcccagttccagcctgtctccagacccaaagagagttcatcaccccttgactgaatagagcctctggacttcagcttccagtggttagcagcaccacctcactccaggagagctgcaggaccaggcagctctgtgctcccttctgtgttttatctgatggcatttaaaaattacataagataataatagagaataatatcctcaccccattaatgtgtcacacaacaatattttggtcaacaacagaccgcatatacactgtggtcccataagattataatggatctgaaaaaattcctgttgcttagtgatgtcttaatgaccctgtgtaggcccaggctaacaagtgtgttttggtcttactttttaacaaaaaaatgttaacggcaaaaaacaatcaaaataaaaaataaataaataaatagaaaaaaacttctagaataaagatatacagaaggaaaatatttttgtgtacaacgtctttgtgcttttgttgcctgtttagggtagttgtccaggttcttggcgtttttaacagagaattgaacaaaacacacaaacaaagcaaggcagtgaaggcagggatttaaacaaagtacactccatagggaaggaaaggccttgagcaagcagctcaagagcattgattacagaattttctggggtttaaataccctctataggtttcccactggttcattctgcgcaaatcagtctgattggttgcaggagggaaccggttggaggtactttcattttcaactgccacacagaaaaaggaggggttgcaactgccacatagcaactgacacgccgaaaaaggaggcgttgcaactgccacacagaaaaaggaggggttgcaactgccacgcagcaactgccacgcagaaaaaggaggggttgcaactgccacgcagcaactgccacgcagaaaaacgaggggttgcaactgccacgcagcaactgccacacagaagaaggagggactgcaactgccatgcagcaactgccacacagaaaaaggaggggttgcaactgccacgcagaaaaaggaggggttgcaactgccacgcagcaactgccacgcagaaaaaggaggggttgaaaagggagtagcttctgatattcagtaagtacgaatcggccttaggttccctgcctcaagaccctattctcctgcctcacttttagctaagggttattacaaaagagtcagaaagttaagacaaaatatgaaagtttataaagtaaaaagagttacagtgagctaagtataacttattgaaaacatttttttaatttagtatagcctaactgtgtttatacag

SEQ ID NO: 31899 - DNA, 2300 bp, Homo sapien
tcaagttgaaggaatcattttaaaaaggaatatatcaaacaatacaattcattgtgaatttttgagatgattcatttagagtataaatttttgatcactttatcttatagacataatttatttaattcaaaagtaaagatggatttcaacctgatattagcgacttcatattcacatgcatatttattatatatccacttcattacagttctacagtctgcaccttacttatcattagggacacttaccttatgataaatgggcttcactagtagtggtttgaggcattattatatattcatctatgaagattataaagcatctattaattcatttatccaggaacgattactttaaatcccgaatattcttctaatgaggcagaaaatagtgtattttttctgttattttaatacttggttttaacttttaaatgaaggctaaatcaattaaattagttaatttgatcaatcagtttataaatttggcaggacacaatagttttgagtaaaaggattgcatgatgatgcataccgaaacccccgttttaagtctcagtcctttggcaaatatattctgttctttcattggtccattaggttctctctgcttcatataatgcaacttcaaaattggtataacattgtctatggatgcagcttataaggatcaatgatttaaacataatttgtaatgttccaaaaataatgtattaatttacaaccgtatctgaaatttgatacttttttgggtggtttgaagaaaaggagttgttagtaggcatttaactttttaaaaaatattaaaatctgtatatcgactgctaatggataaagttcatctgtaatattgttatgataattgaagcaaactactttgtgccacaatacacccttttctcttttgtacttcataaatcaatgattctttatgtttctgaacacagatgtatgccccagggtagaagaaatatttctcatttgctttcctattttcagtctttatcacaagtaatgctcattttgcagactgtacctgtactatgtacacatggaaattaaggtgagcttaaattcatataatttttatttgtgaccttactcttggggttagaagactaataaaaatatcagccacttctcttgtttgatggagctgaaagggaaatggagagattaatgagactgatcaggattagaaagaatgaacaaatcgagtaaatttcctctcgggctccgtctctccctctataaacatttattaagcatctaatttaaaactaaaaattgtaaaaatgtcggaaggaaacagttgttacatacactcctttattattgtgaactgaaagcagattacaaagttttaaaaattattcaaggatattcagtgcacgcagtcgtgaaatttgattccaagagaggtacgcgcatttagcccttcacttaaactgtatcataaagccactacaagagatgtaccttcccaccctcacgtaatctttttgcaatcactgctggcaagccaacatttgtggtgatttcagattaggagcctggcatctttgctataatcaaaaccttattctcccctctccgctcctccactccttaccttaatgaaagtgcaaaaaactagttttactggggagggaggcaaggaaggaaggaagagaagaaggaaaggagggaggaaagggggtggcacagacccaaggagggagtgaaatgaaggaatgagagcgctgtccctttttctcgcttttgctttaggagctccctgcctgcctgtccccgcgggtcggggagctgcacctcttgcaggctcggctctcggccccgccccctagcgtcggagcccgggagccgcggctgcagcctatctctttaaatgacagctgaggctcgggtcccagtccggggcttgacgtcagtgcctcctcccgtgctgccaggagtagttagcgccaccgtcggcgctccggcctcgcggcacgcttgcaagctgccggggcggcgagttttctttgcttcggcccctcctcccgccctccccacggagagccgagcagcagccctagagcctctcgcaagtctctctcacacttccccgccctcgccccaaaggagcagcagctccttcttgcctctccattgccgccgccgcaccggcggagctcctctctcgcgcgtctctcctccgatggagctcgggcgccgccgacgccgccgctgccccgaaccctgagcggggccgccccggtcggaggaacgcgccgcccagtccgagggcgcagagcgcca

SEQ ID NO: 31900 - DNA, 2300 bp, Homo sapien
aacaatgtggccttttcctatggcattatgcactagaatggaaaaactgacagaattctagaaatcatcctcagtaattgccttttccttcttcctcctattcaatagaaactgaatcctattaaatctttcccaaatatcttctgtatttgttcagtactctacctattggttggcccttcctcagttcatataactcatcattttcctggactgaattttctttttactgatactactgcttcagtattgacccctgtaattcatcttttcctcagttgccatgacttttgtaccagttctccttccactgctaccctagttcaggccactcacatctcatgcctgtgttattgtaactttctcttcctaaccagtctccctcttccacttgtgactaatacggaatcatcacattttatactaccctagaatgacatttcatttcaattatgtaacctttagactctttaccacggcctacaggctcctttttggtccagcctctgttcatacctctgacctcatctccttcaacttttctctaattcaaaaatccctagcaacattggctttttatttctaaaccagaaaccacaaaactccttgccatctgaaagtctttgcttgaaatgttcttcacgtagtctgtaaagcgacttcttcattatcatccatcagatctctatccaaatgaccctcttaagaagccttccctgagtattcaaatcctctcccctttgcactctccatcttaacagtatattctattgtataattcctgaaattatcttggataatgtgagttctgaactcagtcagctttcaaacattggctttttcacctactagctaatgaccttgggaaaattattcaatctccatttattttttggtaaaatgggataataatacttcatcaggttgttacaaaaattaaatgacttaaagtttgtagaacaatgcccagttattcattattattagttgtaggtgtagcaaaatcagtactaagatgtaactctttaaatgtttagtttgcttgtttctgaaaccctggcatctacaacagagtgtggaactcaacagtatgtccttgataaaatgtgtgaccaattgttgcctgactagtgatgtaagaagggcagctgtgattaaagacattcaaatttcaaatgcttttaaacaatgtggaaaaaaattactccagcattctgctgttggctccagttgaagattcttaagtgccaaattatctgcctttggacagaaaatttcagttactgagatttggatacatgggaagtcttaagtcctagaaaagagaatcagcatgaagcaaaccacaggggacttgacttccaactgtgagattaatattagggatgagaacaccagatctagatagaattgatagtattagctaggttacctgggtcagaaccagaaagtaggctcccagcagtgacccagtgatacagagaagggccaattcagggagcttcctgaggtggggatgggcctaacaccttccagtggttaggattggctcgataatggtatagaacctgtccatcaggtaagaagcactagatcccattagcatatccatcttggcctctgctggaaaagtaggaagcaggaaaaaagtcagaggcagactgtaattagtcttcttaaatattgctcatataaatagaatagctctgatttagataaaattgaccacaactcattttcattttggtgctgagatcttctacataagatcatgtgccatattttgatttttactgcatattattaggaaatccatgaaatggaagggacattgaggcctcttactttttaactgcttgcctcaaataaatgatcttacctcagagtttaatagatatgtacaaaagggaattgtatttatctttccacaatttccatattatcaaattgtaagtctgtaacactgttcactgtgtttgtaaaccataataagtgttataagatactgtatttggcttttggcaggcttttttatttttgactgtagcatctgctcagggtgtcagaatacaaatttagaaaggtatatatatagccagcatgtcatcttttcaccaatggatttgcttaaaatttctcacacaaagctacatttactggaggatctttctataaaaaataaacagaggtatgtgtctgatccttctaaaagacttggcatttaaacaaaatacaaagctcggttatgtaaggactgtagtaccaatagtcatgttacataaagctttgcatgttatgaa

SEQ ID NO: 31901 - DNA, 2300 bp, Homo sapien
acctacaattgaatcacattttttattcactacagttatatttactgttactcttatgacagctcatcatgctttctccattaatggtatctacgttttcttttaaaaagaattcatttacatataaaggtaagttaaagaaaaatataaagtacataatatcggtatgaggattgacaaagattcttgaccaaactctagcctgactcttctaagccctcttatcagcaaagcctcaaacttgcctataaaaactacagaccctcagcacaaatgatttcatccacatccttcccctaccggtttgcccacacattaaaagacttgaacaaactcatatagtttataacagctcaaggctgcatctctaagatgaagcccccttaaatttctgtctgagaaagctcaagactgacaaaataatttatttgttccagccaacatgtgaaagtagcactcatttcctagtgtctgcgggaagggtaggagccttatttccataagcaacagtttacaacccagatggatttcaaatggaccattcttccgccattgttttttgtaaatttccgtttccctgactttgatcaagcccagttgttctctttccctactcccgcattctccttttaaaatacagtcgcctctggacaaattgtagtttagttcattctggatcttattcccgattgcattagtatatcactataataaaaatctgtcttcaccactttaactggtgtctgcctttatctttgacaggatatggtgaaaattaatgagggtaattgtgcaaattatggaagtctgggcaacattgaatataaattattgtgtttacttcaagatagttgttaaattcattctcttacaagtgtgacagaattagtcgtctatcaagtactgttttaattcataaaagttccaagaaagggccaggcgcggtggctcacgcctgtaatcgcaacactttgggaggccgaggtgggcagatcacgaggtcaggagttcgagatcagcgtgaccaacatggtgaaaccccgtctctactaaaaatacaaaaattagccatgattgctggcgcgcgcctgtaatcccagctactcaggagactgaggcaggagaatcgcttgagcccaggaggcggaggttgcagtgagccgagatagcgctactgtactccagcctgggcgacagagcgagacaccatctcaggggggaaaaaaaaatccaagaaagaactgagtctggtacagaattcttgatcctaagaaatcctccaaatgaagaaactttcaaaggctctggaaacaatacgaatgattctgtcttcagtcacaatgatgaactgaacacagctgtcatctccctccttcgcaccaaattctggatattccagaaaagcgcaagagaaatagtgggagacaaacactggatgcaatcctcctatcacctgttttatcccccattcttacttcgtcagagctcattccatgaagtggtaacttgatgacgatggaaacattgggggtccagcatggaactttttcccacctttacttcttgccaaaaccttcctggattcagtattgcaatcaatgttatggcccgtttcctttcagatgcacttcaagattagctctgtcactgacaacatggggaatacatttcgacctccagattttaaaagtgccattattattttgccattaggtagaaggctaagtctcaacgttgtgctaataatagcatctttaagtccctggactaagacctcggctcctggttcgggaatcagactgcctgggcggcactccaggctccacagctccccacctgtgagctcctgggcaagtcactcggtccggatttccagaggtagtttgggggaactgacagtacacacaccacagggcagtagtaagaaagagacaatgcaaaggaattggcacagcactcagcagacaatataagctaatatgtactctgtctacaccctgcgttttagggagtcaatcgaaagcctccactcacgtgaccactccactacccggcgccaagacgcgctgatgtcacgacagcgtgcggcgtgcagacgtcggcaagctgcgccgccgcttcgggttgcttccggatctggtacttgggcagagctccccggggttcattgtcttcgcttcacaggatctgtttgagtcctgtccaccggatcctacggggggtaccttcgaaaaaaaacgggctatgctgctgttgcgtgtgggtaccctctcctgacgcctccgccgcccgggtcatgt

SEQ ID NO: 31902 - DNA, 2300 bp, Homo sapien
tgttgagagtgttcttcaggcaattattgaaagaatccccccgtgagtatttggtgatttttgtactagttgtctctatttaatagttcaaaaactgtccatgtttaatagttcaaagactgtcagcttgaactgttattttagcttaatggatgtggcaaatattcttgcaggcagcgagaataaatttatttgcttttagtaatacatagaaggcaagtacagtaaagtaaaagaaaaagtaaagatgattgatagaggtcttttcatgacaatcattataaaatatacctcagtacattggcagttattttcctttgctttaagctgaacaaatatattcataaataatttgttaaaactagaggttattaaatctaatatattttataaaaaggtctttttatttaggctgttgtgtatcaaactttctcaagaactcaagtacaatatctaagttgaaaataagaattttattaagattttaatttagtgtatatatatttactttttacttatatttactagtcctaaagtgcatcgcaaaaatcctctgagagctttggtatttgactccacctttgaccagtatagaggtgtgatagccaatgtagcattatttgacggagtggtttccaaaggagataaaattgtatctgcacatactcaaaagacatacgaagttaatgaagtaggagtcttgaatcctaatgagcagccaactcataaattgtaagtaatctgcattagtaaaattaaaatgcatttgtatgtggttctatttctgcatttttctcaacttggtatgcttagaatgatcctcatttggtaacttaaaaaaaactatttaatgcaactatacagtaaatgctctgtcaaggaatctcatgggaaggacaatagaaacgtcagttgatactttttttattctaaatgactagttataactagatttatgatcaagggtagattggatcctatatcgatgtatttgatgagacaatgaaagagttagttccctccacccatatccatattaggtatcatttttgacatttcttcataactagattttccaatgtaaaggtggtataatagaaaccttaataaatctttagtgtggaattcatggtaaaaccttgattaaaattcttggggagtaggattagcaagggtagtgtgcattagaaaaacatctgaattgacttgtaaaagaactatttattgagtgcctactccgtatcaggtactgatgaggcatgaccttgggtacataatttgagctttgtaaggtcctgttccttgtctgtagaaattattgaaccagatgactgtcagatcacatttgagtgtttagtgttatatgtctaaaaacagcactatattgagtcagaaagtctatttttattttactgaaatattttaacatctatttatattctgccatatataccaaacattatcacatcttcatttaaggttcttaaagctcattctaagtgtaaatcattttagttttgtagggatttttttttttaactaagcttaaactgaactcataggatttgctcttttgctacaggaggaatatcaagtgtccagtttgttgagagttcacatttttcttggataaaaatttacctttttttcctttgttaaagaacattttcaacacaattcattaataaaagacatcacaagtgtacttattataatgcttttgtacttactagtttcactgtatttacatatattttagaaactgctgtttaaattgcaaaggttggcagaatcatgaaaaaggcattaggtttataagtagagaggtctaatggattgtaagacctggtgtgttcatttgctgacaagcttcagagtttgataattgatatgtagcacttattttcaaagtgtatggaaagtttggaaagtgtatgatagtttcctgggaaggtagaactaattgtgagttatgtgcttgaaacattaaagcagtaaatatttgcatataataattttatttagatatgcaggacaggtgggctatctgattgctgggatgaaagatgtcactgaagcgcaaataggagatacattatgtttacataagcaaccagtggagcccttgcctgggtttaaatcagcgaaaccaatggtatttgcaggtgaggagttcacaaattcaaaggttgagggccatgatatttttaaactaaaagtctgtctcagtggttaaggaaaaaatacacattctggttattttaaataaccactaattccagcatattgtttcactttgt

SEQ ID NO: 31903 - DNA, 2300 bp, Homo sapien
taggagtacatggagaaaagccagataaaagtgaaaggagagttactattaaataacaaataagaaactcagggcatagcattctgagaggctgttttttgttgttgttgttgttgttggggcatataactctagataccctcactatgccctaaaatcttatgttacgggatagtatatatagaaaacagatgtgaaacatggggaagcaggaggggaaaaatgaacattgacatctataaaactcccacacagtgcatgaatgttaatgttaacatgcagagacaaattccagtgtttaacaaacatgctacagtgacttggaagtttaactttatttaatcatcttgtcagtgaagagagttagcatatataattcttcttaccaaggaatcttcatgttcctttgtattgagaattttcttctactttgtcacccagttttttcttcttctatgtcttctttcagacaagaccttgagcaagtaagtggcaatggaatttaaagtaaaatgaattgaggggcatattaaaattactagagttgaaaggaagattagtaggtttaatgtttataaatatttttaacagaagtctgtcaattttagtttgcatttgggtactactttctgaattataagtggtcttaaaaagccttgtcgtttggaaacttaaatacattttgaatttaatgagagaacatgatttatttttgaactacataaaaataaaatattccagcttccagcattaaggtaattatgttcaagatggatgttttacataggcagtcaattccacacttaacagaaagtcatcatagactatgaattaagatcaggaaaaaacttatttcataccaggaggcaagaatcaacagcaactagtagctttttggaattacaaatgtgtttcctgcattctaaggaaacactagaatacctatgttttcaatagaggttaggtatcaattggactgcttggaaacaaaaacacaatttttataatgatttcttttgaaaaaatgagttaagaaatttttaagatttttaatattttggaccacaacatagctggagctgtaacaacttcaaagttaaggaccatgtctgttttattctctatttgctttgtattctgtatgatacttaacatggtatctttcatacagtaaatgtataagtgatgcttcctgaagaaagaaaggattttaacagtacttctgaaaataatctgttaatagagtgtattattgtcactttatgaccttcctgctgaaaatctttagaaaccaaatataattttgcaagtccaggcaccaattgttttaaaattaagacaataggagtatacatattcttgtctgtgattgggacaacttgtaagcctaattgaaattttctttagacttcagttttataagtgaaacatttaaatgtctgttttgactaacattacaagctttgaccacattgttaaaagtaatagctgaaactaagtgcttgtgtgtgctaagctaggctctgtttaaacacttattatgtactaggcattgctctaattggtttacatgtattaactcatttaatcctcacaaaagccctgtgaagggagatgcaagctgaagagccaaataggaaatccaaaggtctcatttattaatggcattttatgagtgtcatagcatttatttaaacatagagttgtcattggtaatagaaagttaaacagaaacccaactcatgaatctgaaaatgatccattaataatatatagtattgtccgaagcctcccagctgctgggaacattgggaaggcatgatatttgtcttcaataaaccattttctttgtcaggttcaccagcttattttcctttcccctataaacatattccccttgcttttgcccttgatttaataaacataaaaagataacatttagatccattcacaagaaactgtatatgtaatattttgatggaaacatatctctttggggagtgtaatgcggtagaaagtagacatttagtaaagagtaaagagtaataaaggtaatctctcaggaagtgtaatatttatcacttggacttttttccttttagttttgattacgaagatgcaggctaccagactgcagaacttgtaaaaatggatattctactgaatggaaatactgtagaggagctagtaactgttgtacacaagtaagttcaatagaaactaatcatggaatgtgaaaatacttttgatatgtttttcatttatttttgtttgagcagctgcatttaaaaaacttctaa

SEQ ID NO: 31904 - DNA, 2300 bp, Homo sapien
ctcagcactattcacagtgaggcagtagaatagggtctggaggcagaggacttaaggccaattcgtgctgacttcctaaagctaaatcaaaggaaaacaccaaggtctgggggcaggaaatctaaggccaatttgtgctgacttcctaaaagagaaaacacctgcgtctgggggcaggtaacctaaagccagttaaccaattaacgcaaacttcctaaagctagaccaaaaggaaaaaacccatctccccatgcccaagtagcaaaggaccaaaggctactctccctacgatcgactgccttccaccacctctcagatggaaggggaaagtgccttggattgtccgtggactaagcatgggccatcccttcatctgcatagggagccaattcacctcagcctttaattagccacggaccaaatccttcatgcagataaggggtaaccgataagggacctcaaaaggagtattaaaacccagaaaactttgtaaccggacccttgagccgcttgcttgggcccactcccaccccatggggtgctttcttgcttcagtatccctgctttcgctgcttcattcctgtgtttcgttccttttgtgcagttctttgttcaaaatgccaaggaactggacacctcacactcatgaccttccttccaataacaacagtagcaaagataagaaatcaacctgagtgtccatcagtgaatgattggataaagaaaatgtggtatatatatacaccgcgaaattcagccattgaaaatgaaatcatgtcctttgcagtaactggaggccatcatcttaagtgaaacaactcccaaatagaaagaaaaataccacatgttctcacttacaagtgggagttaaataatgtgtacacgtggtgatggaaagtagactgatattagaggcttagaagggttggggagtaggagtgggtagatgatgagaaattgctaggatcattgtacattattcaggtgatagatacaccaaaaccccagacctagtcactaaataatatatccatgtaacaaaattgcatttgtaccccttaaatttataccatttttttaaaaaaaaggaaaacaatatgtcttacagataacagaagctgtgagttactgtaagaatgctgatttccacatctttcatggtataagtcaacctacattgtgtaaaatggaattatgtagcttttaagtgactccgatctcttaatatacgtataataatttttcttaattttagaataatttttgaggaactaaaattgctttttgtcaagaaatttctcctccagagatgagcagtttatttagttcactttgttttctttttcttctgttgaattctcttattaaaaataacatgtctagtgtgatcctattgttataatttgaattctgaccttgttgcttactacctgtgtgaccttagtcaaattatgtgagtccatttcctcatctataactgggcattttatttacttcacaagatggttgtaaggattaaaatatgtacacttgtccctagtatctgttggggattgattctaggatcccccttcagataccaaaatccacagatgcttaagtccctcatattgtatgacatagtacttgcatatcacctgcacccatactcccatatactttatctctagattacttataatacctaatacaatgtaaatactgtgtaaatagttgttatactgtattgtttagggaataatgacaaaaaaaagtctgtacctgtttaatacagatgcaaacatctttttcccctaaatattttcagttcttggttggctgaatcctcgaatatggaatccacagaaggctaactatacttaaatgacctagcccactgccttaaactcagtgtctgctcaaaagagaacagctattactattttttaaattcagattgtatatgtgcatgtccttcttcagtaatgtacttttaaaaatcatcagtatattctgtttcagtgctctatttattatttacatcttttaaaaagttactgaatttaaattatctgtttattatgtaaagtgttctacaatggacttttctcaggtttgaacttgttctggaagctgtgcgtcaccgtaatgaggcttgtaattcttgataactatgacttggctagtgaatgggcagccaaatacatctgtaatcgcatcattcagttcaaacctggacaggacagatattttacactgggtttaccaacaggtaattaactactttttccattttatattctgatattatctaaatttaa

SEQ ID NO: 31905 - DNA, 2300 bp, Homo sapien
acacacatgttagcctaggcctacacaaggtcaggattatcaatctccctgtctttcactttcacatcttatcccactggaagttcatcagggcaataatgcacatggagctctcatctataataacaatgccttcttctggaatacctcctgaaagacctccttgaggctgttttatagttaacttttaaaaatataaatagggccaagcatggtggctcacgcctataatcccagcactttgggaggccgaggcaggcagatcacgaggtcaggagttcgagaccagcgtggctaataagtgaaaccccgtctctactaaaaataaaacaaaattagacgggcgtggtggcagctgcctgtaatcccagctactcaggaggctgaggcaggagaattgcttgaactcaggaggcagaggttgcagtgagccaagattgtgccattgcactccagcctgggtgacagtgcgagactctgtctcaaaaaaataaacaaataaataaaaataaaaatagaaatagaatgaatacactctaaaataatgataaagagtataatatagcaaatacatataccagtaacatagtcatttattatcaagtattatatcctgtacataattgtatgtgctagacttttatgagactggaagcacagtaggtttacacctatgtagccacaaacacgagtggtgttgctctacaactttacgtttactacaatgtcgctaggtgataggaatttttcagttctgttataatcttatgggaccattgccaaatatccagtccattctttacctaaacttccttatgtggcacatatctgtaattcaagactgtaattcagtctccacctttctacagcattctttctaaaacacgtatgttctagtctcttatcttcaattcataaagcttaagtgactccctattgcctacaatacaaagcctaaattctatgcatagcctacaaactacttcatcattttacctcaatcttttttggagagacagggtcttgctatgttgcccaggctggtctccaactcctgggttcaagccatccatgcaccatgacctctgaaagtgctgggattacaggcgtgagtcaccgaatctggccaaaaatcgcttttgcaaacttactgaaggcgatagtactaataaacctgtctattatcagtatgtgagcaatgttgctgtttgaagctaaatcaacgagaatgtaacatcctactcttcactaaaggatgcaagaggagtcattacattcaaagaagcaggctggatttacaacccaggtgaaaaacttcatataacgagtttgaggacacagcgttttacatttttttaacttgtagtttccacagaaacagaaccttaagttggctaggagtcaagattgtattgttcctaacagaaccctaaacggtgttattaatggaacagtgttcctgatggaacatggtgaagacacaacacacttttctccttttgaatgatagctgctttctttacaataatttccacagcccaattccttcccactcctgtataaacatctgtgatacccagctcaaagctgattccagcttcccctatccctttcttagactcattcagcaaaagccagtaccctattatatagtgttttctcttactgagacgctcccgatttcccatggtactgtttgcccttttgcaaactttgatgagttttttgacacaagacgcttatctgtcattgcgtttgcaaatatgcattcaatagcttggagtagagagagaaatgtattcataaatggcaaatatattcatgttgccaaacagcaacataagcaacaaagtacgtgtgagcactacggtcttacatactaaatctcataagcctaaagaatctactgcaaatccctctttgaaagatgggggggaggggaaagtagcgtaaagtgatgacccagaaactgcgatcttccaggcaagaagagcgcccagccgcaccgcactcggaccgaactcctcgcgtctcacctcaggcgtcctaaaggcggtgcgcatgcgcagcgcccgccagccacgccgcggttccttcctgcgcctttatctgcatccgggtccgtgggattcgcgctccactggtcagctggggtcgctctcgggtggttgggtgttgcttgttcccgctgttccagcatcgaagaaccattgggtctgccggtaagtttagcggggggtgcggcgggggcgccaagaaggggactcgggtcgggggacccgacggcaacttcgccctgt

SEQ ID NO: 31906 - DNA, 2300 bp, Homo sapien
ctgtaaatggtagtttaatgaaagtagcattgaatctctaaattacttagacagtatggccattttcacaatattgattcttcctatccatgagcatggaatgtttttccatttgtttgtgtcctctctgatttccttgaacagtgtagcacattttctttaccctatctgagaagactaatttctaagcttatcttcccatactaagttctgctggtgagctatgcagatgtatccctagacatgttgttcatactgaatttatttttccatacagggtacatattttagaaaatatttttgttcttagtttggaaaataatacaacactaataattcattaataatggtaaaatcatatgtgacttttcagtttcattttgtgagattctgattattatcttaccaagtattcctgaggtttgtttatcccacagcatatggctactttttgaccacatcatagaaaaaaatataatttttctaaatgtaacaaccattgatttcttttgtctgagtaaaccatagacacttttaatgattataaagaaatatttttaattttatatactttagaaagtaacaaatggtataattagataaataataatcataatctcatctcctaaatataaacaccattagtttttctttctccaaatatttttatatgtgtgcctatgttaaatagataattagaataatatatagtggtacgttaataagacattgtaacctaaatgtttccaaatttccccatttcaggttttttttctttcctttaattatccaattagatagctagaacctctatactaggttctataaacaatctagcagagtaacctcctcttgatttggagtaattcctatgagataatttttccttgatatttctttctgactaaaagatttaaaatagtggattttctaaaaggtttcataattcttcttcaccatgtattattttccattacagctcttgcatttcttcattttgtcatcgagcctctcaatcattcagtcacaattttggttatgtcacttattactcattcatttttactgatcaatttgacaagtcattataacaagtttactagccactatgtaacacatttgagatacagagataagacagaggtaaagaagtttcctttaataatgaagctaaaatctacctctctttaaaaaagggtgtagatgaaagcttgccataatcagtccgctggccttcttaaacaaatttggatattgtgcaatgtagcatggcggtaatgtgagtgtggaaacttaattactccgatatcttgcctatgaaagtaattatctcaattcattttaattcatcactttatccgaaacagttgagtctaccacttcaaggcaacaatttcaaatgtactaaataatgtttatgagaaaaataaaacacttgatatgttaactattgatccagacatctgcatgtgtttgggaaatgatttgtcatataatttaattttctttctaaataaacattaaatcagtgggcttgccatttgttgggtacacctgcttgtttctttcgggtgatcgtcatctgttcaatggagtttttataatcaacatcttaattaaatacctatttcttttcagtctacatctaaatttattgatctatcaagctgttagcatcaaaaatcagacagtgagcagatacattaaggataatgacagaaataatcacttatatagtattttttcccactaaggctttaaaatcacacacacacacgcagacacacacacacacacacacacacacacactttgatttatatgatagccactataaaattagtggatttatctgtgtgcagtgtaatgcactggtaatcccagctatttggaaggctggagtgggaggattacttgagtccaggattttgaggccagcctggacagcatagtgagaccatacctctttaaaaataaaataaaatagccaaatttaaaactctgaaaggaagttttccttctcacccctttgaacataaattttatatcacacttatctcaaatatgatttcctatctgtgaataatgtgataaagccagattgctgctctcaaatttagataaccagtcatttattcactgggaatctatgtctattctgcccttcattcattgccttgcttacttttaaaggttcatatgaggagaacatttgaatattgtatttgtaacaattgaaatacaaccagatgtgcaaggatagtgataacaataggcataaaaaatttcatggaatgttc

SEQ ID NO: 31907 - DNA, 2300 bp, Homo sapien
taactatagcagaataggatcagtttcccataaaacacatattataaaaatagaaaatatatatcaaaggaagaaacatagatatagttaaataaaagtacttgaaagaaatgaatgaaacaagttggaaaatatttcagcataaaacttgcaaaaacctggattttggagaatacgggaaattctctccagcttttaaaaatcgtttacaagaataaacaggcaaattcttactacccaaggagatacccttcacctttcctcattaatttcttttaactgttctcagtgtctttcagttacatatgtaaaattaaagagtaaaaccttgttaaaaattattgacagaaggactatcagctactgttgcatgcagtattataaagtatcatattcccatcagtgtttacaaaccttatccaatgttagcaaaatgcaaagggtaatcagacaagtatttttattcacaacatacttctaatgaattaattcctagttctctggctaatcagatcagtgagttagtgtgtgcattcaatgaaacagttaaatagctatccaaagcatattcttaattgaagcagtaaaagaaaaaaaacctcaaatttatattgacatcacattttacgtaaatttattcaccctaaaatctattataattaaatttttttgttttataaactatttgatatgggctaccttgactaacatgctttgtggaagagaaaaatactgcctaattaatgtgtagtgggagaagaaaaacaaggagggtcaatgtgcatttccagaggagactaaaagggtggagaatcaatcaaagagggggagaaacgcctagcactgcaccatttgttatttcgggatagaacaagaatcagtaacctcattacccctatccggtttctttaagtgatttcagtaggtagtgcagcaacagttaccttacggccgtgcgcaaaccctgttacttctggcttgaaccgtttgaggcagacaaatatgctcaggtaactgggtagtaaattgcagttcaaaccagaatctggccaattccaggtagttgtggggtggattaacagctaaagactccaaccccaggaggcttccgtgggaagcaggctcttgggagggcgttttaagacagaagatggctaggcagagaaagcgcctgcttccaccacctccagcgtcttcgcctgtacagttgttccagctgccagaggctttctggttaccatggcaaccgtcgggctctgctaggaactcaaagcagagcctctgaagttaggtaccaaacactgaggcttaacagatgcaaaagcagatggggagtggggcagagaactaggattgcccatctaataggtctacagctcctatggctatgacaacatttataaaatcagacttctgtttttgtgtttgtaagatgagattaagatgagatagttcttgcctggcattattcattagtgtcatctttcggtgcccggcgggagaagaagactgcatatcctctctcactattaaggcggtggaagggggttggggggagcaaacgtggtgaccaggaatgcatggagcctgctcattcattcattcattcattcaattatacattcaacatctcctgagtgctcatttgtgcggggcatcctgccaggtgctggatctgcaaagagaaaggagacaccgccccacccacaaaattaacaaaatgattaacacaaattaacagaatcctcacgaacctggggaaaaccaattaggcactgcctgcttcccacgggtctctcttggaagacagatttagaatccgaacgctggagaggaaagaggcagtcgccccgaaatagagtcagacaagaggaagagcagaaggggagaaaggcagcctctccctagggagggattctgttcaaggccactcaaacgtttctccgccgctgcgagggagaagaggtttgtttttcttttagaaaaagggagcccttttccctactgggctcaatttctagtaggagaaccccgcctccttgggctactgattggctcaactctttttaagataatttatgccaccatcctctcggcctgattggctccctggctcaattctgctgggagtcgcatcctacctgtttgggaggtgcactgcctttccacactctcccttctgtactcagccagctgctgctgaggtgggaggaaaagtcctggctgggagaattgagctagtgcagcacacgtaaaaaagcgattccgatgggtcctttgaaagcttttctcttctcccc

SEQ ID NO: 31908 - DNA, 2300 bp, Homo sapien
cttcaaagcaaagctaaaatttactgtagattagcagtgcctgttagaaaaactgcaccatctaggaaaaacatctgaatttttggtgcataactaacaaaattgaagtgtttggcacatattgactctgaatgtaaaatgacagaaacgtatcagcatacttatctctctctcttttttcctttaaagtgtctaacgtttataacaacttctggaggagataaacactggctctgctttgccttagtaaaatgtgcataacattctgtcttctgtgcagtacaaaaaggaaaatgtccccccctttttttgttgttcaagttgcacgtttggattctatcgcctcagataaaacagaacagaaatgagacagatcaaacacacaatgctgaaagtgtaagatgggactggaattccaagtccctttgccagcaaaaagccctaaagggggaaaacctcaaacgttgttacctttcctcccactggggaatgagttgcagaggtagtagaaacacagcaggtccgtttttgctcctgggtaatgtaaactttttggagctgttgattgagtttgatcacctgctagggagggcgcctgtgaaaagaggttggaaaaggattgctggaagtgagcgggaggtttcccaaggtgtgtgtgtaatctgcaaatggactttactgactggctcaagggaattctccagctctcagagctttcaggggaaatcggtctttattgcgggagtgtgaaggaatgaatggtatatcaggagggttaaggaatcaaataaacttcctgctgtctgatttcacgcaacatgctttgaacttggtcctgcgtggatgcgttgatgactaagtaaaggcgtgattagtccccttgccctccagcaggagcggaacctctttacctcttagcagccacgtcgctccacagtagggtgatgttgggggacgggcggcagggcgcggccccagggatctagggcatcaccgccacactacattcccggctttacaccaacacccaacagcagctctgtcaggaaccttggggcctctcgggagccccagcaagcggcctcggggagcagcccgaggctgcgcgtgggctccgctcctccggcgaggtgtgggcgaggggagcggcgctccgagcgcacccaggcgcccgacgccgcccgggtctgcgccgctgctagtgccaggcgggcgacggtcagttaccagggatcgagggatcgaggcaggggagtgtgtgtgtgtgggggggggggaggggggggagggggggccctgccttcccgggaacctccttagccctcctacccggcctgactcctcctcctccaggcgcggggctcgtgcccgccaccgccggcgcgcaccgcgcctccgcccgcgtccccccaatttccccccccggccccagctcctgtcatcgttttccccctcctcctcttcctcctcctcctcttcctcctcctccgcccatcaccgccactacgaacgccttcgcctccttctacacctcgcgccgccgccgcggctcctagcgctcctctccggcttccaccagcccatcgctccacgctctcttggctgctgcagtctcggtctctctctctctctctctctctctctctctctctctctctctctctctctctctctctcccaagtttcctatctcgtcaagatcagggcaaaaggaagaaaacaccgaattctgcttgccgtttcaggtagggtcgcacacgttggtcccgatagagacactttcctgtttgtctttgcctcgcgtgcatgcctcatctccccccaccccactttcagaggctccctggaaacggaggaggctcaattcccgcacctccctcctccccagcgcacttaaaaaataatttcgatacttatcaccagaagcatatttgcaactacaataaaatccaggacacctgctcggcagcacgttagcctggctcttttatagtcttcaactttgctcactgtgattaccgctgcctgcctggctggtgtttgctgccggagcctcacgcgccttctcttattgtgatcctcggctccagagcagctgtcaaacgcgtcgtttcgcagcacttgatcggaacccggctgcctctaagacttggtcttgggcaaccgtgggtgggcaggaagggaaattatttattttattttgttaaggggagtgaagaaaagaagacgtgaggaccgcagttcactgtaatgtagagtaattgcaaaagtgggctgcctgcccctagcttttcccgctg

SEQ ID NO: 31909 - DNA, 2300 bp, Homo sapien
atattagaatccaggagaagaccttataagtattagaataatatatgaatatatttacaaaaattgtgacattcattaaagaaaaattttgttggagcatagcaattaaggctgggaagaaaccatacactgcttaacttccattatcaaaatatcaacaatttattagtaatataaatggagaggtgatagagattttaatgaagattgactcacagaaatggaaaataggaaaatacagtagcaagtgaactgttcatgccaagtataagatacttaggttctctggttgcaaggttttaaatggcatgctttttatctttgtgaatttcaattagactctgcaatgggcaagtcaggaaaagaatattaatgatggaggagagagctgggtggtgttccattcttcacagagcaagctaaataagagagcaaatgtttgtttaggttgtaacatattaaatgctcatccagaaaatggtgattaatagattaaaaaggacagctggaaatatttacaatgtaaaggttttactctcctcccataatcttcaaagcaaagctaaaatttactgtagattagcagtgcctgttagaaaaactgcaccatctaggaaaaacatctgaatttttggtgcataactaacaaaattgaagtgtttggcacatattgactctgaatgtaaaatgacagaaacgtatcagcatacttatctctctctcttttttcctttaaagtgtctaacgtttataacaacttctggaggagataaacactggctctgctttgccttagtaaaatgtgcataacattctgtcttctgtgcagtacaaaaaggaaaatgtccccccctttttttgttgttcaagttgcacgtttggattctatcgcctcagataaaacagaacagaaatgagacagatcaaacacacaatgctgaaagtgtaagatgggactggaattccaagtccctttgccagcaaaaagccctaaagggggaaaacctcaaacgttgttacctttcctcccactggggaatgagttgcagaggtagtagaaacacagcaggtccgtttttgctcctgggtaatgtaaactttttggagctgttgattgagtttgatcacctgctagggagggcgcctgtgaaaagaggttggaaaaggattgctggaagtgagcgggaggtttcccaaggtgtgtgtgtaatctgcaaatggactttactgactggctcaagggaattctccagctctcagagctttcaggggaaatcggtctttattgcgggagtgtgaaggaatgaatggtatatcaggagggttaaggaatcaaataaacttcctgctgtctgatttcacgcaacatgctttgaacttggtcctgcgtggatgcgttgatgactaagtaaaggcgtgattagtccccttgccctccagcaggagcggaacctctttacctcttagcagccacgtcgctccacagtagggtgatgttgggggacgggcggcagggcgcggccccagggatctagggcatcaccgccacactacattcccggctttacaccaacacccaacagcagctctgtcaggaaccttggggcctctcgggagccccagcaagcggcctcggggagcagcccgaggctgcgcgtgggctccgctcctccggcgaggtgtgggcgaggggagcggcgctccgagcgcacccaggcgcccgacgccgcccgggtctgcgccgctgctagtgccaggcgggcgacggtcagttaccagggatcgagggatcgaggcaggggagtgtgtgtgtgtgggggggggggaggggggggagggggggccctgccttcccgggaacctccttagccctcctacccggcctgactcctcctcctccaggcgcggggctcgtgcccgccaccgccggcgcgcaccgcgcctccgcccgcgtccccccaatttccccccccggccccagctcctgtcatcgttttccccctcctcctcttcctcctcctcctcttcctcctcctccgcccatcaccgccactacgaacgccttcgcctccttctacacctcgcgccgccgccgcggctcctagcgctcctctccggcttccaccagcccatcgctccacgctctcttggctgctgcagtctcggtctctctctctctctctctctctctctctctctctctctctctctctctctctctctctcccaagtttcctatctcgtcaagatcagggcaaaaggaagaaaacaccgaattctgcttgccgtttcaggtaggg

SEQ ID NO: 31910 - DNA, 2300 bp, Homo sapien
caaatttccagagaaatttgtctgggctagtaatacaacaaaatagcagtatagatatggctaaacaccagaaatctgctgcccacaatcagcttttctagttccatttcctttaatgtgctttgaagtttaagttacagctatccaacatttaaaattgtaaaacattttgtgagaactaaaaatcaaggttttataatgaaaacttttaaatttagtttttactgtgggtcattctccagtaaatgcatctctaaatcggtgggatgtagtaacatacacttacagaaaaaaaaccaaaatggtgaaaaacattcaaagcagcttgaactttgtgaagtgtcatataagagggtcatatgtcattgaaattacatatttaataagggtgctaatgggaaaagctaattcctcagaacaaacaattccaattgatataaatgttgaacgaaaaaaattaaaacatttataatttgatattagaatccaggagaagaccttataagtattagaataatatatgaatatatttacaaaaattgtgacattcattaaagaaaaattttgttggagcatagcaattaaggctgggaagaaaccatacactgcttaacttccattatcaaaatatcaacaatttattagtaatataaatggagaggtgatagagattttaatgaagattgactcacagaaatggaaaataggaaaatacagtagcaagtgaactgttcatgccaagtataagatacttaggttctctggttgcaaggttttaaatggcatgctttttatctttgtgaatttcaattagactctgcaatgggcaagtcaggaaaagaatattaatgatggaggagagagctgggtggtgttccattcttcacagagcaagctaaataagagagcaaatgtttgtttaggttgtaacatattaaatgctcatccagaaaatggtgattaatagattaaaaaggacagctggaaatatttacaatgtaaaggttttactctcctcccataatcttcaaagcaaagctaaaatttactgtagattagcagtgcctgttagaaaaactgcaccatctaggaaaaacatctgaatttttggtgcataactaacaaaattgaagtgtttggcacatattgactctgaatgtaaaatgacagaaacgtatcagcatacttatctctctctcttttttcctttaaagtgtctaacgtttataacaacttctggaggagataaacactggctctgctttgccttagtaaaatgtgcataacattctgtcttctgtgcagtacaaaaaggaaaatgtccccccctttttttgttgttcaagttgcacgtttggattctatcgcctcagataaaacagaacagaaatgagacagatcaaacacacaatgctgaaagtgtaagatgggactggaattccaagtccctttgccagcaaaaagccctaaagggggaaaacctcaaacgttgttacctttcctcccactggggaatgagttgcagaggtagtagaaacacagcaggtccgtttttgctcctgggtaatgtaaactttttggagctgttgattgagtttgatcacctgctagggagggcgcctgtgaaaagaggttggaaaaggattgctggaagtgagcgggaggtttcccaaggtgtgtgtgtaatctgcaaatggactttactgactggctcaagggaattctccagctctcagagctttcaggggaaatcggtctttattgcgggagtgtgaaggaatgaatggtatatcaggagggttaaggaatcaaataaacttcctgctgtctgatttcacgcaacatgctttgaacttggtcctgcgtggatgcgttgatgactaagtaaaggcgtgattagtccccttgccctccagcaggagcggaacctctttacctcttagcagccacgtcgctccacagtagggtgatgttgggggacgggcggcagggcgcggccccagggatctagggcatcaccgccacactacattcccggctttacaccaacacccaacagcagctctgtcaggaaccttggggcctctcgggagccccagcaagcggcctcggggagcagcccgaggctgcgcgtgggctccgctcctccggcgaggtgtgggcgaggggagcggcgctccgagcgcacccaggcgcccgacgccgcccgggtctgcgccgctgctagtgccaggcgggcgacggtcagttaccagggatcgagggatcgaggcaggggagtgtgtgtgtgtggggggggg

SEQ ID NO: 31911 - DNA, 2300 bp, Homo sapien
tttggctattcaggccgtcttttggttccatataaatttttaaatggttttttctagttctgtgaagaacattgttggtagtttgatgggaatagcattgactctgtacatttctttgggccgtatggtcattgtaatgatatgggttcttcatattcatgagtatgagatgcttttccatttgtttgtcttcactgatttctttgagcagtgtttttagaattctcattgtagagatcattcaccttcctggttagttgtattcctaggtattttattctttttgtgtcagttctgaatgggattgacttcctgatttggctcttggcttggctgttgttggtatataagataattctttttctcacattttttaaaactatatactctttgattattttatgtgacaacattttatatcattgtctgtagagagaagagaaagatattttgacttttttaaagaagaaagattggtgctttttgttagactggagaagtttcttctactttgctgcatgtttttggaaatgccacattttttgactttatccatggattctcacttagattgcttcttgtccatgaataagcctctagcattttgaaatttccttgtattccctcattgatgcaatagctgccacagctattgccacagaactcattcaggcctgaatgtatttcttaaacatttattcagtgttttctttctgccattgtgccgagtctagagaataaacaaatgaaggaggcatttctgcccttagagaactcacaggctagtgcaaatggatattttataatgcaatgtgaacagttcaacagcgaagtatgtacaaagggtataacttatccgtggagggaatttcaactggctggtataaagcagaccacttgtgtaaaatgctataaaggaacaaatttttatagccaagtaagttggaaagacatataatattacatattcctctcagacattcacaatgccctcaccatcattaaggctctaagaagtcctacacctaagaaacctgtttaatggtttaactaggcattccttaactctacttatccatgtgttagtctgttctcatgctactacaaagaaatacctgagactgggtaatttataaaggaaagaggtttaattgactcacagttccttatggctggggaggtctcaggaaacttacaatcatggcagaaggcacctcttcacagggcagcaggagagggaagaatgaaagccatgcaaagggggaagccccttttaaaaccatcagatatcctgagaacttactatcatgagaatagcatgggggaaatccccccattattcagttatgtcccactgggtccctcttgcgacacttatgggaactacaactcaagatgagatttgggtggggacacagcgaaaccgtatcggtccatgaaaataattacttccacaacaacgaaagtcaaaacagctagtggtctggacataaaatgacctatttcactccttattttctgaagatgttgaggctactttgattttctctgttgataaggagtcatttttttctgattatggaagtttatgtggggatgaagctcaaggttttgggtgaaagagtcaagtgttattgcataaatcaccttgtcaagtaccccaaggtgcaaggctctatcttccatataagctgatggggaagtcattaaagtaactcatatgcaaagaatacatgtcactacatgtttcagtttctgtatcatggccaagccagtacacacctcatgtaaaatgtgtcatgaatttcctcatggataatagaagtaaagatacatgacagtgattcaaaacatgtctgtctatactgtctacatataataactcatgtgacatgtctgatgtacttactccactaaccttttaaaaatcaataaagttgaataaacaattagtgtaatattgcttttcttttctttttagtctataccataatctataacagtggtaccagtggccccggtagttaatatcacagtcatgaagactcacagcctattgtagctagcaagagggaatccatgactcctctgggaagaaaggtgatcatcttttctttgacattggtatgttgatcaattcattctgtggaacctgtgggttgtactccagtagagtccttaggatggtctctcctgaaggatgcccaacagtagctaaaagtaaatttaccagaatagagtgaaaaggtaaggaaataaatgaatacataagatatgtgtttcgcagagctggaccaaaa

SEQ ID NO: 31912 - DNA, 2300 bp, Homo sapien
atttgatccttaaaaaaaaatctttgtaaataaacttaaattatctacaaaaatagtaaacttttaatgacagaaaaaatttgttgaattgtgttaaaatcatttgaaaattttcaaagaattcaattgttttgccaataaaatacgggttttgaaaatgtagcagactgtagttattaaaaacaaagcccatgacacaggaaaatatttaaaatactcattcaaaaccaagggataatatgaacaaatttaattggatcttaaatcttatataatatttaactttcacattctataattgtgctttggaatattttaaatttatataatttttttcatgggatttctactataagtagtataaattcacatttttagagacataaaatttaaaaggctttccaatttgcaggatctaaatttgttaaaccttcaaaagaggccgggcgccgtggctcatgcctgtaatcccagcactttgggaggccgaggtgggcggatcacgaggtcaggagttcgagaccagtctggccaacatagtgaaaccctgtctttattaaaaatacacaaaaaattagctgggtgtggtggtgtgcacctgtaatcccatctactcaggaggctgaggcaggagaatcgcgtgaacccgggaaggcagaggttgcagtgagccaagagggtgccactgcactccagcctgggagacagaacaagactccatcaaaaacaaaaaaacaaaaaaacctcaaaagaatataaataacaacaaaattaatgaaatttgtctcatacaaatatgtgctgaagataggttaccttacaggccagaagaaggtacttgcgaaaatatttggactgaaaaaattacatatttcaaaatgaaaaaaatagaaagggtattttctgtttagcagaatttctatgagcttattttctcaatttaaaatactataatacatggtgaacagttaagtgaagatgtcaacaatttgacatatatcacccataaagtacatgttttagaagagtataggcgatttaaaaagttgacaagtaataataccatattaaaatatattctttagaaaatatcagtgacccagtcttatagaccaaaacactaattaaaatacatcagcatacagcaagaatgatcattttattatacatatatatattttgagatggagtttcactcttgttgcccagctggagtgcaacggctcgatctcggctcactgcaacctccgccactgtgattcaagccattgtcctgcctcagcctccagaagtagttgggattacaggcatccgaccccacgcccagctaatttttgtatttttagtagagacagggtttcaccacgttggccaggctgatctcaaactgctgacctcaggtgatccacctgccttggcctcccaaagtgccattttattatgttcatattatcaatacagactttacaaaaagttttagctttaatatgtaattatatcattttaatttttagaactaatttcctttccaaaatgaattttgaattgcactttattggcccaccaatataaagtctcaaaatctcaaaaaataagaaaacgtataattttaattaattacattgccctctttcactctcaagggtctcagtttgggcaaaatattatgtggtcatcataattagcatcctagtatgcttaggagagatcagatgggctacacgggatttatgacttgctttgggttacaggcaatctcaaactttcctaatcaccaagtgggataaagaagtaacacggagccagggggcttgccaagagatagctgcgacatggaaggaaaagatcccaacaggtgtcactaggaattatgttggtaggtaggaacacccatctcaattcttttgtttgattcattacagagggacttatattagaagaactctcctaatggctgtctttttagttcctcccgtggagatagcaatcatctatctgattggtcagtttggaacgcgcagtccttcatgtgaccgcctcttcctttcacctaaggcggaaactgctcacaggaagtacctgttttacccgacccctccaggctgtaaaacggaaaggttcggaatttgcctctgcgccgtctttttttgcctgttacctgtgacgtccttggtaagtttgtctcattctggggttcgttgtcagtaagctgacagttataagacatggtcttcattcattgctctaacagttatcaggaaatattttgaaatttttttttttttttgagacggagtctc

SEQ ID NO: 31913 - DNA, 2300 bp, Homo sapien
aatgtaaggcggtggcttacatctgtcataccagcactttgggagacagaggcaggaggatcacttgagaccaggagtttgagggtagcctggtgacatcgcagagcccccacatctctacaaaaatataaaaatatattaacagagcatggtgacacatacctgtacttccaactacttagaaggctgaggtagaaggattgcttgagcccaaaaggtagaggctgcagtcactatgatggtaccactgctctccagcctgggcaacagagctaaattctctttttaaaaaggtaggaaagtattaagattagagaaataatataatatgtggagaatctgtggtgactaatgctttcatggcatatttggaggatacactagttcttccgctatttttcccaaacgagagagcttgatagtcatccacatttataagatggatctgagaacaagcaattcattgctttgtttaattgttcattcaataaatatttattgacattctatgtgccatgcactgtaacagcagataaaataaacacagatgagcaaaaattacctagcccaggccctcagagagaccacagtctatgagaaaagaatgatagagatgggattaggatgaagttaacaaattccatgaagaaagcagtacagaatacagagcacggagctctagctactgcccacgatgagcactttgggctttcccttagaaagaaaacttgaatccagacgtttaaaacacacaaaaaaaccaaaacccctgtctaatacaatgcgttccctcttcatacccgtccactagtcatctcaatttgaacaaatcatcagagttccgactagaacctaattggtgtttggttccaaggtatgggaattacttagctcattgatccatcatatgaaaatttccacatgcatcattactaatttgaaagacgcttttcccccttggagccaataattaatgtttccaaagatctattgggaatgcttatctttgctcagtaaaacagtaaagatatggagcttagtgttccctttcatgtcacaagggaactaatatttgtccccctccattttaatttatgtatcctttctctccataccccaccttctgcctctctctctctctctctctctgtctctctctgtctctctctctctctctctcacacacacacacacacacacattttctctttccccccccactctctctccagccgtcctttccccctacctaaagcagtcaacctctggaagtaagtcaactccattctgaaaaagaagagtgtcgcaagaagtgaaagtgattttgaccagaggtcgcttgtctccacctctcccctcctctccagaaaaggatggagcagcaaagcggagggtgtgcgcgtgtctggtggaggcgggtaaagaaatggggtgtctttaaagcaatagcttagcaaatactgggactagagtgcggctcgagtccacttcccaatagtttggcgagagtccgccgggtgagctgcaacccctgttaccaggaagaatctttctgctttcattgctctccctaccgccccccataacacctgaatgggagggtctcaaaggtggtttgagcccggacttgatcccctctcctcaccaccgctaccacccgacgcccagcagtccccgtcacccgccctttctccacctccaaccttgactctgggtacaaacaggtcctcgcacaacctgatgacagaggagcttcattggttagatccaaatcccagcggaagggagggggccaggaggtaggaggacgaacactgctgtgggcggggagcccacttggggtcgggggctgcgaagccggaggaggggcgagagaccccgttcctcatccccggagttacagtcggaacaaacttgccgagtcttgcagcgcaagcgcgcggatacgaaccccagaaccttcagcgcgcgggcacgaaagggtgtggagcggtatacatagctctacatacacattgagcgctgagcgagaaaggagggggcgaggaaggcaggttccgcctcccctggccccgtgcacacacacgcccaccgcggctcgggctggctgagcgcgggcgagtgtgagcgcgagtgtgcgcacgccgcgggagcctctctgccctctcctcgcaccctgctcagggcatctgaagagcctggaaacgtgaacaggcttgaagtatggcatgttgcaaagatggtttctgccaagaaggtacccgcgatcgctctgtccgccggggtcagtttcgccctcc

SEQ ID NO: 31914 - DNA, 2300 bp, Homo sapien
cacaagattttgtgttcatttccagggcatttcataggcactgtgggctttaaagtgtccatcctaagacgttagcagttgggttatctgtattatttgcatcttattatatccaaagtaaactcatttgttaaatttataaaatgtgactggcttaatataatgatatttggggatagtgtacttgggcccaattcaaattctgctaaacctagtaatcagaggcttatatcaacttaaagaaaaaaagaggtataggtatgattttaacaccttcctatttctgcacagctacacagacaataataataattcactgacaatcctgggctatcacaaataggagtttacatgggaaacaatagcatatttatattcataagttaaagtaaattataacttttcagaatgttagatttctaaaaaaaaaaaaaaaacctcaagttagcaggcaatatttttttaaagatttcaggcagtgaaattcaacatatatcttcttgaagtaatacaaaagtggcataaataaaagactgtgaaataaaatgagaagagatataaatgcctttagtattatcttcagctgaacttaaatactataacccaattaacaaaaatataactggaagtagctactctgaaagaatgttcttttaatttgaatataatagtttcacagattttaagtttgaattttaaagatacgatatgtaactgtttccccaaagccattattttggtttcttaattttttgatatgtgtatttttaaaatgaaaattgcaagggaaagtggtttagaaaatacaaatttaggttttagaaagtataggaaaaggcttacaaatgtaaggcggtggcttacatctgtcataccagcactttgggagacagaggcaggaggatcacttgagaccaggagtttgagggtagcctggtgacatcgcagagcccccacatctctacaaaaatataaaaatatattaacagagcatggtgacacatacctgtacttccaactacttagaaggctgaggtagaaggattgcttgagcccaaaaggtagaggctgcagtcactatgatggtaccactgctctccagcctgggcaacagagctaaattctctttttaaaaaggtaggaaagtattaagattagagaaataatataatatgtggagaatctgtggtgactaatgctttcatggcatatttggaggatacactagttcttccgctatttttcccaaacgagagagcttgatagtcatccacatttataagatggatctgagaacaagcaattcattgctttgtttaattgttcattcaataaatatttattgacattctatgtgccatgcactgtaacagcagataaaataaacacagatgagcaaaaattacctagcccaggccctcagagagaccacagtctatgagaaaagaatgatagagatgggattaggatgaagttaacaaattccatgaagaaagcagtacagaatacagagcacggagctctagctactgcccacgatgagcactttgggctttcccttagaaagaaaacttgaatccagacgtttaaaacacacaaaaaaaccaaaacccctgtctaatacaatgcgttccctcttcatacccgtccactagtcatctcaatttgaacaaatcatcagagttccgactagaacctaattggtgtttggttccaaggtatgggaattacttagctcattgatccatcatatgaaaatttccacatgcatcattactaatttgaaagacgcttttcccccttggagccaataattaatgtttccaaagatctattgggaatgcttatctttgctcagtaaaacagtaaagatatggagcttagtgttccctttcatgtcacaagggaactaatatttgtccccctccattttaatttatgtatcctttctctccataccccaccttctgcctctctctctctctctctctctgtctctctctgtctctctctctctctctctcacacacacacacacacacacattttctctttccccccccactctctctccagccgtcctttccccctacctaaagcagtcaacctctggaagtaagtcaactccattctgaaaaagaagagtgtcgcaagaagtgaaagtgattttgaccagaggtcgcttgtctccacctctcccctcctctccagaaaaggatggagcagcaaagcggagggtgtgcgcgtgtctggtggaggcgggtaaagaaatggggtgtctttaaagcaatagcttagca

SEQ ID NO: 31915 - DNA, 2300 bp, Homo sapien
aaaccttctgatggttaaatttgctgaaaacatgttctttctatgtataacttgacttttcagaagaagctttggatttaaagaaggttacattttaacatagttatcgcaataatcttttttatcatttataactttgttcatctttagatctttccttttatcacagtcataaagatattctcctatatagtttaaagttttgaaagttttgttttttgtattaaagttacgtatctacctgtaatatattttcatgtatgtaatgatgtaaagatctacttttttcccttatggataataaattgtcttgcaacatttattgagtagctcatcttttcctacttctcttaaaatagaggagtatttctgtgctctctatttgctcgtactattttgctttttatccctacatgaattccatgccaaagacaaactgattcagtttctatatagcacaataatgtcttgatatctcaaaggcaaatgcccccatattccttctctttttttcttcttcttcttccaggttttcttggcttttatttaccccctcattcttctatttgaattttggaattagtttattcatttccatttagaatgtaggaattttgattcaaattggttatatttcttacattggatagaattgacatccttacaatgttgagtcttcccaattacccatatggtacattttccatttatctaggtcatattttgtgtatttaaataatgttatgtaccttcactctaaacttcttgtgcatatttttcccccagttattcctaggtacattagaattttttgttattattgtaatggaataaatttttctattacgtttttttgtttggtaactcctgtgtagggaaatactaagaatatgcataagtttcttgaccttgagacacttccatcctagttagaagctaatttttaagctgtctcctctttccctcataaaagtaagcagcagactataataggagtagggattacaattcgctttacttacacttgtgtgtgtccctctcccattagatgtgaatttctctaggacaagaaccctttttgaatcagttataagtcccagaatgcccacaacaaaatttaatatatactatttaacaaaagaacaaacacctagtccagggccttctgcctaacatgtgctcaatgacatttgtagaatcgaagttactgaatttgatttaattcaaacaatacttgctcctgcagaatcccaacctactggcgaacagaggttaaactgtctggatgtttcagagttctgctaggggtcacaaataccaccttaaatgctgtcaatttaagaaggagatttttcttatcacaacctggaggataagtggggcttgcagtggatggccctagaaaaaaagattgcctgcccagaactgctgctggatcctttgtttccctcatttcccaacctggatgaaaaacgacaaggggagggaagaaaagtggggtggaagaaaagttggcttgcccctcctactctgcctcctacagaagtctacaccaagccagatgtcctaggatgcctcccaagggcacctaatttttggagttctcaaatacgtcctgagtttcctctgtacctttagtaactctcccgttccctctctctccactcttccctgctcccagtcacccccacccacaacccccgctgatcacatcctcccggtgcccgccacaggcaaccagagaacaacagaccctcctccagagtccccgttctaggacctccctgactgtcaacgaaagatgccaatcacaggcagccttagccagatcactgagcgcccagtaaaaaaaacaaaatcaggttgagggcagaaatgaaatcaacatagcaacctccaatgcatgaaggaaactccgtttacacatgctcgtaggatcccctgcgtggaaacagcagcttgtctctgactacccggaggacatggagcaccccaaataggaactttagagggattgaaatctgttgcctgttccactaggaatattgtttgcaaggcacaaggtgtcttttggtagtgagcgcgctctgcgcatgcgcaggtccattcgggaattactgcccagcagccgactaagttgcattccttgaatcttcgcagaaaagacaattcttttaatcagagttagtaatgtggacagtacaaaatcgagagagtctggggcttctctctttccctgtgatgattaccatggtctgttgtgcacacaggtgagctgctgttgttgaatctcgctctct

SEQ ID NO: 31916 - DNA, 2300 bp, Homo sapien
agtgaacataaaggtaaatttgttaatggaatgtagactattacataaacttccttgtaaattctgtacatagttcattgaccctgttgtgtggtggtcctcagctttgggtggatgttcaaaaaatctgagcattgtaaataatgtaagcttataaggtatttgcttttcttcatgaagtgaaatgactagtgatttgggcccaaaccagaatctttttagctcttgctctttctctgccattttgtgtgtgcagttgtgtaactctgctgcaagccatagccaggtgtctgtgatcactgcctcatccccctaccccactgaaaggaacagcagctgatgagaaggcggcaagcctgtggggctcaggaacagcgcaccagcagaaacggaaactgtagcaagctgctccttgaactgcgtcataaagagatttgtctttatcagtcattcgtggctattcatatattcagatactgaattatccatgccgttgagggggtcaggaatggaaaagatattcaaaatccacaggcaatccaaagctttatttgcaccaacagctttagcttctaacttgttctcttccagtttcccggaacttctattaagaatagaagtgaatggatgggtttgatcagggtaaagagtcaaatgtccaaatgatgggaaggaacaaaggaaggacagtaaatgattggtaacaccaacaggctgattcattcctgaaagatccagaggtaaccatgtcattattttttaaaggcaaagagaaatattgttatacactgggacttgaaactagtatttttggccagacatggtaattcatgcctgtatttccagtactttggaaggccaaggtgggagaatcacttgaggccaggagtttgagaccagcctggacaacatagcaaagcctgtctctgttaaaaaaaaaaaaaaaaaaaaaaatagctgggcgtgttggcatgcacctgtaatcctagctacttgggaggctgaggtgggaggatcacttgagcccaggagttcaagtgagctatgatcgtgccactgcactctaacctgggcaacagaatgagactctgtctctttaaaaaaaaaaaaaaagagagagagagagagagaaagaaaaaaaacacacaagtatttgggatatgtgtgatatgtgctaattaagcttaaaagagtctggtaattaaatgttctcaaatacatttctcccaagtattggtattcctgaaaaagtcttcagaatggtggaatattatgccacaagatgtgtttccatgcaaactggcagtcccagggagagcaatggtgtctatagaaattcagaatatctaaaccagcttgtttcttagtaatgttttagaatggacaacatctttcttggaggtaagaactttgcaagataggactttttatgccaacattttaagtgccaggagagttcagtaagccatgactttgagatatattggttctaaaatttgccaactagggtccaccatcaattgagaaagaaaaatgttttgtttgaactgatcaggtcagtcagttactagttccagaacacactgtgcttttactgtaaccacgctttctttttttaagataactgaaatcaactaaatagaaaacataatttttggagactgcaatttaaaagcatttgaaaggaaatcatttttaatagaggaattgcaaaccagagaataataagctcctggaaggataagggtaaagagttttgtgtttgttattacttctcctatagcaagaaattcttattcaaattgaaacggtctaacagttgtttgtttgggtgttttgtttggttagttggttttgttttgtttttttctaattaaaaagtccttgttacatcaagggactcataaccattccctattggcccctggatactttgcatatcctgaaacaaccagcactgatcagaaagcattcagtccagtcagaattcaaggtgggaaaagtaggtgtatttctgaaccatttgggaaggaaaatcatttttctgaacaacactacctgcatttctgtttctgcagacaatcaaaaaacaaaccaataaaaataagtaagtgaaagaaaggccaaatagcattattcatttgccttaggtttacagggtcacagattcattagcttaattacaacctcatttggatgccaaagaatgagcaagagcaatcagtattgctacctggctcttgcttcttcttcctgggtttgttttgtttttcagagaaacagggaagggaggacatttt

SEQ ID NO: 31917 - DNA, 2300 bp, Homo sapien
aattttctatgtgccaggccagacttcattgcaagaacttcacatatatcaacttacaaccaccctgtaaatcctaggctgtcattataaccaattatacaatttacagggttgttgtaaggaatgagaaacacagagaagtgaaaatagcttgcccagagtacatagtcatttgcagagccagggtttgaacttatgaagtttagctccagagttcatgcatttaaagattgctatagtacaaataagatttgggagatggagaccagaatatacctcatagagatggaactacaagagacagacatatgttttgaaaacctcttggattacacacataagaacatcctcttactaatcaaagggcaaatattaagcgctgtctctcttgcaagttgttaactattttggaaaccatatttgttgcaggctaaattttgtcccatccaaattcaagagtaaagatcaaattcttcttagtactcagtgttgcttgaaagatgagttaggacctaattctctgtcctctgactaaaccttgggccctgttaggtgtgtcattttaccttatttagtcatgttacgtggccttaggtaagccatatcatttcagttcctcagcaggggtagtcaagcatgcaaactgagatcaccgtttctggcctcagaccagtgattttgtaactactatctatgtgaccttacaaaatatattacttcaagttcatttcctcatctgtaatacccactgtacaaggctgtagcaggaattagtaagataaaaatatatgaagggtttgacatatagtagatgcttgaaagtacttttctcccaattattataatacataaaatttaagtttttttctcaaaatagaccttacccatcattagatttacagaaagactcaggtgaagtagttttccagacttctcattttaactattactaggggagctcctattcacaaagtatcttaagacaattacatttaagatagggcaatgagtgttgtgcatctatctgcattaagaactagaaagtggtaaataagtgagggacagctaaaatatcatgaaaactcacgggagaaagaaattgacttcaccttttagagttgaggcacacagagaaaggacgtaggaggtaaacctagaatgctgctaatgagtagtttttctctgcgtagcccatagattgaatactttctcttctgcttcaccattttgcaccacttttattattaaatttataaattagattgtaattcctgtttctggtctactagttattattatccgcttttgcaggacatgctcattttaccaccactgaattcttcagcacctgattaaagtaacagctgtaataagaaataacagaaaggatatttggactttgagcttagtccaacattaatagcatggctcttgagtctgattgattttgtttaacttcagactgggcctcttacttaggtcagtgatttttagcgttgccagataaaatacaggacaccagttaaatttgaatttcagatggacaaataattttcagtataaatatatcccatacaatatttaggggatacttacaacaaaatattattgtttatctgaaatttcacatttaactggacgcttggtattttcatttgctaaatctgacaaccttagtgacttctctaatcatgtttgctttctgcaaatagggctgaaaatagtaccttctccctaggatgatctatatacagaacgttgctcatggcaaaaccttaatttaccttgcaaatcaggatactttagtagagacttctgttaaaactctgggacaatgaccatgcccaggcacccaaaaagatggttacctttattcgacggttttctaaagagcacagagaaagttcaatagaaccctaaacaaaggtacaaactgcgttgaaagatacgtaaatgtgcctttaatagcacaagggtatcttagccacatcactgcaaactgcagtctccctggttacggggaaagcggtagttcggtctctgcgcaagcgcacagggacttcttgggtccacgcccctccccgccggcgagagtcacgtgggcgagtcgtagctttagacaagcggccagccttgacacgtgacccaagccccagcttcgcgcagggatggagccggaagaggggacgcccttgtggcggctgcagaagctgccggccgagctgggcccgcaggtgagggcgggtaccgggggaagcggcgcggggcctgggattcgcgacagcccggcgtgcggatca

SEQ ID NO: 31918 - DNA, 2300 bp, Homo sapien
tgaaatattggttttttaaaaaacttcctgagaagtgcaaaaaagaaaacctttctgaaattacaagaaagtaagtatcttttaaattaaaaattactatatagatttaaagtagctaatgtcttaaattaagaatcgtattttgtctttttcaaaataggaatcactctgaggagaaaattggatattacagaagcattgcaaaaagaaaacaccaaacacaacaaaacctaataaattgatagaaacccaccttaatagtggttattccaatgaccttcatggtatttatgagtattgatttttaaaaatttgattagaaatatttaaattatcaaaatgatacaaatttcattcaaatgacagacacaaatagaaagctagtaatctcccctcactatccttccctgagtaaacaattttgaggtgtatcttcacgtttttatatttatattaaaataaaccaatatataaagaatatgtataaggctaagttgtattacataatgttttccattattctactactatgctctttagacttaaatataatagattttcttctaagacaataattcaaatcttagtcagtgattctcaacccttgtgcacattagaatttctagaggagcttgaaaaaaagacattgccatagcgccacccccagagattctggtttaattggcctgggtggggccttggcatcaagctccccggttcactctgatgtgtagctagttagaaccactgatttaagcaatccaaacaggctacatgcctgaattgtcctggtatgtacgttcccaggaaggccctctgctgaggtaacaacaccagtgtttgattgggagagctcaggggggcccagctacagttttaagtctcctctataaggttgactctcagataggaaatgtgtttcatcttaaaggatgttagagacagtcatatgactgcaaaaagtgctactagggccaggaatttcagaggccatgtaaatgacagtgtattctactaggctgggttaattctggggattaagtttgactaagttctagagatttgtccttacctgcagatggaggcttccctaatggagcatcataggaagccacacccagaacttgtttctcctcgtctggcagaagcacgttctcagtgggtgcagaaacttgtttggcttctcttggtctgagagaattttcaagccgaccaaccagctccctgtgtctgtactggtgagctctttactaatagtcaaacatttgcatgctcatttagttttcttcactcttgttgcacatctgagaaacacttgagagaatggaagagagaggcacaatataggagagctgtggagagtttggccccactttttatatttgtttcaatgggataaaacaggcagccaagattattaggttttgttctgagttattggttcggccttcactaaatggcttttcctctttccaaattagacattttgagaaaccagacaggttgttgaaacttatttagaagttttaaaaaaagttgtgaattttaagcaaacggaccttggcaggtgtatggacaaagccacattatcctgagtaagggaacggaagggcaaggtgtgaggaaaacgaccaaatcagaattgtaatatttttcctcatttcttttctagtcataaaaacagtaacattacatattatttatttattttgtggtagggtctcactctgtcgcccaggctggaatgcagtggcgcgacatttttagatttgatctcttttaccctccaaaaaataattgtccagtgttccacgtttagctaaaacagtgaattgttagaattgcagcaaaacaatgaaccaaaccgtcaaccgcgagcaacctgtacttgggaggtgaaagtcagaggtgagattgtaagggctctgggtcactggggcatctgcgctgggcagaagggcagctcggtcaaacagctggagctgggagccggtcagttgccaggccctgccgctgctacgtcacggagggcggggcggtgggcgattggcggtgcactgcagctcgggctgctctgcagcctggcggagacgggaggaggagcggagggagaagtaggttgcgagctcagcacaggctccggcgctggctcccgcagctgagtttgggagatgtctaagtgattttttttttttcccggaaggcaaatggctggcgtggaagcacaacccgctttcactcttcgaatttgtgcttagctcttttcttgtaccttgcgactcgtgaccaacatgctgtga

SEQ ID NO: 31919 - DNA, 2300 bp, Homo sapien
atacacagatacatacatacacacacaaaatattgcatacaatttcaaaggcttcacagatcctctgaagccacagaccccagactgaaatgcctaatagaggtttgattaagcgcctgtagggccatgactttctttcccataaatcatgaggcccacgatgtctccttgtcccattgtaagattagtgttatcagccttatcctattattataaagttcccatcagcctttttaaccattgattttagcagccatcgcttatcattgcctagaatgattcttgatttcatccaagtcgaaaatgataatttttaaattctatcaggatttcttccctcatcaattactaagttatcctaaatacagtttatactagaaaagcaggattcttgcttggaatatttttttatagtaatagaagttgtcaaacaatgactaccattgaaaataatgatagttggaaacttgttgcatcttttcctagacaaagtagtaactgattcacaatagcaaagacacagaatcaacccaaatccccatcagcggtagaatggataaagaaaatgtgacttatgtacacaccatggaatactatgcagccataaaaaggaatgagatcatgtcctttgtagcaatgtggatggagctgaaggccattatcctaaatgaactaatgctggaaaagaaaaccaaatatgacatgttctcacttataagtgggagctaaacatttagtacatatagacacaaagataagaataatagacaccagggcctaattgaaggtggatggtaagaggagcatgaggttcaaaaaaccacctcttaagcatgatgcttatcacctgggtaaagaaatctgtacaccaaagccctgcaacacacaatttacctacatagtaaacctgcacgtgtaccacctgaacctaaaagtctaaaaaaaaaaaaagaaacaaaaaacaaagcaagtaactgcaataaccaaagtaaatgggccagagatttgaaaactttcttgtgaaatgcctttttactccaagtcaaaaacattcaagggccatgagatttatttttatatccccacttttgctgtttaaaagtgaatttatatgctgtctttcttatagagaacattccaacaaagaacgcgtgggtctcagtaaagaaaatttgttgcttagaggatgcaccattagaaacacagaggctgttgtgggcattgtggtttatgcaggtcggttatgtttctaattttcattgtctactctgtgcttttctacaagttaacatttttcatttactcaaaaatgcaatctgttgaagcagaaaggaaattttgcctgataaacttaattattggtctctgtttttctaaatggatcacaaaagcagattgaactgacaaaatagatcatgtaactgtgttttattaaattgtctgcaagagagatttttaaatatggtattcgcttcttggctttaatttgtacattttctatcatactgcacatccttcataggccatgaaaccaaagcaatgctgaacaacagtgggccacggtataagcgcagcaaattagaaagaagagcaaacacagatgtcctctggtgtgtcatgcttctggtcataatgtgcttaactggcgcagtaggtaggtaaaatttgattatttgctgacatcttttcagcaagatattaaagtattttatttcaaaattatatctgtgaatatttgactttggtaaggtggattttgtcagtagtgttttacctcatatccttgtctctttcatcctttagcctgaaaaatattaatattgactctatccatttacgttttgccatagtactgaagaaacctggagagtgacttaaagaaagagagagagagagagagaatgtatagccttttgaatttgaattttgtttccaaaaacaaacagttgatgtccaaccaaaatgaatactctcattccttctcctttaggaataaaattttttgtttgcatgccatatatttagcatccttttgatgtctgtgtattttttgaaaggtcatggaatctggctgagcaggtatgaaaagatgcattttttcaatgttcccgagcctgatggacatatcatatcaccactgttggcaggattttatatgttttggaccatgatcattttgttacaggtaattttttatcaagcttatggtagaattttaacatctttgctgcttatccagctatgttcagtttcacatccttttttaacctacgttaacattttaaaacttgtttggatct

SEQ ID NO: 31920 - DNA, 2300 bp, Homo sapien
atatcaaagccttgacaccaaagaatgagtataactgaagagaattgtagtatgagattaagatctcagagactccagtgttaaactgaggacttggcatatcagctctctctttctatgtctgttttccctctggactgcttccagtctcaggtaaattttcccctcagggtggtgatgtagccactaaaactcctgggtttccatcctatcctattaacaacttgggtgaaaagatagcatcacttttcagattgctgcagtaaagtttcaggattaaggtggaattttgttcaattatcttgttgaataaacagataaataaatgaattattcaagcttatggatccagatgtttccaaagcaaaaactcctggatttataattatagataacataattataacataattatattataatttattacattataattatatttatcatatacattatatataatacttataatttatatcatgcattatgtaatatataacaattatattataacttataataatattaattaattggagtcatatgtccatttctgaaccaattactgaggccagggaatagaagatgctgattgtacagatctgggacacttgcttacctataaatatggaggtttgggttcaccctaacaaaccacataaactaagaatttccaaggaaaaccagtatacctttactgaaaaacaggtgaattgttggtgatcagttgttcattaccagcaggaatgtggtacctcctcctaagaagcttcctgtgttgggggagaccagtaagtctgtatgcaaccatgatactgtgtgataggtgtgctagagatacatagggtggtgctgaagccttatgaaagggcatctgatctttaaaaaaagtatgagaaggatttcccagaggaaatgacatctaagctgagagcaagaaaaattgaaatccagaaaaatgagctgggggtgatcaggacagtgttgttatcatgtgcgtggctacagggagaagggtgtatctggagagttgaaagtagcatgaatgacatgaaaaacaagatcagtctgggtaggtgccatagcgtgaaggagtttaaagcggtgttgagtttggaattcttcctgatggcagtgggatgccacttcatttctgtttcacttacttccaggaaacttggagaacgggatgaactttgaaggatttatttgttcacttgagctgcccctattgatttgcaacatttacaccctttctttactcctcatatgtttctctcctttttttctgcctcatgaaggtgatggtgccaatgatgttagcatgatacaagtggcagacattgggataggggtctcaggtcaagaaggcatgcaggtgagtggatattgtgcacccaagttctgtggccttgacctgcccatccaaaggcagcattctccatggtaaattctctgtggcagagtgaggctgtgtgtggctagctgaggagtgggagacaggaagtttacctatctattcattgatttttttttactaggtgagtattatggcattttcctgggtaattttagctgtattattcacttgttaaaaatagagcttatctaaaatcacaggaatatatattttagtcctgcaatggctgcgtaaattctgactctgaagaagctactaaggatttgaatgaaggacctaaagatcttgaggcaggagaccgagggaaaaaaagggaaagaagaggaaatgagaggagaaggaaggaagtgggagtgtcctatttgtgcgcacgtgtgtgtgtgtgtgtgtgtgtgtgtgtgtgtgtgttggatggtattttaggcacaaaattcagataaaagctcataatccaaaaaactgattttcattcatgtatggaacaaatgcggtcagaagaaggtagaatatgaggcctagggtttcccaagaattgtgctgtgtctgttctaacatgtttgatcactcaggatggcattctctccccattgcatctgcaggctgtgatggccagtgactttgccgtttctcagttcaaacatctcagcaagctccttcttgtccatggacactggtgttatacacggctttccaacatgattctctattttttctataagaatgtggtatgtaaccccagagaatttgtcccttttcccttcgtaccttccaagactgttgcatcagggatgaagacgaagtgtcctatgctaagctcactttccttattgatgtattgggaacagccaggactggtcttgctgtctttccagaacta

SEQ ID NO: 31921 - DNA, 2300 bp, Homo sapien
aaggtttgtgtgtgttttcttttaaattatctaactagttggatgtatgcttgaagtgctagacaataaaagtttcaataggctagaaatgtttctttttgtaaaattattttaagaaactagatgatggttgtcacttgaagctgaaatgcaaatgtagctagttttttttaaagaataattcaaataggtcattaaagattactatgagcacactgcatattcaaatcagtttgaatatgttttgagacttctaatagtttatgattcttgacattttaatgagcacactgcatattcaaatcagtttgaatatgttttgagacttctaatagtttatgattcttgacattttaaaagtttattataaagaatataaaacatctttaccctcattttttatgtcattaccttcatgcaaagaatacctcaggtattaattctggtgctgttggtaactagaactggttgggttttcttgctaaaaggaagtttaaaaaatgtttattttacaccattaatgcaattagctttagttctcagaggaactaaaagtggaaaagtgagggagactgatcgaccctatctcaaatccactgacgtagctactttaatttcatagtccctgtagcacctccaccagagggcagaaagtggaagagaaagaagatgaaatagaaacttgtacttggcctcagaatgcctgtagaaaccttagcaattgaatccagcccttatgttataggctgagttaactgtggcccagaaagactatgtgatttgctcacagttcttgattcccagactggcactgcggtgatggtgtgtgatgaggtagtatcttagtaagaacacaatccagaagtcactgcctcgggggaatcccagctcagcttcttgctagcttgcgtaggctggttacttcacttcagctccctgaatctgctttcttatctctaaaataaaaataatagcttcttcctcagagtagttggtggaactgaaagaatacatgtaaagtgcttagtatgacacctgccacataatatgaactgaattattgtgaattatgataaatttgtcagatactggtttacaaatcggatgttagaataacatggaatcagtgtttcagtcattttactatacatatgcaatattttctacatttgatctcacttcagaaacaaaatactgccccccccattttacaaatgcatatttttttctcagcaataatgttcaagaacaagtgcttggcccatattttgttgtctttacatggctttctttaaataatggggatggatttattaaataacctcatgagtaattttcaaaatttccattaagatcttgattgaaattggatgaaaaatcatttctaagaaaaacccaatgaagtgtttttctttgccacatttgacaattgccttggacttggtaaagtaatcattactgtgttgagtacctccagtgccctccttgacgctgccttagaaaaggtagctgcttttgaatgacaggcaggaatttgttcgccttttaggttcagcctgtaggtgccctctgcaggaaatcaggaactagggttttggaagcagtcagggtggggttctcccttgtccctgcagcctcagcaaagactcaggcagtctggcaaaagcagtttcttcagcatacctaacagaacgcaagtttccatatgcctgatgcaaataatggcctccaaacgttaaaccttttttgagataaacttgttctttaattgccagcgcctgcagttaattttgattggctacactctggttaaaagaaaatgctttcgatgtgatatggcaaatttggagaaaagtaactcttttgctcccaaccagtcttccacaacttaaacttaatcgtcctgtccttttctgctgccctcgtggagtgtaagtttttgagggagaccagcagaaactgactttccatatgcccctgaagaataacttctttgaatgcaaagaggtggggacacggaggatctgtcattacgggttattatgggtgggacccagagacgggagtgaagggagggtgtggcccgcgggtgggatctgtagagcagacaaaatatggggcccctggcgcttaaagttcagtttgtctctcttgagcttggagaaaatcatccgtagtgcctccccgggggacacgtagaggagagaaaagcgaccaagataaaagtggacagaagaataagcgagactttttatccatgaaacagtctcctgccctcgctccggaagagcgctgccgca

SEQ ID NO: 31922 - DNA, 2300 bp, Homo sapien
gattcagtgattttttttgtttctgccatagctggaaggagctcatattctaagtatactctttgttttgcagatagggaaactgaagctctgtgatttgtccatgattctgcaacaggagagtagcaaatcagaaagtactgtgcctgatcttttaactcccagcccaatgtgctcttctactcatgttatttaaatagaagatttttgtaggtgtaccacataggaagagcaaatgaaataaactctttaggtgaactttggttctttttgcatattttgttactcactgcctaatatttgctcagtctttcccatctcagaaagtcattttaccgtttttacccagttgtgcagatcaaagacataggaatcatgcttgatttctttcttgtctttgttgtccttttcccacagaaaatcctgttaggtttgtcatcaatagatcctgaatctgacagtttctcataacctgtaccactaccaccctcatctaagccaccattacctttgacttagatttctgcagtaatttcctaaccaacatttctactcactttgttttactgcatcagccagattaatcttctaaaaaatttaaatcaagtatcatctttctgctccatatcctttggtagttttcagtcactctcagaccaaaatttaaatccttttcaatggcctgtaaaggctcagtaatgatctaactcctgactatctttcccaactttcatctgacttctcatcactctcttgcttactcacttctgcctctgttcatcctgttacttgaacattccacatttgttttttcttagaccctttgtacttgttcctttcctctggagctctcctttctggttgttctctccttcatttaactcaatttctattcacatgtgatctttatcagtcaggcttccttcttgttgctgccatcactctttcttatcctgctttatctttcttcagagtagttacgaagacattatattcatgttctttacctcctcacataaatgtaagttccaggagcctatctcatgtcttcccagtgccaagaacaatgcctggcacatgtttttaaaaaataatttataaaataatatttttataatttgaagcactgtttctttttaatcctatatgtcaaaaaatagcttagaattttataataactgttgtaatcatggcttctctttggaatgataataaaaatgtttgacctttaagatttagtatccatgtctatagctctcttattttacctcaagtatgacgtgagaaaacaatatcctgaaataagtatttttaaccttctttagtagattataatgctagttaacattattaaatcactagagaaaagggaggtgccttgttaagttacgttgaggtacatttatttgtaaaatgtaatttaactttaattcattgatgtgcattaaaatataaactactggtcattcttttttcattgtatatgtgtttctctttggcaagatgagataattacctccagactgtttagtgctttggaatttttatttatgtgttaacagtgtattgatttctttagttcagtgttgattatcgtatagaaatgaatgaacattcttactctgtatattttatttctgtctttgacgattctttaggaagtaatttacatttttagtgggatactttatatagtccattttaaggttcctttaaaaatgaggcagtttgacttaatgaggctcataggcaaaaaaatctatatgaataatagtcatattgacaatcttgctgttctttagtttgaatatttttaagataaatgagagcatgtaccgtttgattaactctgtttctaagaactgcagaagtactttattttaatgggatatataaattttataactgtaacatatggaaatgttaggcttaccttgtacttaggtgatttatttccatgctgtttttcaggctggcccagaatgccttcattgtgaggaagggtgctccaagtcacggccactaggttgtcttcacccatgtattttgcgatgtcaccctggagaatgtccaccttgtgttcagatgcttagaataaaatgtcactgtaagatcacaagcctgtatgtggaatgtaggtaagtagactgaaaaaaaagtcttattttattacaattagttgaattggtatctttttataattaagaaccctttatagtgtactttgcttaaactctagatgcctagattttccagtagagacctggaaggaagacatgtagaatactacactttctggg

SEQ ID NO: 31923 - DNA, 2300 bp, Homo sapien
ggcgcaatctcggctcactgcaagctctgcctcctgggttcaggccgttctccggcctcagcctcccgagtagctgggactacaggcgcctgccaccacgcctggctaatgttttgttttttgttctttggttttttttttttagtagagacggggtttcaccgtgttagccaggatggtctccatctcgtgggtagaaggaaaacaagcattctgtccgggcgcggtggctcaagcctgtaatcccagcactttgggaggccgaggcgggcagatcatgaggtcaggagatggagaccatcctggctaacagggtgaaaccccgtctctactaaaaatacaaaaaattagccgggcggggtggcaggcgcctgtagtcccagctactcgggaggctgaggaaggagaatggcgtgagcccgggaggcggagcttgcagtagccgagattgccccactgcactccagcctgggcgacagagcaagactccgtctcaaaaaaaaaaaaaaaagaaagaaaagaaaaagaaaacaagcattctctacctggacagttgagatttggctgtaagaaataatacgtgagaaggttgtcttgtcagcttctctttactttgagatgatgttaggtgaatacatttatcaggttatgaatgttctcattatctctgtccagttcagcctgttttcttatgtatcttttaagtgctaatttcccgtatattaatgacatttatcatctcttttgtgacaagttttgagttatatatctcatagccagttcttttttcccagtactcaaagcttgctaggtaagcatgatacacattttcgtcgaggtttacttgaaatactcaatttgttttgttaataacccctaaccaaactggctgcaataagaaaaggaaaatgtttcatgagggaacataatcaagtacgaatataccacccaagataagagagcttatcttggtagtggcttatcagttttaagtataatgttaattttaaaatagtcaatcagtaaatttaaaatcctctcaagatgggaattcatgaactcagatcagttctgcaggtttgtggctcctttcttaaactatgtttgctgtccgtaagagcttattaacacttagtgcttgaagaaaatccctgtggtccttgctctcaagaagtttgaagtttctttgggagtatgtgcagtgaagtaatctggttttgttttgcatgattaatcaagtaacaaaatgagaagtacaggtagtgctgaatagtggaagaacgaatccaaaattaacattctttttggaatgaagttggaagaaacatgttttccatgttaatactttgtgtggattaatgtaaaatatgtttttttgtgtgaccacaagaagtccataataaaggcaaaaagttcttgacctaagaagccgattgtaaatatagtgggtgcatagtgagtactgttggtacaaactctttggtagggctggactggactgggctgggccgtcgtgtcctatcctacctgttgttcagaagacggtagtttgaaatacctaccttccctgattctttatgtgctcactgtggacatgttccctcacttcttaaaaattactgtgcacaatgtactttaaaacatcttaatttttgttagtccttattttgaagttgatcaccagtattttgatagttttattgtattttcatattttttttcttgatttgttaatcaccgttatcataaaaatttgctgcattttagcaggatacttagaaaagtgaaagtttttgttgtggtattctctttagttgtgtgtcaaggaatttgaaaatacttttctcgtggattacaggaaggtagaatgctccaaaggtgactttcaaatgtgtgttgtaaaatgatatattagcacattatgcttttctttttgagagattgttttgcagaaatgaaacttttttcttttaaacagagctaatgtctcagaaaaaatttgaagaaatcaagaaagctaaccaagctgcagccagaaaacttgttgaagaacagtttagctcttcatctgaagaaggagatgaagattttgaaggaaaacagggaaaaatacttgcaaatacgtttataacatacactactcagacaggtactgatcttttaaattttgacttttgacgtcaatgaaactgtattcctgacatttttttggtaatgcctttgttctatatggaatagattttatatcttaagatgagcactgtatgttatagagttgaatttttgtacactttggtatt

SEQ ID NO: 31924 - DNA, 2300 bp, Homo sapien
aagtaaacctcgacgaaaatgtgtatcatgcttacctagcaagctttgagtactgggaaaaaagaactggctatgagatatataactcaaaacttgtcacaaaagagatgataaatgtcattaatatacgggaaattagcacttaaaagatacataagaaaacaggctgaactggacagagataatgagaacattcataacctgataaatgtattcacctaacatcatctcaaagtaaagagaagctgacaagacaaccttctcacgtattatttcttacagccaaatctcaactgtccaggtagagaatgcttgttttctttttcttttctttcttttttttttttttttgagacggagtcttgctctgtcgcccaggctggagtgcagtggggcaatctcggctactgcaagctccgcctcccgggctcacgccattctccttcctcagcctcccgagtagctgggactacaggcgcctgccaccccgcccggctaattttttgtatttttagtagagacggggtttcaccctgttagccaggatggtctccatctcctgacctcatgatctgcccgcctcggcctcccaaagtgctgggattacaggcttgagccaccgcgcccggacagaatgcttgttttccttctacccacgagatggagaccatcctggctaacacggtgaaaccccgtctctactaaaaaaaaaaaaccaaagaacaaaaaacaaaacattagccaggcgtggtggcaggcgcctgtagtcccagctactcgggaggctgaggccggagaacggcctgaacccaggaggcagagcttgcagtgagccgagattgcgccactgcactccagcctgggcgaccagcgagactctgtctcaaaaaaaaaaaaaaaaaaaaaaagtttaccaaacctgttcacacgtctccatattgtataccttatcatcacggccattaactgcatgctaagagaataccacctacctttcaaattagcctaggagaaaaatcattcaagatactcaattctgctccacaccccccaaaaaaatgtatcctgaaatgcattccaaacacaaaaataaaatgatttcagggattattccctcggccccatgcacaattgtgtgtaagtcctccctggctccacgaaaacatggtcttggatgaaaagtattgatatatcggaggcaacaccagatatgtccacagaaggacatggaatttgtaaataggaactacagtcaaggaaggtatcaaaagctcaagtgcttacaaggaataagacaagtcaagaaacaaaggcaaaggtaaagatgacaaatgacacctggctccagaaatgagagagaatgtgagatggaatgcccaagtccaatctaaatgggatttctgtgactcagccgagctgactgttgccatgcacaaagataactaaagccacaaggttgttaaccagatttttaaaaacgacaaacaaccgctgacaatcaatccacatttaaaactctgtgttaaccaaacaacattatagaccaaatcagaacaccgggccacaatttacaactgatggtctggagattcaagtaggcaagagtggagggaagtaacaaaggtaataccacctaaaattaagatgaaagaggtgcgatggaaatctacctagagtgccgaaaagagcagccacccgaaaggctggagaagtgggcccgataacaaactcccgaacgaggggaaaagcagtgaaagaaagaaggcgagggcggaggcggtcctgactagtaactgccttaggaggcatccaggtgagcacgcgggcgggagccattctcaccgctggctgcggtagtctgcagggcttgggatcctgcggggctgtgcctgctccctgcagccgccgtggtcgcgactcctccgggactggtgccagaaggaactgcgcccaccgaccccttctctcgccctcctccggcgccgcggagatggactccatttcctgagggggcggcagtggcccgtccccgggatcggcctcggccaccggccacctggcgccaggaagcttccatccctgcaaaggagaaaaaaaaaaaaaagagtggaaggaggtgagcgcagcgaggaccgaggcgaaggagggtcagtgcggaaacccggtgtgaggggccgagtgaggaaggttcctgcagggcggcgaccgggttttaggaggtcgcggccctgcctttaccggagggcgagtccccgccaagcccgggctttggagatggaccgaagaggggagggaggact

SEQ ID NO: 31925 - DNA, 2300 bp, Homo sapien
cagctcctttcctgtatgtgaaaaccccactgaagaaaagtctcactttagggttttcaaactttgaaagctggttgcagctttaaacttacagttcttatacaagtgcagcattaagagagttgctgtgcacctgttagtttctagccaatgaagttatatcattctcagagatgttatttcttttcttcttttcatttttctgagacggagttttgctcttttgcccaggctggagtgaagtggcgcgatcttggctcattacaacctccgccccctgggttcaaacaattctcctgcctcagcctccctagtagctgtgattataggcacccaccaccatgcccagctaatttttgtatgtttaatagagacagggtttcgccatgttggccaggcttgcctcaaactcctgacctaaggtgatccacccgccttggcatcccaaagtactaggattacaggcgtgagccaccatgcctggccatgggatgtcatttttgagtttggttaatgtacaggcaattctgcaatatctatgtttaagacattaaaagcatggtttctaatactagactacttaggattgaatcttggcttcactacttcctagctgtatgatcaagggcaaattgcttaatctctctgtgcctcagtgttctcagttgtaaaacggggataataaacacggttactgtgagtaccaaattagttaatacataacgtaaaacactttaaacagtgcctgacatctaataaatgctatctaaatattataatagaaatttatggttaaaatagaagaattaactaagttgaaggactgtacaataagccatcaatatgtttctcaatcccagacagaccccagaatgaatttttgcaatctacctgtcagtatatatgcacatgtatcttattggaaaactcagcaaaatcataagatttaggtcctggccctcaactattttccttaacaaaatctactttagggagatgctgtgaaggtaaaaattagcatgtcccagggaaagctcattgcacactacaaaggactatgacaataacaggctttagatttattttctacattggctctagcattttagaagggtacttttactactcaagccactttcctgcaactctcccccgaatttccctccttcacagtggccaacctcaaagcgttttcaatgtaagtgcctttcctgttagtgagacttccctatgaaaataaatagtttaaaggttgttggagcctaaaactcactaagcctggagagagatgtgactgtcatctgagttacacgtggttacaacttctgtttctcagattatagattaacttgctttcttatttttcttgttctatacaatggctagagagaattaaacgaagttaaggacaaaaacttcctgccttcttaatgatccttatagattaacttctgctttgttgccccggtttgcttagaccagatgacagaaaatcctttatgaaaaatgttaaatgtacacttcccaaaaagaaacactgtctataatcaaattgttgtaactattctctaaccttgtatgagaaaatgctgtaatcctgctaaaaaacctctcagtttctgcctatataagtgaaatcttaaatctctacttcggaacgctgactccttccttggagtcggtgtttctaggtaggctatcctcaaacttcgcgcttttgattattttacattgacacctcctgtcatccgcaagctcaaaggcaaggctaataaaagatggcagagagccaattagggacagagccatgtaatcctcatacccaggtgagtttagggcagtcttgcagaagcagaagcaaattgtggggtcacgaaaccctccggacccgcccgcctccaccaccacgcgcccctatgaccttcgacccctccctagccccagagcacgccgggagttgtagttcccaaaggcctgttcgggccagcgcaggcgcttggggtttccctcccacccaacccccgcactttaccggataaggaagcggcccgtgctgccacgcagtcgccggaacgcgggcgggggcttctgggagttgtagtctgttgggggcgtgcgcagtcggtaaggagacgtagctttccgtggggtgtaccactgcagttggttcccggcgggagacgcagggtcagtctgtgactcttcccctaccacgctcccgcagaggctgaggaggcggtttcgacttctcctccggctttctgtcttcggcactgtgtgcttcttgctccgcggtttat

SEQ ID NO: 31926 - DNA, 2300 bp, Homo sapien
gggttcaagtgattctccgacctcagcctcctgagtagctgggattacaggcactgtaccaccacgcccagctagtttttgtatttttagtagagacagggtttcctcatgttggtcaggctggtctcaaactcctgactttgtgatctacccgcctcagcctcccaaagtgctgggattacaggcgtgagccacgacgccccgccaaggggcttattttcttaagcagattaggtagtctagagagaagcatgatataaaaggatggacacaataacattttagcataaagctaaattgtggcacaagagaccacatgtgttaatacacttttttagatccagtgatctaatttctaagtaaacactaatcacagaggtacataatgaagagtaagaatattcattttgaggctgggctcagtggctcacgcctgtaatcctagcactttgggaggcccaggtgggcggatcatttgaggccaggagtttgagaccagcctggccaacatggcgaaaccccatctctactaaaaatacaaaaatttctgggcttggtagcacacatctgtaatcccagctacttgggaggctgaggcaggagaattgcttgaacctgggagatggaggctgcagtgagccgcgatggcaccactgcactccagcctgggcgaaagagcgagactccatcttaaaaaaaagaatgttcattttgaaatgttttagaccagaggaaaaaatatccaataataggaaaatgaatcaatgaattatggtataatgaaatacaatagaagattatgtaatcttaaaaagaacgcattagatagatatttagcgatataaatattatcataatataatattacataaaatcagaataattttaatttaagaatataatggtaggtataaggaaaatgttaatattggttatgccaaaatagtaagactatgtttccattttcttttctttctttctgtaatatctttttatgaagcatgttttatattagaaatatgaatttaatttttacaattctggaactcagaagtcaatcttcctaaggtacacagtactcctctaattttctctgctaggcatcttgaggtgcctcctctcttgagagcctcctacgctactggagctgaaaccattcaactgaggcaataagtgttactcggttgttcattgttcagcaagaaaaatattgcaaatactggagaatgcatgatgtatttttggagctaatagatggaaataaaggcagttttgctaaatggaaacagtatttatttcatgtcattctgattttcagccataagcaaaagttttgtgagtatgtagcctgtcatatattgcataaaagagttcttagggaaatttacttttaggttattagagtaacactgagacactaactgaaatattgtgatgatttttatacatctaaagcatgaatttttctttcaggcaagctcagctttatcctattttatttcttgactaggtatctgtcaaatatgcaattcctccataaaatagacaattaaaagatcaatgactaatgaagtgcatcctactaatattttaaataacttttaatatcatggcactgtatttgaaaatgtaattatactttgtaaaaaacctagacgctattttcaagatgataaccctgggtgaagttggaggtataattttaataaaattcatcaggcaatagtacatgtggtttactttcaaatttgttgagagatgtagctttgagaacccctcttttatttctaactctcattcatattaataggctcagactcaagcaaaggataatgatgttgctgttattttcatccatgtgtaaatccgcaaatccaatgccgagtcatgaaaatcctactttgacaatgcgacgaactgtttatttccctgggaataattttgaaaactagccatttgtgtatctttgaggaaagggaaaaaatcagcatgtttattatttttaaaaaattagggcctggattttgacaatgtcaagatttaccgtatatccctgtttgtttggatacaccagtgacgtccacttctagaagacaaagttatattacttaaacaaccaaaggtaagaacccagtgataacgataattagagttatatttttcacaaatgcttatacttctgttttgactctttaaagtttcagcttttgctttgcttttcatgtgatgtgctctctagatacagctatgattgtatttttattaacttctctgtctttttgacagataagtgaatactc

SEQ ID NO: 31927 - DNA, 2300 bp, Homo sapien
tagtatctaccttacaggattttcatgaagatttataaagcaaatatttacaaagagattagaatagtgcttgccacatagtaaatgctatccaagtgtttgttaaataaaaaataagcaccatagatcacgtttaccatcattactaatttttgataaagacaaaattttaagttggaaatccaaagaaaacgtttaaatagaagtctaagttttgggccgggctaggtggctcacgcctgtaatcccagccctttgggaggccgaggtaggcggatcacgaggtcaggagattgagagcatgctggttaacacggtgaaaccccatctctactaaaaaaaaaaatacaaaaaattagccgggcgtggtggggggcgcctgtagtcccagctactcgggaggctgaggcaggagaatggcgtgaacccaggaggcggagcttgcagtgagccgagatcgcgccactgcactccagcctgggcgacagagcgagactccgtctcaaaaaaaaccaaaccaagccaaacaaacaaacaagcaaacaaaaagaagtctaagttttaaggcttgttatggaaaattggcataaatctccctcgctttcaactttcacctattccactctccgtggtgttccttctctgcaaagtcatccatatgtattataaaagtgggtgccttggactggtatgttgactaatttgttcttagctcttctctcatccgcctaagaacaagaaaaacaagattgaggcctctgctatgaaactcttaggtaataaaattaatagcactgttcatgcctacttagaacaaaggctacctgagtacatgagaatattttcctcagtgttaaaatgccagagcacaaaggcaccccagttctccctggtgagggtttgagcccgaattgttcactaccccacccctcacctttttttttcttgagacagggtctcactctgttgcctggactagagtgcagtggttcgatcatgtctcactgtagcctccacctcctgggctcaagtcatccgtcctcccacctcagcctcctgagtagctgagactacaggagtacaccaccacatctggctaatttttgtagagacagggtttcaccatgatgcccaggctagtctcgaacttgtggactcaagagagccactcgcctcaacctcccaaagtgctgtgattacaggggtgagccacccgccagccctgcccactccttgttttgtaaatacctgctatcaggtcttccaaccttggtttggttacttaacctcactctttgcctctaatccctcatctgtaaactgagcgttaatagactgctgtgagatttaattaatacataatgtgcctgcatatgtatggtataacaaggatatcataaacattagttattaataattcgtggaaataagtctttccagttttggcattgcttttcccttaaaggtttatttcaaatacccctatgacccagaaaatggggcagggtagggggagttgcctgctggagacagaacggagagtggatggatatagcgggcgtggacggacagcgacagaagctgataacagcacagaagggcaaagtctgctcagcagcccccaaaataaacttgagcctggcaatcggcgcagaaccccagcagtcagcagcttcggtgcaaagcaactaacacctgaaggcttccaaaagcagcagggctctctctagcgggggagccttttcgaccagagaggagccagaagggggcctcagtgcagcctccactccactcaattcccggagttaccttggcgggctccacgctccgagagacgctgttgctctatgaggcgtgtctgtgtttctctagttcgcggctccagcagtcgcgccaaggggcagctgctactcctgccagatacaccagttatcacaggccgctcccaggcctgcgggggccctgagaattcgcaacaagccccgggcagcagggctcggctggcgctgaggccccgcctggccatgcccattggcggaggctgccccgggggcggggtcagggcgccccattcccagaccccgcagccccgcccgccgcgggtgcgtgtggagaggcccaggtgaggagcaagcgcccgcgttccggaagcccgctcccggggccatgggggcacaggtgaggctgccgcccggagagccctgccgagaaggtttgtgtctgccctgagccgagggacctggcagctgggtggcgaagagaccgggtgggcggtccccggacacttgcggagactggaa

SEQ ID NO: 31928 - DNA, 2300 bp, Homo sapien
atgggactcttgttatttgaatgaacaagtgaaaaattgagtctttgtttactccatgtcaagctctgagtggtgtagttcatatgtaatcccacctgcacctactcttcagaactgtaaactggagggatgacccccaatttatagacaggaaaatgctcaaggaagctaagttacagctcagactgtctgatgccaaagcctaatctcttcccactactaataacgtgcattcagatttctaagtctttctcaccagcttttcacacaattaattaccatggttaatcacaggtattaagcctggagcttaaatgtttcttgttggaactcaatgcataagcaaagcaggaaaaacatccagaagctcaaacaagtgggtgtaattcatataccttccttacttacagatccttgggtaaacaagtgtgggtgtgttagtaactgtcagatttgctgggttagaaattatttagaaaaagggcacacaacctgactctctaggaaataattctagattcagctgccttaaaatttttgttttttaatagtttgtgagttgttcaggcgttattgctctttttcagaaaaaaagactagaaaataattctagatccagcggccttaaaaaattttttttaatagcttgtgaattgttcaggcatttttctcctttttttggtgtcccttctcttccttgctagcatggtttggacgagctcacttgttaaaaaggaataagctggaagagtcaagaggagaggaaactagggaagttgcgagcacctttgcaaaggtgtatatgtatatacatatatatatatatatatgtgtaagggaactatatatatatgtgtatatatatagtagttcttaccatgcctttcactgcctcccttcccctttactgcattatcaggtaaattaaaaagctgctttccccttggtacggcgaaaaccatcatttcaatgtatctacatccttccagtcgctccccctacccccttccctacttttatcggggccttctgtatggagactgcagaaaacccgccagtgttgcgaacacttggcgaagggcaaggagcctcgcccagagatttcacggggctcaggtgagaagcagtaagaagagcctgcaaacgagtgctcccggttccaggtttcctctccagtacggctctcgccttaagcagccagagtgactgcacagcgagtcagacaggctcatgggtttggagaccttttcatttccaaggaagaggagagacgtgggcggcccagacttgcccaacgcccacccccgcggccccgggcgcccaacctctcgcggtgctcgatccccgggagccagcgcagggcgcagcgcagaactcccacgggccccccaggcagacacgccctctgcccaccgggtgacgtcggccgcagactctggaagggagcctgagtcagaggaaacgtccttctcagagggactcgggattcttcccatagcatcctgagtttccccgtcccacacgcagcacgcggtaatttacactggtcggcctcgcgaatcgagtgggagtcccacctgccttattccactcaggttttccagcacagcccgaatcgcctaggcacccataaataagtgttgaacgcctggctggacggccgactgactgaatgaatgaatgagtgaacgactacgtttagagtcggtacagcccccctttccagtctccgcaagtgtccggggaccgcccacccggtctcttcgccacccagctgccaggtccctcggctcagggcagacacaaaccttctcggcagggctctccgggcggcagcctcacctgtgcccccatggccccgggagcgggcttccggaacgcgggcgcttgctcctcacctgggcctctccacacgcacccgcggcgggcggggctgcggggtctgggaatggggcgccctgaccccgcccccggggcagcctccgccaatgggcatggccaggcggggcctcagcgccagccgagccctgctgcccggggcttgttgcgaattctcagggcccccgcaggcctgggagcggcctgtgataactggtgtatctggcaggagtagcagctgccccttggcgcgactgctggagccgcgaactagagaaacacagacacgcctcatagagcaacagcgtctctcggagcgtggagcccgccaaggtaactccgggaattgagtggagtggaggctgcactgaggcccccttctggctcctctctggtcgaaaaggctcccccgctagagagag

SEQ ID NO: 31929 - DNA, 2300 bp, Homo sapien
gagagaagcagccagcatggtgttccgtgcctcccggacgtttttcaggaggcctggttggacttgggttcctggatggtgggattgttgtacagcctctcaggagaccctgctgtcaagactgtgtgtgtggatttctcacccttagaagctctactaagacatcaacggaattagggccttcctttttgccttgtgagcgccaaggaaaagaaactatctcggtcacgtgagcgccagcgaaaagaaactgtatcagtcatccagagaccgtttattgcccaacacgttattcttgctgttggtggggtaactagccgaggaagacacagcgccttcccttcaggagttgcgtctcctctgcaggccacgatggtctgctctggagcattgggtgaacacacaggctggctgctctgggcagcgccttcactctgaccctggagaaccatttcatttcatcctggtcagtctagagtctgtgcaccaggcagtccatccactgaaggctgtgtttattcttttcctgtgcccctcataatggaagaaagtaaactgcttatcccgagccttatcacaatctgccacattccttcttgtctacctgtttaactgtacccccatcacaaaaacaggcacaactttttttttacattccagggtacatgtgcaggatgtgcagttttgttacataggtgaacgtgtgccatggtggtttgctgcacctatcaaaaactcatcacctaggtatgcattagctatttttcctgatattagcctgatatatatatttcctgatattagcctggcatgcattagctatttttcctgatgctctcccctcatctgccctccccaacaggccccagtatgtgttgttcccctccctgtgtccatgtgtttcatggttcagttcccacttataagtgagaacatgtggtgtttggttttctgttcctgcattactttgctaaggataacggcttccagttccatccatgtccctgcaaaggacatgatttcattctgtatagctgcataatattccacggtgtatatgtaccacattttctttatccagcctatcattgatgggcattttggttgctaaccatgcacaacttttaactgacttgtagctcattgaaggagtcggtcctggcacactctaccttactatcactgtcagccttttctccttccttcctgaccttccctcctcccatcccatacttcccttttcaccttgaggagctacgggaagtactaggtggtatgaaagagagtgaggagaagatagagtccctgtcctaatggtcagtgtatgctttttatgggaaaacaagatagatagcacctggcaacatttgtcaacatttccttcaaaaatctttaaatatttttcactaagacttagaaaaaaagttttatacgaaagcataacaaaggcaaaaggtgaagtaaaaataacagtcatcacccagaatgctaaggagaccttaatctaaaccaggaaattggaagggcgattagaatatgctgtgtcttcattaaagttgctctgttaattagttgacacatggttatgctttccagtgggatgaagtgaaactcccaagtgtgttttgtattgttggtgtttttatatttctcagccatcccccaatcacattttagggttattactagattgacttcccccaaataaagtgtctgctgagtgggaggatggaacattctaaactcaatattccagagcctagaatctaattgtttctgccactcacggtgtggccttgggcaagtcccttattctgtctgtgccttcatttccttcccagtccagagagggcagtttgatttgataattttaaaggtgccttttaccaaaattttgtgatttcttgaaaatgatgtttgcgagtcacccacacctttggggatgagagactaatagcagataccctcagagattgggatggagattactgagctttcttatatatgccattggttgtcatttatactcttctgaggttttcagaacaggaaaataggtggggttaactctgcccgtgagaaacatcttgagcgaactatgatttcagttgaaagatgtgtttttgtgagtagagcaccgcagaagaactgaagactgttgtgtgctccccgcagaaggggctaccatgatcctttcctcctgtgagtaagatgggctttgtcatttatttttggggcttgttctggggcctgttattcttgaacagcagaggaagttttttttttccaaggcatagagc

SEQ ID NO: 31930 - DNA, 2300 bp, Homo sapien
gccgcatagcaggaggtaagcggttgagcggtgggcaagggagcaaagcttcatctgtatttacagccactccccattgcctgcattacggctgagctccgcctcctgtcagatcagccttggccttagattctctcaggagtgcaaaccctagtgtgaactgtgcattcgagggatctaggtggtgtacgcgttacgagaatctaatgcctgatgatctgaggtggaacagtttcatcctcaaaccatctcttcctgacacctgtccatggaaaaattatcttccataaaaccagtccctggtgccaaaaaggttggggaccactgtattaaatggaatcttgttagacttctcagggttattacagtgatcaaaggagaaatgatataggaaggcactacttttaagtcccaagcaagcatgaggtgtgataagtatcaaagcacttgccattcccttagcttcagccttgggttggccgtctgtcctatcattcaggtctcagctccactgttaccccagagaagcctccagtaacatcatatctaaagtagcctccctctccctttcactctcaattccatcaccctgctttattttagtcaagacacctcacttacgaagtggtttaattttttgcttgcctgttgatcatgtgagacaagtaacaaacgttaagaagccatgcttgctcatttctgcttgtcagcataatttcacacagcccctgactctgtgaccacctgcagctggcggaaagatgctttgaagacaaaacgagatagaacacaggatcccccacgtctcttgcctgagcccttgccttttactgcacctaagataaagtctgatgaggttagtgattatgcttctgtaatctataaacagatgtactcttaagcccaaactgtgatgtgcttttacacatactgaatcttcaccaactgtttctaaattgagaagggaagttctgtgttggagggatctgcttgaatctctctaaaagactcctccagggctgtaggcctccatctctagtcctcagtaagacttctgaataaaactaactttcattctttaacagcttgatttttaaattttagtcgacaatcacttattgtctttctcctacagtagaataaaagtttcctaatggcagagtccttgcctcatcttccccaggcatgggaacagttcctggtataggatgcacacagattttgctgattcaggatagccgtgaataacagtggagactccagaggaggaagacctggatttgaagcccagcttctcaacccagcttctcaatttactagttgggtgacattaggcaagttatttagcttctctctgcctcacttgcaccgtatgtgaaaagggggattctgataatatacgcttcagagaacttttagtacatgtgaagtacctagaacagtgcctggcacacagttaagtcttacatgtgttttctactcttcagtgagtttaatgttaacacattaatagtgcacgtgaccctctaagtgtatcagatatgcactgctccctcgggtttcacaggaaaaccacttactcttttggtaaaacaggctgcatggctccactgctccgcgtcacccgcctggcctcccaccgcttagcggaaggggaggtgcggttcctaattccgacaggcacgtagtcttccacaagtggcactactcggggctctcctggctaggggcgttcgagccactaggggcgggtctcctgggatgggaagactggggctagggaggttcaacgccgcccccggaaacctaagggacgctccctgaaactcaccgggacgcgcttccgacccattccggtcacttgccttgaaatcgccgcagggctgcgcaaacctgccacccagggcccaagcgaccggggcggggcgatcgaggactgggcgggcctgcaggatcagaggcggggtagggcgtccacggggccagcaatcggggcggggcggggtgattgggggcgggacggggagatcagagggcggggcggggcgctttgctctggactctggggcgctaggctccggactccgcggcgcagactgcacctcgcagtctccccaggtccgcccagcagccgcgcttcagccaggtaagggcgccgcgggcgggctggggcggccccgggagtgcgatactccgggcgaggacgggtggggagggggatgagcgcggcaagaggcggcttccacacgcccctcgaggaacggggaaggattttctcccctccgtgccgcagtgagcgc

SEQ ID NO: 31931 - DNA, 2300 bp, Homo sapien
cagatttaagcgtgtgtatatgctgtgtagtgtgtatgtgtgtgtatgaactgaatgttgtttgatacttaagaggcctattaaacatccaaatatctaaattcgtgcctgccatatagtagatatattcaatatttattgaatgaaaaaggtaagacattgagtaaggcaatagaatttaaaaatccaagtatatctatccactatgaacttctctatatatctaagtatattcactctcatgttttgcaaccatgaggcctcaccagaatcctttactttttcatcctggaagagatactggagatcctccaactcacgcattctaaagtaaactaaggaccagagattagagagcagcgatcaaggtcaagtgcatttatgctacagctagaacccgacatcaggctttctgattcttaattcattgttccacactacaacagcttttcctgccccacaaacattagtgctaacttcataatgtccggtgaactgttcttttcaaggagtatatttgaagggttcgccttatagaaactgactagttggaatctattttacaaagcattgaatgcaagtgaaaactgctacacgtgaagtagtcatgatttttaaccctccggcaacaagttcagactggtcagaaagagcaatgatatttagatgagcattacacagataatatatattacttgacaattatgttagcaaacaatcacatcctttgactaggtctgtatagctagaaaaatactcgacttatagttagccagcaaacttttaacacaaatacgttttttgctacgaataaatagctacgtggttttaagtagaacttatagtctacttaactttcaacaaaccaagtattgagtgtccactgtgtcagtgtactagacatgggaagcaaaaatgaagtgtccttaaatcaagtaaacagacaaaaacaaacgaaaaataattcttagagaaaaaagcaatttaaaaaaaagtgcaaacacctattgagaactattgatcacgtagtgctagaatatgcagaataattagatctttgtggaattgttgggaagaggtttcctgaatgagagagtatgggatttaagaaaagaatcagatatggcaggcggagaatatggcactagaaaagctaaagggtagaagcaagtcagtcatggcatgagtccacactcaggtgtaacaggactggatcattgttattaaactaagggtggaggcggcaactgaagaaaagctgcaaacacaagccaaagccgttcacaattgacctctgaagaccaacgactgtgataatgtgatcaaaacaaagcatttaagttttgtttaggtttcctgccgcattctaaaggcagacttcacattcttacaattttcttcattcttcagtatctgtcagcgtgtttaactacttttaacatacaacttttaaaaaagtcaagacacactacgaggaactttttccgaaggaagtgatccaaagaacagagtgtgagtcaataaacggagaaagggagtagagaagcggtttactatcccccgcttccgccccagtgtgctgtaaactttaagtcgggaaaactatgttttaaccgatgagataatgcctttaaaagtgcttagcacactgtctggccagtaggaagcactcaagaaattatgattattttgaccttagacctctcttaactgtctgaaactggggtttcttattttcaggggaagaaacaggacacaggcagtctagaggctcctgccagccgagacaatctccaattaaaagtcggcatcgattaaatatttgctgaacaaagtaaactgtctctccaccgccgggctgagcgcccactcgagatccggcccggaacaagggcgagactggcccgcgggtcccacactccctgtaaggggtggagaacacgcccacacgcccagaccaacaggcgaggctgttcgaggaccttgttagccacctcagccccgcccgccgcgagccttctgctggcctcccgttctgcagggaccctccctagccagcccggccgcgtcccacatccgccgacacgccccttccggcctaatccccgcccctcaagcaccggccccgccccataggccccgtccgtggccccgccccgccgcgagctggcgccgggtcctctcagcgcccgccggcggccgcgtccacccccgacgctctgaggtcaccgactgggccggcccgcggggggcggagggacggagggaagatggcggcaggggccggatattggcgccgc

SEQ ID NO: 31932 - DNA, 2300 bp, Homo sapien
ttgactaggtctgtatagctagaaaaatactcgacttatagttagccagcaaacttttaacacaaatacgttttttgctacgaataaatagctacgtggttttaagtagaacttatagtctacttaactttcaacaaaccaagtattgagtgtccactgtgtcagtgtactagacatgggaagcaaaaatgaagtgtccttaaatcaagtaaacagacaaaaacaaacgaaaaataattcttagagaaaaaagcaatttaaaaaaaagtgcaaacacctattgagaactattgatcacgtagtgctagaatatgcagaataattagatctttgtggaattgttgggaagaggtttcctgaatgagagagtatgggatttaagaaaagaatcagatatggcaggcggagaatatggcactagaaaagctaaagggtagaagcaagtcagtcatggcatgagtccacactcaggtgtaacaggactggatcattgttattaaactaagggtggaggcggcaactgaagaaaagctgcaaacacaagccaaagccgttcacaattgacctctgaagaccaacgactgtgataatgtgatcaaaacaaagcatttaagttttgtttaggtttcctgccgcattctaaaggcagacttcacattcttacaattttcttcattcttcagtatctgtcagcgtgtttaactacttttaacatacaacttttaaaaaagtcaagacacactacgaggaactttttccgaaggaagtgatccaaagaacagagtgtgagtcaataaacggagaaagggagtagagaagcggtttactatcccccgcttccgccccagtgtgctgtaaactttaagtcgggaaaactatgttttaaccgatgagataatgcctttaaaagtgcttagcacactgtctggccagtaggaagcactcaagaaattatgattattttgaccttagacctctcttaactgtctgaaactggggtttcttattttcaggggaagaaacaggacacaggcagtctagaggctcctgccagccgagacaatctccaattaaaagtcggcatcgattaaatatttgctgaacaaagtaaactgtctctccaccgccgggctgagcgcccactcgagatccggcccggaacaagggcgagactggcccgcgggtcccacactccctgtaaggggtggagaacacgcccacacgcccagaccaacaggcgaggctgttcgaggaccttgttagccacctcagccccgcccgccgcgagccttctgctggcctcccgttctgcagggaccctccctagccagcccggccgcgtcccacatccgccgacacgccccttccggcctaatccccgcccctcaagcaccggccccgccccataggccccgtccgtggccccgccccgccgcgagctggcgccgggtcctctcagcgcccgccggcggccgcgtccacccccgacgctctgaggtcaccgactgggccggcccgcggggggcggagggacggagggaagatggcggcaggggccggatattggcgccgcctcccccaatcccggagccggcgcagatgaggcagttcggctggggccagcggcgctttggaacccgaggtggggggaccctggcggtggggcctggtcctgctatatgccggcgcctcggctagagtgagcggcggcgacgcctctttcctccgtctctttccctgtcgctgcgagagcgagcgggcggcggaggcggcggcggcggcggggccgggatggaggacgttaactccaacgtgaacgcggaccaggaggtgcggaagctgcaggagctggtgaagaagctggagaagcagaacgaacagctgaggagccgctcgggggccgtgcagggcgccggctcccttgggcccggcagcccggttcgggccggcgcgtccattccctcctccggcgcggcgtctcctcggggcttccccttgggcctcagcgccaagtcgggcggcgggcccgggtcgggcccgaggcggacgagtagcgaagagctgcgggacgccacctccttgctagcggcgggcgagggcggcttgctggacgaggtggagccgctgcggcccgacgagctggagcgcctgtcaggctgggaggaggaggaggagagctggtgagcgcgaggcgccgggcaggagctgggcggggacgggcccgggggcggagagcgtcctctgagggtccctctggtcgggcgcctcgctttgtgtagccgggtccgctctcctgtggc

SEQ ID NO: 31933 - DNA, 2300 bp, Homo sapien
atgctctgcatttccgagacactgcttttgttcatcttataaatactgagtaaagcacatactttccccatcctgtcaagttactactcatcctctcaagactgcttcaatgcctctccttccaaaaagccttacccagtttctctcagttgtaatgaattactcctaactcttcctttccattgccctttgcacctttatgatagtactcatttcattttgccttgcaatgtttgttgactctgcctgtggtacttggctgcaagcctcttaagagagagagcaccatatcctgtttcttgtatatattctataaagtgctcttgccagtgctcataaatattgaataagctgtggatattagaatatgaaggaaggggctgggcacggtgactcacgcctgtaatcctagcactttgggaggccaaggcaggcggatcatctgagctcaggatttcgaaaccagcctgggagacatggcaaaaccttgtctctactaaaaatacaaaaaattagccaggcgtggtggcacatgcctgtattcccagctatttgggaggctgaggcacaagaatcgtttgagcccaagaggcagaagttacagtgagccgaaatcacgccactgcactccagcctgggtgacagcaaaactttgtctcagagaaaaaaaaaaaaaaaaaagattgaaggaagaaatagtattttaagtgttaattttttaaatatatgcatttgatatcttagtcctactgttgtactatttatttaattttacatgcatagcacattttttttttctttttttgacagaagtattcaggttgacttttttttttttttttttttgagacggagtctcgctctgtcacccaggctggagtgcagtggctcgatatcggctcactgcaagccccgcctcccgggttcacgccattctcctgcctcagcctctccgagtagctgggactacaggcgcccgccaccacacctggctaattttttgtattttttagtagagacggggtttcaccgtggtctcgagctcctgacctcgtgatccgcccgcctcggcctcccaaagtgctgggattacaagcgtgagccaccgcgcccggccgactttttttttttttttttttttaaggatttcccatgtcttgaccttaaactggcttaataatagtcggtattgctttaaaaaaaaaatccaaactttgaaaaggcgatttaaacaacttatttcatagcttttagaaaaagtaataggttgagtgcagtgtctcacccctgtaatcccagcactttaggaggccaagataggaggatcacttgacaccaggagtttgagaccagtctgggcaacatggtgagaccacatctctacaaaaaaatatatatatattttttcgagacgagtctcactctgtcgcccaggctggagtgcagtggcacgatctctgctcactgcaacctctgcctcccgggttcaagtgattttcctgcctcagcctcccaagtagcatgcaccaccatgcctggctaatttttttttttttttttttttaagtagagacagggtttcaccatgttggccaagctggtctcgaactcctgacctcaagtgatcagcccacctcagcctcccaaagtgctgggattacaggcatgagccaccgtgcctggcccaaagaatattttttaaaataaaaagtaatacatttgttacagaaaaatgagaaaacataagtatgcttttatattccatttatttttaaaggtcactcaggattgatacagcaagtatcaaagaataaactttccaacatagtagaagtgaattaagtggccaataatctgtttaggagttactcttcctgcattatttttgttgtttgatgtggctactgttttatttgcatacacagtttaagataatagaaacaatttgttgggattattatattttttcccccactaccataagaatatttcttcatttaaattgagataatgatttagttttctaataggaaaacttcagaaatgaaacgttaactttttctcagttgttaaatttgattttccccttctcattaatgcagctctcaagaggcagaatttatataataatcctttcaactctatgagttacaccagtccttacagtccaaatgccagtagcccatacagcagtggcttcaattctccatcctcaaccccagtgcgacctcctatagtcaaacagcttatacttcctggaaattcaggtaaggagaaaatgatatggagctattaaggaa

SEQ ID NO: 31934 - DNA, 2300 bp, Homo sapien
gaatacatggtgtaaactgtaaaaaagacctttaggagaacattggaattgtgacattaaattaaatgaagcatgtgatggtgctttgcagagtgaatgatgaaaactttttaggccacagatacctttgagaatccttttatcatcaaagtgtacatatgcacaaaatttttaatactttttaaagggttcatggctacttgccctggtactcatctgaaggtacttattcttgccagtgcatttcattagaagatgccatctgcataactatgaagtaagaaatctctctaaagcaatctcttcaacctttacaatgaaaagaatccttgaaatacatatgttgacaagtcttgacaggtggctgaggttaatggagcattgctacggtttagttcaaaaactttctgttgtctgtgtatgtaataggttctctttaaatatgtagtaggctttatcaagctgtagcatttattaagaaactaaagtgtttcttattctgctgattcacttcccatttccatatagcttcccctaggaagatagaaggacttagtgcttgctttatttagccctgcaacctaatagcagagtactctttttcttctgtaattttaattaactcctcagtgagactgtggtattgtcagctggttagggggtggttattgttgtggatgtgaaaaaataaagaatgctgcctaactctgtactttagaacaagttctctcatttctttgaaccctggctttttagatcctagtattttgttagaagctcaaccagctctttgcttttggttttgtattgtgttttggtaacaatagaaattttagtcttactttaataattttttctaagccatccacatgcatgaatatttattttcctgatgagtaaaaatagtaataaaaatatatgtgatacttcttgaaaactacagctttttttttgtcttagagatgattttcctttttacaacattgtgttttgtaatgattagaaatgtagaactacagatttgggcagtcacctggtcaaggtcattcgtttttaagatgagaaatgcaagctcctatagtgatccaacagtgctcttttcattggtctgttgtcttttgttaggtgactttagtgccatgttggctataactagacactaagtaacttgttggttactattttggttccccgactaactgaagggctaagtggactccaggaatttatagttttaaagataccctagggtgattctcatccactggtttgatgaaccgtgttgatagcactttctgtgtgtgaatacatgactttaggatttgaataccactttataacagatctttttgactggagtgctaatagttagcaggttgtgctcagaatattacctaaattctatacgtttgcattgcagtttgtttcttcattgactatgttacgtatcaacttttttttctgttgttctagaagcatctgtactatttgaagggctcccaaggttgcttgggtgttttcgaaggtatcaagctatataggagaattctttgaaaattcttacttgaagacttagaatttaagcttgaaaacaagcttaaaacaataaaaatggaagtctcttgggtagtgaagcaatcaagatttcgtttgtgcccaagtactgaattcctataagtgggttagaagtttctttggtactttatcatcttcatgagtaagattatttcagtaattaagtatccaagaagttttatttactcacatacgtattctttttccactggttggatggtaattgtttcccctcaatattcctttaatattagtctcaaatttggattactgtctttaggggtagaaatatttttaaatttatgattctaccatgtgagacagatttcagctttaagaagaaatctggaaattgggcagtggtttatgggatttcattcaatttaaaaataaccttcagatgtgatttatgcctccttatatggacatataagcctatataagtctaaaagcagaaagggagttttcttttacactttacaccctctttgaatttttcagtgataatcttttactttaaattttaaaattatttaaatgtttaaaaatattgtttaaataaataacattcattgttgccaggtctccggcaagaatatgcagccaccacgtctcggcgcagttctggttcatcttgcaattctacaagacggggtacttttagtgatcaggaacttgatgcacaaagtttagatgatgaagatgacaatatgcatcatgcagta

SEQ ID NO: 31935 - DNA, 2300 bp, Homo sapien
cttcttttttattttttcagatggagtctcagtctgtcatccaggctagagtgcagtgtcacgatcttggctctctgcaaactccacctcccaggttcaagcaattctcctgcctcagtctcctgtgtagctggtactacaggcacacaccaccatacccaactaatttttgtctttttagtccagatggggtttcaccatgttggccaggctggtctcgaattcctgtcttcaagtgatccacctgtctcagcctcccaaattgctgggattgcagacaaaagccatgatgccaggcccctttctgttttcagtcttcgcccattgcacaagttgccgcccaagtccctccctaaaccctgagaggaggtagttggatgagttgagttggtctgcctctaattactgcttatttaatgtgattgtgaattttaatatcattaacatgatgagggtttctgaggcaaataggagtggtgcctgcacagttggcttcagctggatcccttgccatttgtgttcttggcttatctcattctgtggtttcaagactgtgaaggctcagcagtgccttccctccttatcttgtctgtttctccacacatcttccctgggtctactaatgtaacggttgggtagcatggatcattgtatatctgaatatctttctttttacctacataaggtgacatgtcaacttaaaatatttttggtcacaacccacttcctttaaagtttagctcactgaagtttttttttctgggtttagtgttttggaaaagtgtaagggtacattatcctcctagattcttgcaaaagctctgccctcgtggaatttacagtccaaaagagaaaaaataaattatttgtgatgaagagtgcaatatgctttgcatttgcaaagtcttacttttcatagtctccatcatcttcatgagatttggggaggaggaaaggctcagcccacccttgggtaatagaagtcactctgtgccaggacaggagttagggaaaagttcccagatagaagaattcactatatcttggctccttgtgaaagcaaccctgggctaagactgagccttgatttcattctagaaattcctgttggtttttacaactcaactgactatcactttatggtcacccccagggagctagatgcctccttaacaggccccacctggttggtaagcagcgaaattattttcctttctacatgccatctagtgactgacttaaaagttgttgcatctccattcctaagagctctgcttttgaattgttttgggataaacctgtctcaagcagggaatctcagcactttatttcttttcagtcctttaatcctaatgccagggccttactcataaagcttcgtaaatctgtggccactgaaatatcctctctccacctgccaataacttcttaaacacacatttttcatggaaattgttattagccaagctcttctctgccctctttagggacacatcgccgtgcagattcagccaggtacttgtgggttcggttgataagactgagaattcctcgttcctcagtttcctcgtttgtaaaaatcgagcttgtaaaaatggtatctatctcacggctttgctgtaagaatcgaatgaaataatgcacacgcacttgcacaaaacccgctatattattattacattctactttaagactgaaaatcatgcaaaaaattgtttgcaaattcaagccagatatcgtgtcctgcttactagagaatcgctcatattaagtcaagcacccctcttagggctgcaggctataggaacagtttctgccatgagcgtgcatcgatgaggttatccacccgccccctccactttgtgtgtctgggtctccagatttcattataaagaggcagagcccatcagagaacttgatcggcagccaggaacggttttttcctgctctggtcctttgtcaggtctttgttccgcccctggctacactcgataacagaaccacttactggcgattcacaggaggggaccgggcggcagggcggggcggggcctgcggggcgcggggccgcggcgcggagccggcgcagcgattgggttcacccggggggccgcgctgcgcggagtgccaggctgcgggcggctgcagacctgggagcggagaccggcccgccgcccccgacgccgccgagcacgtcagcggcgcgcagccggggctcggagaccgacgggcagaacgacgggcggcgactgcggcgaccgcgggacggcgagaggcacgcggcgggaggggaccggaat

SEQ ID NO: 31936 - DNA, 2300 bp, Homo sapien
gttatagaaggcaaattgtccctggacataaggacaggcctccaaacaatcagagctgcccaatgtggctctggatgcttcctgaagaggtggcctgcccatcttcagaaatattctgtcaaaggtctccattttgtgttggagagcatactagatgggtgttttcttccgtgagcttaggattctctcgcctgagttcatcttcaaccatctcattgtaattttctattactaggtttccctgtggtctctgctagtgactctggtggtccttttcataatgaccggcactatgttaggacctgaactgctggcaagtatccctgcagctgtttatgtgatagcaatttttatgcctttggcaggctacgcttcaggttatggtttagctactctcttccatcttccacccaactgcaagaggactgtatgtctggaaacaggtagtcagaatgtgcagctctgtacagccattctaaaactggcctttccaccgcaattcataggaagcatgtacatgtttcctttgctgtatgcacttttccagtctgcagaagcggggatttttgttttaatctataaaatgtatggaagtgaaatgttgcacaagcgagatcctctagatgaagatgaagatacagatatttcttataaaaaactaaaagaagaggaaatggcagacacttcctatggcacagtgaaagcagaaaatataataatgatggaaaccgctcagacttctctctaaatgtggagatacacaggagcttctatcttgctgaaatattgcttcatatttatagcctgtggtagtgcacatggttaacataaaagataacactggttcacatcatacatgtaacaattctgatctttttaaggttcactggtgtattaaccaaacgttgtcacaaattacaaatcaatgctgtaatataatttgcacctggaatggctaacgtgaagcctgaattaaatgtggtttttagtttttaccatcaccaatttctatgactgttgcaaatacagaatctattagaaaacagggtcttggaaatgtagaattttggcgcactatgaggaaaaacaagctatctttgtaaagcataattgagtttaatgtaattgttgtaaaaaaaaaagtgtgcttgctctacttaaaattcctcacaatgttgaattttgacctgtattcagaagaattccaaaacaggtcagttaaataaggaaatatagtatttgtcaaaccagtatcagagaaaagttacattaatgtatttgattacttgatctggtatctacttattaatgaataatcaacatttttctagtggacaagccatgttcttttcgactggtcttctgcatttatgtaaacacaccccaaatcaatttatcttttgtaggaatgatttggttgggaaatttttcagaaccgctctggagcagaacaaaacggtacctcccggtcaccactgggactgggggaagggacacgctccaggggagaaaacaattcgcctagatgaagatccctgggtggttctccatgcactcgccgagggggctcagtgggtagcctcttagagcagctctgagaataaacttatcatctgagttaacgggtaatagacccagaacagttcccaaaccttggcactttcgctcacttagccagaggcacccggcctggcctcggcttcccggtgagggagcgggggtgggggggatgcgcaggcacctggaacaatcagggcaccgggagaagccggctcagctgatgccggtgatgagtttctctcattgaaatcctcctcacctcgggcgccttggttcccttacggatcagccctttcatcacaaagaaagccctctttccagatcatctaagggtcattgtgccaacatccgggcgtggagagtttctgtagggagaaggacgaagaggggccccctcggcggggacgcgggccggtggcaggaagggcgtggagggcggtgcagcgtgcgagcccccgccgagggccatccccgcctccgctcggccgcccgggcaagtcgcctatttagggtgcggcggcgggcgggagcagtgcgcccatggcggccctgggggacgaggtgctggacggttacgtgttcccggcgtgccccccctgctcgtaccggtacccataccccgcggccaccaagggcaagggcgcggcgggcggcagctggcagcagcgcggcaggggctgccttcccgcctcctccccctgctcggcgggcgcggcctcgttgtccttcccgggctgcgg

SEQ ID NO: 31937 - DNA, 2300 bp, Homo sapien
agtcagtgtgcaagacatatgagtgaagccaacttggaacttcaaccctgccgcttccccagtcaagccatcaatgactgtagactcatgagtgaccctaggcaagaccagaagaaactcccagccagcacatagattcattttggttgtttgaagccattaagttttagggtggttggttttaaagcaatagataccatttataataggaaaatatcaaatacctacaaataaatctgtctaaagatatgctgtacctctatacagaaaactgcaaatattgagaaaaattaaagaccacctaaatggaggactatataccatgtttatcaattagaagactcaatatggtaaagatgtcattttcccccaaaatggtctataggtttaatgcagtctcattcaaaatctcagatggtatattaatggaaattgacaagctgattctaaaatttatatggaaattcaaacaactaataatgcttacaaacttcttgaacacaggttagcaaactacagctgtcaagttatatctggcccactgcctatttttgtaaataaaattagtagaaaacagctatctggtttacttacatattgtccatggctatgtttgcactgtaacaattaaatagttacaaagactatatgttttgcaaagcctaaaatatttactgtctgccctatttaattttcccattcatttttgagttatacattctttttattattattcaagactgctaaggctcacaggtgaattgaattatttttctctccccagcaatgtgagaccagcggtctctgccgaccttctcagtctcccaggggctgctgtgtggttttgtagcctctccccctgcagataataaacaggaacagcaagtgttctaaggcgagactgcacagagactattggggtcacttctctgcagttctcttttctccaggatattggccctcaatatctcacgatctatctatctatctatctatcatctatctatctttgaaaactgttttcccagcccagtgaaactgtagggcataaactctaggccactgctttctgttcagcctctatgcgcagggacgtgaatatgaatacacctagagtagagtaagcactggggcgggtattgggctcactccggtacttttctctaactaactaactgtttgtttgagtgagttttggccgataggattcagcttccatcattgtccttgcaggattggtctttctttcttttatacaggctactccatcacacccagaagtagaacctcgacagttaaaaattttaaccttcatttgaaccttgaataaagaaaatgccgtgacaggaagactgattgattagatgtgaactggagggtgttctgagcacaaactaccatgtcttgtatgctctggctggaaaggtgtggacctgtatctctcaggccagtgtgcagccacaggactatatggttggggtttgtcttttaacagaataaaaatcagcaatattttgaatagtgccccccaaaaggctgtatcattaggtacacagtataaaaataagccattaaataaataatcaactgaaattattttcaaatttattagtatacttggacaaactggacaagataaggcataattaagtgtataaatattttaacattttgtatgaataaagattaatgcacaggttccatgttagatgtcaactgcattttgctgatacaaagaaatccactgatagcttttgacaatggctgccatcagctgtatctcactagaaaagcttaacatgtttttcttcagagatgctgtcaagcaaatagcctaagggccggtgaaatctgagagactggaataaaaggaaaataaggtcaaagagatcatttttgaaataactgaaatgtcaaatttcaattctttctttgtgggtacaacataagctacaatagagaatgttaaatgtcgaatactaaaatactttcagagtagctgcttaatgcagctagtctgtttctcaaagtcctaatgatttcatatatatatatatatatatatatatatatatatatatatatatatatatatattagttgtattgtttaatagtataatttaaaaaaaagaacttagaagtcaaaacaactgataatatcaaactgtccaaagctaggagcttacctggaatgcacttagcttttacttcagcttggaaattctgtgagtccagcgttctttcttttctactataccacggtgctattgttttatttatattttgctgaagaaaatg

SEQ ID NO: 31938 - DNA, 2300 bp, Homo sapien
gctctgccttcagggagcttacagttaatatatcataaatcagcttataatcaaggcttaaagtaatggactaaaagtgtccattgactttgtgaggaccttaaagtttttagctgttaaggttgcttcctccccaataataaagataatacaagctaaaatttattgagtacccactacttgctaggcactgtgctaaagggctttacggtaagtgttctgacaccacaactatggaatgtagatttgattttcagcattcagtggagagggaaactaaggcacagaaaaatgccaccatttaagttattgtcctctgaactatctaccacctttcctcccttttctcctcccaaattttgcccatcttggaagactcagctaaatgcattttcttaccgaagccttcccaaccactccaacctccagtctctctcatcctggaagttctttagtgctcattaatgggagcgcttatttaattctgtacttattgcatcactacttggtttttctactcatattcttattgatgttgtaagtttcatgatggctgaaagtgcggatttatgctttttattttaatcataatgccacctaacagtgcaacacatatataagtaggtatactttaaccattgatgtaataattatactactgataatataatctaattgattgacttactatgagtcaggcactgtctgttttatggaaatgaatattcctggactctgagaagatattactcttaatacatttttatgactttacctaaagttaagccagatggcagcccatagccaagaatagtaaactacatttactgaaagtttctttcaggtaataacttttgatgaacaacttcctcaagacaggtgaggactttcattgctaagaatgtacagcatgcatccatctgtctgccccctgatgaaaaaatctcaggaatagggagatgaatggcatatatcattttttcagtaatactattttgtaaatttttgtttctttttagaaattaatgttttctaaggaaatacctaaaaatatggatttatagatcaatgattaaagttctatatatcattataattttaaaataaaagtctaccctattatgcttctttacttaaagatgaaaaaaggccttcttatgaaacactaaactctttcttctgcttttctccatagacaattcaaagaaagtttggagaaataactaatgaggcagtcagctttcttggtgatagtctgcaacgcattggtaccaaatttaaaagttccttggaagtgatgatgctgtgttcagaatgcccaacagtctttgtggatgctgaaacagtaagtttttacatgcaggtttattataaagactacattggaatggcatcattcagtaagtctttttttctaagtaattctgaattttatggtataaaggttcgtattttcaacatgattataaatatgtggcaaactacaattctagtatattaggtgcagcaacttgtgactatttctgattctgactccttcatgcccttaccctctacagagtcctagatgggaaaactaaaaagtcatgctctagagatgggtaatttttatattcttaaataaaaatgggtaggagatgcctaaacctccacccgtgaaatacccaggcctcctggttcatttcctgatttatttctaagcacacttctagattatatattaagatatttaaagaactaaggtttaaaaagcttcaaggttgatacctttgaggtatgtactggtctggcatgacgtctttgaaaacacttgaggatgtccttcctgaccctcctcaagtcccactgcactcctactctgttccagtgagagctcagctctaagtatgggacagagtagagttaagagaatatccaaaaaccaactaacagctattccatgactgaaaagtctcatgattttgtgagtctcatgatttcaatcagaaatggtaacctggatcaatacttctgatttgacagctgatgtcatgtggtttgctggaaacactcaagtttggtgttttggagttgcaagaacacctggatacatacaatgtgaaaagagaagccgctgagcaggtcagtctctttttaccatgtgcgaaaagtggtttgctcttgacactggaagggtaatcctggcagcagaatagcccagacagaaaagaagacctctcagcacctgcctcagggttttcctgagagcagcaggttctttgagctctctatccagcaaattcctacctttggcttttaaa

SEQ ID NO: 31939 - DNA, 2300 bp, Homo sapien
aagattgcaacactaatggagtaccgtgttgttattcatgacagcactaaacttattaggttgatactgcacacctattagctgctaaaatataatttctcttgcttctttcctagtcacagtgagttgttttgggccctattagaggccttcagtgataacatatttttggtatcaatgtgagcaccaacaccatttaattcaccactcacttttctttcctagttagcatagtgtggaaaaacagagcacaagtttggtccctttcgagatcaagtagagtcagtggaaaatgaaagctgcaagagtagcctgttatttcagaagagtacgggtgcaagaaaagccagtggtagggctggaacttgaagatggcactgtaaagaaggagaaggcacatggaatagctaccctggtacatgtgataaggaagaaaccagtggagaccaggcaccagctatggttacacagctcttacaggaatgcctcctttttttattctttaggcacagggtctcacaccatcacccaggctggagtgcagtggcacaaccatagctcactgtattcttaaactccaggtctcaagtgatcctcttgcctcagcttctcaagcagctaggactacaggtgcatgccacatatgcacagctaatttttttaaattttttgtagagatggggtcttgctatgtggcccaggttagtcttgaactcctggcctcaagtgatcctcccacctcggcctcccaaagtggcaggatcacaggcatgagccaccgcacccagccacctacctttaatttagatccatttgctccactcggcctgctggtaaagtgctggcagtgatgttgaatggaagggcctgagctgctttaggcacaatgtcaagttgtcggtttgtggttggtgtccagtcatctctcctgtatttacatctcattggtgccccagtttgtctttccactaactgcccctctcccatttaagtgttcaatgaccaaccgctgctgctaatggcagccataatacgttaccacttactgactgtctacgatgcacccggccctgttcaaggtgttttacgtgtattagttaccataactctcctcctaacacaaggcaagtatggttattgcagatctgcatattacatgtcttatcccaggacacatagctagtaagtagatgtgaatcaagcagtctgtctctagtgcccattcacttaaccgtgccacataaatcttcgtcctccatgaatgaatatgaattcagctccaatatgaatttcagctcaaggttaacatagttacatagagctcttccactttgatagtttttgtttagcaaaatttagcctgtattaatgtgtacttagttctaccgagggattagctgcttaccctaacaacacccattctggtgtagactggaaggaaagaaagatgattttaggaaatctcagaagctctttataacgaagcccctaaaatattttatgatagagaatgtttcctgtggcttttgactcataaatgaattccttattttactctttctctttttagttaaacagtgattctgccactgatgaaacaataccagaccatcctgacttacttctccagtctgaagattccactggcagcatcacaacagaggaagtgcttcaaatcagggatgagaccccaactttggaggcttctctagataatgctaacagccggctgcctgaggtggggagaaatggaggctggtgcatggccaatctgggctctttttagcactcttttatagctcccgcttttctttcaaaaaagttttgaagttgatttgtttccagtatttctaacctgttgagttattttaaatgaaatagtcaaatctgattttttcttaagttggtagattaaggaaatgacctacaggttaaaaataatcttgagtgtttttaatgagcagtttgcattgcagaacatgatgaggttaatgtacagacgcttctctggggttggcgagcatcatctattgcactgtattttcttagaaggaccgctttggttttttcttctctttttgctttgtgttgggtttatgtgattggtgctgtgattgggattaaaacctcaggccagctgtggtttttagcagttgttaaatgaaatcttttaaaaagactttggaaccactagtattatgttttttggaaaggcctgtgagaagtaagccagatttgaagctaatgactgaccaaaaataagtaagtattagtgttttttttaaagattattatacttt

SEQ ID NO: 31940 - DNA, 2300 bp, Homo sapien
ttcctttttttaaatgactttgctctcattttagttaagttttgatatctataatttgagatcttttgttcttattgggttattccaggtttgtagattcacgagtactgctttgtctttgattacaggaactacttccagtagcaatacaatggtagctcccacagatggcaatcctgataataagcccattaaagagaatattgaagagaggtaagtacttctctgttctgtattagcctttcagtttgacagatactggttgtcatcagaataaatgatattttctgcattgaaatgtggatgttgctgtgttaaaattcgagtgaaaaaaatatatttccatgctggaaactttccacattgagagtttcaacattaaagatgctagcctgctagatttttttatatgctctaatgtataaataggtggtatatggtaagtcactttttgtattgcttaaagttttagacctatataaatggtatttactccacctgttttgtatgccagaatattattttaggtagaaataattgattaaaagtttaagcttttggattataaggtggaaattaatgtacgtcatagtaaacttttgttagtattttgtgtactgtgtcctttttttttttttattgagatggagtctcgctctgttgccagactggagtgcagtggtgcaatctcagctcaacctctgcctcccaggttcaagcaattctcctgcctcagcctccggagtagctgggactacaggcacacgtcaccacgctcggctaatttttggtattttagtagacacggggtttcaccatgttggccaggatggtctcgatctcctgacctcatgatcctcctgccttggcctcccaaagtgctgggattacaggcttgaaccatggcgtccgtcctccttttttaaacagagaaagtgaaacataaagtataaataccattgcaccgtgaactgtgactaacttcagtgatcattcccatagctatgtgcacctggacatttacagtggactaaacagtcatttgaatcggcaacatcacagactagaatcccgatacagtagcagctctggaggatcttatgaagaagaaaaaagtaataaattccaaatgtttttaatataactataagggtgaggtgtattgttaattacattaatgttaataaatatatattttcagtaaattgtttttaaaaagcgtatttaactgccactagtggtgttccaacataatctgaaacatcttgattttaagaagcaacgtaattgggtgaaattttttttaaagcactggtttcctatagataaatcacaaggaacataagaactggttctcaggaagcatcatagaacaaatactggaaacaggctgattttttttagcaggattgctccttctgcatggattcactttttccttaaaagattctcccttggcaattgcaaagtgaataatctacccaagtttcactataacgttaaggcagggtatcatagaagcacaggctttcagactgggaagggacactgaagatgatctggtccaatctcctcattttgcacatgatggaactgaggtccagagaggttaagtgacttacccacgtcacacagaattcacatttcctgacattttttattgcaccccgcagccccactgtggtagagcagagttcctttcaagatggagctgtgttggccctatctcaggatatttagaactgaataacttaccagaaggccctttgttacaaggcagcttcaccaataatgtgatctcctggcttggacatcattgatggaatcatgatgaagtgctaatatagttttgctttgacgtacagggtggaacctaaattaatctctttctctctctccctctccctggtttgcttaatttgataatatttgtgcctagattttcctagcaaacatgttgaaatagtgggaaattttttttatcactttccaatactatataaatagttgggatcttactagagtttgcttatattggcagaaattagatggtgtagaaaatgagatcattttatcttgataggtgattcaatgccactttattctaattggcgactgaaagtgatggagcataaccaaggagagccactgcccttcccaccagctggaggctgctggtcaccactggtggattacgtgcctgaaacgtcatcacctggattacctcttcacaggtggactacagcgtcattccttttacatatgcaccaagttgctgctgaacactgtcggctttcttt

SEQ ID NO: 31941 - DNA, 2300 bp, Homo sapien
attgtcactgattagaaataaaaaagcaacccagcatagaatttcagtaataatcaggatactgacacaaaaacctggagaaatcaatagaataagctctttaggatagccttgttttagatgcaataagcagagtgcagtgtctcatgataattgagaataaaattaagaagatacttttgaataatgggaaaagagtataggccataaatacaaaatgtaacaaggataccgtgttactgatttaccagatatgttccaattattgagtagggtctatatcgacagatactggtttagatactaggaagattaatatacacaattacatttttaaaagttaaattatttacaactgtaagaagtaatgtgactagcctttggcatacactataagtgtttctttttctctttgaaaaattaaagtcacattgttattttgaatagtatatacagacagtggatacctaaagaacatgggttgtattttataacagggtcattaagcacttaattacatatgtcaatttcaactgtaggagccttgttttcatctttgaaaggaaaatgacactgtcaaaggaaaagagcatatttttttcgaaattttctgatctgaagctcactaatataaagatgtggtttagtctattactaaacacttttttacaacttccacattggtttattgtgatactgctgagtttcttcaagaaggatagatgtagagaaattatatagtagaatttcaaaatgggggaaaaaaatccttggagatcatttaaaccagtggttttcaaactttggtgtttctcaaagccctgaggttctctgatgccatccgcagaaagcagcagaatgtgtttggacactaggcctgaactgcccttttatctgttttatatactgagattacatgtaagcttcctttagcaggaaaaggcagctttcctgctgaaaaaaaaaaatagaaagtttgaaaacacgtatctcgtccaaagcccttacttaccagtgaaccaagatacagaggtgtgtctgtgttaaaatcttggccaatcttaccatatagccagtgatagcccagggagaaatggactcctggccccacctctgtgccagccttcatgtgccattgagcctgccatggaatttctgcttgcagagatgctctatgtcatgtaatgctgggacagggtgacacagactgcaactttgtttctgtgatttgcatatatataaatgatccctgctaccgcggaggtttttgatagtttaaaatgaaaacttctgctttcttttttacactattacacattcaataacatgttggtataaaagttaaagcaaaaagaaatggaaataaatgttttctatctttttttattcacagtgcaccagagaagaagtatttttcctcaacagagccttcgtcacagtctatttatgctgttcagtcactgggcaggtccttttagcatcatgtttacgcccttggacagatacagtgatagaaatatgcaaattaatagacatcaatactgtgcgttaaaggtatttacttagaaacctgatttcttttttcttaagagcagagttaagtatttttaagtctctcagtcactagtattaaaaagaggatctgagagtattaaaatgtttttctgccatattcaaaacttataccataagttatatttaaatacataaaatacaatgaaaaacagttccagaatctactcaaatttgatcaccattatcttaaagaacttaggattacttgaaagaaatgccttttttcccttacttaattactttttcttggtctttttatcttcccttccagtactgttcaaactccatgtctaatttggtatcatatttacttactcataataaatttctcagttttaaaaaataatttgtaaagaaaaaagattaaagtattgtgactagataagtattttgcctcttctcattaagcaaccaacatttaacctcttaaatttgttaaatgtaattctaatattattatttgaaggctatgtctgctgtactgtgttgtggccctgttgcagataatgtaggactttcatcagatggctatttgtacaaatggttggataacattttggattctctggacaaaaaggtaattatgacaatttccttaaaggttcataataagttgtcattgtattatttgcagttaatgtatgttgcactaaaaacaagtcttttaaaaaaataagataggttaggatcatatgcaaaaagcatattatataaagttaaatagg

SEQ ID NO: 31942 - DNA, 2300 bp, Homo sapien
aaattactatcttgatcctatacatagtcaaatcctaaggtatgtgtttatgtggttaacaaatgagttggaaagataatgcagcttttcatttgtaatatttttaagatagtttaataattatttccagattttggaagtgggcaaacatgattgtttgtatagctgacatacttaacttgttgggggtacatgtatcccagtgggtgtagaaggtagttcactggaatacaggaaaaaaataaagctcttatttatatattttttggtttctaccgacaaaaatggtttccagcaacaaaaattatgaaacaaaagatattttcttgaacatccattttaagaaaatattcactctattgaataaatttatttctgaaagtaagtttttttcttcctgaagttctcatactaggtatgagtaaaaaaaatcagttctgctgggtttttttctgtgggggaggtggttgttatttattaggtttactttgttaggattatcttggatctgtattttcttttcttggatctgtattttcttttcaaggacttttgtaagagctcatgtagttaaagctagataaaattatccattagcccatttaatcaaatacatgcaaattgcaatacactgaaagaatgtataagtgaagctacattgtggagcttttctgcgtctttcaaggtgtcgtctttgactatgtgacatgtgactatctgatacttagactaagggagggcaccagtactatgtcgtatataaagaagagtgaagcttaaacttttaatcttacttagataaaatatatatatatatatatatatatatatatataagagctttattttcttcccgtattccattgaactaccttgcatacccactgggatgcgtgtaccccacttgagagaccactggtgtagatcagagataatgacagcttgggcttggattgtagtggtgcagatagaggagcattcactgagaaaaaaacattaagaaggaatcaaatctgggggcaaggtcatgcatttggtttgaacatgtctaacatgaggcatccaggtagaggcatccaagtaagagatgtcagatgggtctgagggtctgagttcagagagaggccaggcttaaaatttgtgggtgatctggtatgggtggtaaatgaagccatgtaagtatatgcagttgttttgggaggtaatacatgatgataggagaaggcagcccaggagaacgttgccttgaagcagtctaacatttaatacccaggtcagggaggccaaacctgaaatgcagataaagatgacacagccagaagtggaacatagataccaaaggaagggagtgtttcaggagggaaagggtgcttgaccttgtccatgttgctgggaaatcaagtagcatactataaataggcccactgttttgagcaatatggtaactgatgagtgagaatggcttcagggaagtatttggggaaagtttcttccattaagatagcagtatatttaagagaaaggggatatattcagttgaaaggaaaatgttgaagatgcaagaaagaaaacgtgtatgtaattggtgctgtaatgtttccaaacatgcaagaacagatgggattccaacaactaagaagactgtcactccctcactataccaagagcaaaagggagggagaagaggtgcaggtataagtaaattagtgtgatttgtaattgagagattgaggaaagttggtgattttttttcttctgtgaagtagaagacaagtcatttgcctagaaaggggaggggacgggaccatagaaggataggagagttgaggaagaggattgctataagccttagagacaataaggaagctggtcgacctcagaagtgagtgagtggcatttgggaatttgatattaaagcaaattctaatgcctgtgctagttaaaaatgttggacagaaaggttagtgttccttctatcttccttccttccaccccccaactctgatgttactgatgaaatatttctaacatgcaaaaaaggtaatttatgatactcatctcttccttttgcatttttttcctttgaagagaatgaacataggtctcagagtcttccttgtaatagcagacagtttgcagcagaaagatggtgaaccacccatgccaacaacaggagttattcttccctcaggaaatactcttcgtgtaaagaaaatatttctcaataaaaccttgacagatgaagaagcaaaagtcataggttagtttaattgaaattaaatgttgctttgtaatacagt

SEQ ID NO: 31943 - DNA, 2300 bp, Homo sapien
ttatatattttacattatatacatatattgcacattatatataatgcacattatatataatgtacatataattacgcatataatgtacatagaattacacattatatataatgtacatagaattatacattatatacatgtatgtgtatatatgtatgtatataatacattatatatagtatatataattatataattctgtatatataattttacattatatatgattatataatacagaatgtattacataatgtattatataattatacattagatataattttatatacttatacattatatgtatatatacattatataatatatacattatataatacattatacattatatataatgtatatataattatatatttgtttgggtctaaattggcttatttcctgaatttgttaacaactgtttgatgaaaagaggattgtattatgaaatcactttggaggataaattaatcagaaaaatttaactagtttctgtaaaactgggagtattttgcatgttgacatatattgttaatgtataagaatgggatgtattatagtatgtagtgtttctgggctgtgggatgcacttttttcattcagcatcttaaggcatgttttccattatatgaggagaaatcctggtgtctaaactaattacgagatgtctctaatcgcgatgtatccaaacaacagtattgtggtattatggttctgtgttggttagcctttgccttcctgatttgaatttactttttgggtcagtttaggagtagggatggccagatttcttggactgctctgagaaaaaatataccttcaaatgacccccaccccttccaaaaaataccactaccactgaatatctcttaatgaatttcccataatgtatgatagttgtttgtgaaaggatgttattttagcttatgatacagtgcctagccatttggctgtgaataaatttattcagttatgactttgatcactgcatttccttattctttgtgttacttaaagggtacaatgccatgtagatggattggtacaaatgtattgctacatatggaaaaaaataactctaaacacatgaccttcaaagtcacagtaaactaatatgaggccaagacatttttcttctgataatgacatattatttgttcattttggttgtgaattttttctactgttttgaagagcagttaggctttaacagcgtctgctttcagtgtagaacagcttctatagaagaaagttttacaaatgtgtagtattttgtttgaccagaggatttctcgctattcattgacattttgactataagattttcgtgggaattatgtgctatattaagaatagaagactgtattttcaactaatcccattattataatagagttatcgcttttgagtaagttgcacgcagcagaggaaagtttgtcctgagctgagcagttttagaggctgatgggggctcagccatagattcattacatcatcttttcattccattagccagcgtgatctccagtggggtaagtgagacagtggactctgcatcatcacaaacatgctgagaaaatcactgcttactgcctgggtgtgtagagaggtggagagaatttactactaaaataacctagaggaaactgatgttgaagtcagccaaatacctccagttttttttgtttttgtttttgttttttttttttttttgatcagctattaagggaaaagatttaaagattttatactaaatcctaatttatttattttttaaaaaatttctaaggctcttagtgagaaaagttggtacccaagggcagagcttcttacccttgtctgtttactagcagtcgtgattacatagctagagacactgctcctcaaaactggtaacagtaacataaacaaagaagataatcttggccatgtgtatatctgcataaagaaaggtgagggtgtccttctgggcacttataataaacttgtaagcttttattcaactggatagttcatctgcattcagcggcatttccactatagttgtgcgtcactgcaagactgcatggtaatgaagccaaggcactgtgggccaaaactctgctgcctgtgagaagagaagggacagcggcttggagagacagaacggcaaaaccgctgctgctgctgcttctgcttctgctgctgctgctgctgctgctgcttttgcagctgattgagacactatgttgagtctacaggattctgtgttttttgaaattagcataaagtccttgttaaagtcctggagcagc

SEQ ID NO: 31944 - DNA, 2300 bp, Homo sapien
taccaggaagttgcatgtgtgggctaaaaagtgataaatgatcctattgtgggcaaatatgaaatatttagagaaaagaataacacaaattatacttgaaaggtgataatctcagcatagttggttcaatgcaagtaagagaatctagaggttactgtagactgccttctctagtttatatgcccagtctgctagtgcagcaaaagagggcagtaacaagctggatatcatagggcaggtgttttagaaagaacctgaaaacatcacttagaccttgaacaaaagctgcaggtgtgtacatgcctgaaacactggatatctttatctccagaagatcatactagatatcagtacatagtatcttcttcttcttatattctaatgtagaatattagaacccagaagcagtctcagagtttgagagtggtaagtgagtaaaccagaagtattagtttagcttggctgcagttttattatacagtaaaatcagaataggctaagcatagggatttagttatagggacttaatagggaggatgtgtgtatctgtgaaggccatataaatgcaacccagatagttcatcgtctcttgcccccactagtgatacctaaaccaccttcctgcaacgttcccttttgtttcctgctctttcatattttcgggaatcctcatgaaatttttcacctgtatttggggaaaagtcctatgaactaccaactactgatgtttacttacccttctctgtcatcatcaagccccttttctagggtactgctgagcactgacacttccttggcaccattagattatactggggtatcactgcaaatgtactaaagcccccggggtacacagtcttcaaggttcatcggcaaagagggagagaacacataaccattttcccctaacattcttagatgggtaccgaagctgtacctgtactcaattttagtggaaataaaccttttagttcttacagctccagtgggaaactggggaaactctaaagcagaccccgcactaggcttccccataatttcttctcttttcaatgcgtgaggttctgctccatggtcaagcttctggtatcagattccctctttcccttagacagactcgttttctcctgagaggcatctcagttgttcaagtgacctggggtgtttttcctacagttctagcaagggggaacgaagtcctacactttgaggatggcataagggtaccatctacttaattttttcaaaaaagtaacaggtctcgtggaaacgcgggaacgtcacagaggacgtgacttaaacggaacttgtaatggaaatgattttctaaatgaacaattgcgagacaagcaaggaaacctccaggtttgcagataacttgattaaagctcttccgggtggcaaaatgccagtgcaatcaatggtatgagtagggcggacagtggatgaaacttgttgagtaaatctcaggaggaattagcactggactttcaggtattctaactcaattctaaccattccattctctggatcattggataaggttccgcaggatccgggcgccagctctggatacattactgatcgggagaaaattttgaatttttctcttgtccctttccagctttcctcaatataggatatgagtttgtcctcgacccctaacaacatttaaaggtaaagtcgctcctagaaggcaaagcggagaggactttgcggctgtgtttctcaagcccgtaaagagagagtaataatggtagggagcgtgcagactagctctttccttgcccaatcaagtgtacaggaagatgtcctttcaccaataaaaataaagttcgctttccggaggcgggagggtgagccttgactgccagggctccaaagcaacgttagaggcgagggcagagaatgattagagggaagaccaacccgggaaaaggggcggggagaaggtaggagcaactttgagcggcggctggccaggccagtggagggcgaggactgctgttcctgttgtagtgtttctcgccaatcaggaaggccagggggcgggcggggtagggaaggggtgggaagacctcgcagcacagccgggcgcccgtcgggctctgggagagagcgagagagaaatccggttaaaatcagagtcggagggaggtttaaccacagatcggttccgatcggattattccttaaaggggacgcgccattgtcaagagaacggagccaggggcccgagggcggggaccggcggcgctggaggagcgaggcagctgtactaggactgggaacgggtaggt

SEQ ID NO: 31945 - DNA, 2300 bp, Homo sapien
aagactttgctttaaagttggtgcagtggctcatgcctataaccccagcacttcgggaggccaaagtgggcagatcacttgaggccaggaattggagaccaggctggtaaagtagtgaaactctgtctcttctacaaataaaaaaattagctgggcgtggtggtgcacacctgtggtcccagctactcaggaggctgaggcacaagaattgcttgaatctgggaggcgaaggttgcagtgagccgagatggcaccactgtactacggtctagacaatagagcaaggccctgtcctaaaaaaaaaaacaacaaaaaactttgctttaacataaagctcaccacctagaatgtcttctaatttttttatttttgtttcttctagaatgtcttttaattttcttatttttgttttttctcctataaaaatgcattcaacaaattcatttaagaaatatttgttggcttcatatgatcatgtgccaatcactgatgctaggcaaatacggctcctactgtcatagacctttttagtgaagagagacaatacacaaacaaatcattgttttagaccataacaaatactatgaaaacaataagcaaggtaacatggagagtgactggggtgccatgttaattgggtggtcaaggaatgcctctctgatgtggtgacatcaactgaagtctcagacaaaaagccacgttgaacatctggaagaacagtggtctagaagagggaacagcaattgcacaagccctgggcccagaagtaaattagcttgtcccaggaacaaaatgagtattagttactaatactgattatctcagggatttatttggttctataaagacttacaagccaacatctctgtcctaaaggagctctgtaacagagacagacgtaagtaaaaaagatcactattcagtgcaaaagtacattgcagtgacagcagtatggacaagctaaggactaagaaggaagagtgattacttctctggggtgtatttcagggaaggcatcacaaaggtggtgatgtaaaagcagaattttgaaatatcgttagaattgacaaagcagggagtagagttgtactggggaaacagtgcacagagaacactgagggcaaagacctccaggctgtttcttgttagtgaaccctgaaatagaagaaagtgacgctcaaaaggcacaggcaccaccaggccatgatgggccttatattcggtgcatgactggagctatcaaaagactccaaggaaggaaacacagcgttggattcgtttcacgtgactgtctcccttaagtatgtcttcgggagaataaatgttaaatgataaagtggcaaaggggctcagaaagagatgagaaacctgagaggctttgaggggttgacaaatagtaggactggatttgcccactgtttagtcactaataacttgcagtacatggcactaataaatacttcaggaaggaatgtatgaaaatgagtaaaatgctgattggctgggtgtggcagcaccatgtctgatgtgtagaagtcgtgagccccctcattaatagacagtgatgtgttgttttaattctaacaaccctatatgtaattccacttttcaggtgagaaaaaccgtagcctcagagagatcacggtaccctgccagaggttgtagaacttgttggaaacttggatcaagagggtgtgacaaataaccaggtatgcatgcttaaaaattactttctactacttagcctacaggctcaaagaatgaaattatctcataaaagagataatttataaagtcgctctcaaaagagggacaacagagggttccggaacgttcccgccagccgccacgagaagaccagagaggtgcatcacaacagcccaaagtcaagcctactcccaacccccttccccgccatccagggaaggggcggggcagggttcttggtccgccgctgtcgcctgcgcagtcgcagtgcggctcgtggccgcagctgcctgaaagggcaaagggacgagtatacgcatgcgtctattcctaggctgctggctctcagacccgcagtgaggtctgacgtcatttcctgccgtaagtatacagtgcctccgggtcgcggtcattttgagcccctgtctggatgacttcttgcggctgttctacccctccccctccccgcggtaccttgcacttttctccctccctgccccctctcgagtccaccctccgggccttctgcccctgatcgcttggttttccttgcagtcgcctgctgctgtcgtcgggaggtgggtgaggtgacg

SEQ ID NO: 31946 - DNA, 2300 bp, Homo sapien
aagttatataaacgtagactttatttactttgccagataagatttttcctttatttcattatagaaatattaatgtgtttgcttactcattcctgtcctaaacctctgaatggatggatattaagtaatataaggggtatttactgtagtatttttctaaaacctcagaaactttgaatagtgaaacatacctgaccccaaggtttggataagggattatggacctttgtagagtatactctttaaattttaaaagattagagggaaagaagttaaagggaggggagggtatacagtggaaagggagaagttgattataggtcagagaaggttctagagaatgcagaagggggttctaggtaggtcagagtagccgctagccatatgtggctatttaaattaattaaagttaaatgaaatttaaaattcaatttctcaattgctttggtagcatttcacttgctcaatagtcacatgtgctagtggctaccgtgttagtgccaatatagaacattttcatcattgcagaaagttatgttggacagcactacttaagagcaaaagtcggggcaaaggggtgagtattagccttgtataaaggaagagacaggaaagaatggaagttcagatgattaaagaatttggatgaaagttattgagagcttcttaatcctcaactctgatttttttatttttttctttaatggttggaagcaaaggcatcaaattagtcagaaaaggaaggaagggaatgggcagattaggagagaatggctaaagtcactatcttatctccaaaggcagctgtccttgttcctcactatgtctcatttaaccagtctgaagttcaaatccattcttcttgtacagtagtccccccttatccatgggggataagttcgaagacccctgtggatgcctgaaacctcagatattaccaaatcctttatgttctatgtttttttgatctagatggctactaagttactaacaggcatgtagtgtagacagtgtggatatgctggacaaagggatgattcaagtcctggatggaccagagcagaacctcacaagattttatcacactactcagaacagggtgtaatttaaaatttatgaactgtttatttctggaatgttccatgtaatattttcagaccatggttgactgcaggtaactgaaaccctggaaagcgaaaccacagataagggggcactactgtattctagacatgcactaactctttccttgtgatgacttgcatcttccccaccatttgcattaggaaattctgttatatagtttttttccatacaaaagccaacaaacaaaaagccctttggtatctacccacagactacttagcaaggccatgtcttaatattattttatgccttccacagcagccatccatccatccactgctctgccttctgacccccttctctaaatcaaagtggctacttttttactgctctccacatgggccagcagtggcctgcttttgctttgccccagatgctatcctcccctaccagggcatcttattctttggtttaagtcctactttagttctgctttcttttaccaggaattcagagagttattaatcttttaaaatagcaagcactccttcagagctgttaggagacttagagtttattacagttagatttaaatcagtgccactttacatttttttattccttccagttctttataaccttcccaaaatagtaaatcatgttctctccatagtgtgggaaattctccccagtcttcttctgtctgatgtatattttcattatttgttccagaattttataatggtaaaatattttttataagaaaaagtattagacctggaaggaacttcagagatcatctgctcaaactaccatatttcgcaattgagaaaaccaggattcaaagaagcttagtgatttgcccaaggacatttcctaattgtcagcagagtggggttaagaacccaaggttcctgaagtacacacgatttccttcagaatttttaatataacatatatggtgaagggaaatgagttcagtaattacttattactaatgaaatgcaaagtgttttaatcccaatataaggttataatatttttctttacattctttttttagtaagaaaaatgtagttttgaaccatcatataatactagaactaattaggagaaatttaaatcctctttgctttatataagtatagtatatatttatttagcagaataaatgtttatggttgaaaatggctgggtgcagtggctcatgcctg

SEQ ID NO: 31947 - DNA, 2300 bp, Homo sapien
aaagaatggaagttcagatgattaaagaatttggatgaaagttattgagagcttcttaatcctcaactctgatttttttatttttttctttaatggttggaagcaaaggcatcaaattagtcagaaaaggaaggaagggaatgggcagattaggagagaatggctaaagtcactatcttatctccaaaggcagctgtccttgttcctcactatgtctcatttaaccagtctgaagttcaaatccattcttcttgtacagtagtccccccttatccatgggggataagttcgaagacccctgtggatgcctgaaacctcagatattaccaaatcctttatgttctatgtttttttgatctagatggctactaagttactaacaggcatgtagtgtagacagtgtggatatgctggacaaagggatgattcaagtcctggatggaccagagcagaacctcacaagattttatcacactactcagaacagggtgtaatttaaaatttatgaactgtttatttctggaatgttccatgtaatattttcagaccatggttgactgcaggtaactgaaaccctggaaagcgaaaccacagataagggggcactactgtattctagacatgcactaactctttccttgtgatgacttgcatcttccccaccatttgcattaggaaattctgttatatagtttttttccatacaaaagccaacaaacaaaaagccctttggtatctacccacagactacttagcaaggccatgtcttaatattattttatgccttccacagcagccatccatccatccactgctctgccttctgacccccttctctaaatcaaagtggctacttttttactgctctccacatgggccagcagtggcctgcttttgctttgccccagatgctatcctcccctaccagggcatcttattctttggtttaagtcctactttagttctgctttcttttaccaggaattcagagagttattaatcttttaaaatagcaagcactccttcagagctgttaggagacttagagtttattacagttagatttaaatcagtgccactttacatttttttattccttccagttctttataaccttcccaaaatagtaaatcatgttctctccatagtgtgggaaattctccccagtcttcttctgtctgatgtatattttcattatttgttccagaattttataatggtaaaatattttttataagaaaaagtattagacctggaaggaacttcagagatcatctgctcaaactaccatatttcgcaattgagaaaaccaggattcaaagaagcttagtgatttgcccaaggacatttcctaattgtcagcagagtggggttaagaacccaaggttcctgaagtacacacgatttccttcagaatttttaatataacatatatggtgaagggaaatgagttcagtaattacttattactaatgaaatgcaaagtgttttaatcccaatataaggttataatatttttctttacattctttttttagtaagaaaaatgtagttttgaaccatcatataatactagaactaattaggagaaatttaaatcctctttgctttatataagtatagtatatatttatttagcagaataaatgtttatggttgaaaatggctgggtgcagtggctcatgcctgtaatcccagcactttgggaggccgaggcgggtggatcacctgaggtcagagttcaagaccagcctgaccaatatggcgaaaccctgtctctactaaaaatgcaaaattagctgggcatagtggcacatgcctataatcccagctacttgggaggctcaggcaggacaatcactggaacctggcagggggaggtttcagtgagtcgagattgtgcccctgtgctccagcctgggtaacagagtgagactctgtctcaaaaaaaaaaaaaaaagtttatggttgaaaacattatttaatgtatagttatgttgcttagaaaattctgattattcactgggatcctacctttgagttctaaataagtatcacaaaaattattttttaaaaagttaatattaaaagtatatgcccaatttgtatgtcttattgaaaacatctttgaaaaacagtacttttggtgtggtatgtggtaggtaagactttgtaagttaagtagttgttcactgaatgttagcatcttttttttttaatgttcatatggccttttttgctgtttataaattgtataaactatgttcactatttgatcctgtcaaccaatattaggagta

SEQ ID NO: 31948 - DNA, 2300 bp, Homo sapien
aaaacaacagtatcttgacagtcattgaacctaggctcacttattcattcattcattcattcattcattcaacaaatatttattgagccccttctatatccaagatgctacacaatggtgaacaaaactgacaccatcttgttctgaacctcatgaagattactctgcagcagggaaaatatgctttatataaatgaacacactaataagtacataatgagttgtgataagtgctatgaaggaaaacaatagtgtcctgtgctatgaaaaagaagaaaggcctgccttaggctggggtcaaggaagattttcctgaggaacagtcaaaaagaaggagtaggaaaaagccaggacaggaccaatcgggagaggctgcaggcaggggagggcctccagtggaaaagagctgtgtgaatctgagaaacaacaagttggaggtgtggatcggggaggcgtgaggaggaagcggccacaggtacagggaccaattcgcacaataggaaaaggtgagaaatgaagagggccttcagtggagatccacagcctctctccaagtcaacacactcagtcagtcctggcagctcagcccagaaaactttgtcagccatggctggggtaactgtgtccagaggtgtttgaacaagagccactccatcttgaatagggactgagtaaaataaggctgaaacctactgggctgccttcccaggtggttcagcattcttagtcacaggatgagatagaaggttggcacaaggtacaggtcacaaagactttgctgatgaaacaggactcagtaaagaagccagccaagacccaccaaaatcaagatggtcatgaaagtgacctctggtcgtcctcattactcattaaatgctaattttaatgcattagcctgataaaagaccctcccaccagggccatgacagtttacaagtgccatggcaacgtcagaaagttaccctatatggtctaaaaagtgaaggaaccctcagttccgggaattgcccacccttttcctggaaaattcatgaataatccaccccttgtttagcatagaatcaagaaataactaccagtataattagctaagcagcccacacagctgctctgccagtggagtagccattcttttttgttgttgttcttcttgttttttgttttttttttgttttttttttttttgagacagagtctggctctgtcgcccaagctggagtgcagtggcgcaatctcggctcactgcaacctctgcctccggagttcaagcgattctcctgcctcagcctcccgagtagctgggattacaggcatagagcaccatgcctggctaacttttcgtatttttagtagagagagtgtttcaccatgttggccaggctggtctgaactcctgagctcaagtgatctgcctgcctttgcctcccaaagtgttgggattatgggcgtgagccaccgcacccggcctgttttctatacttccttaataaacttgctctcactctacggactcaccccgaattctttcttgcgagaagtccaagaaccctcgcttggggtctggatcgggacccctctccggtaacaagtgatatcggtattaaaggtacccccacatgtcaaaggcttccctccacaagtcagagttggggagggacaggaggcagcaggggaccgacaaagagcaatggaaagagaaggcctgggagccaagcaggcctggggttgactccaggctcccttagtggcctgcacaactcagatgacccgtctgtgaagtgcaggtcacagtgggcaccacacacggctgcagaaaggagtgcaaaggtgatgcccacgcctggcctagggcgggggcgcaatacatggctgttgcggctgtgattgctggaggaagggagtcatttggaaggcacaaaggaactagaacctactcggtgtcgggacaagcctcaaggatggggcaggggttccggcaagagctgggttccagcctgggttgccaccaacagcgaaagtgactgccaggtggcagtagggtgacttcaccagcttaagtgcttagcgggcaggcgagggggcggagcaagagaagaaaacacaaagggccggaaggaagccggggagacaggtggggtactcgggaagctggagcgggccggcggtgcagtcacgggggagcgaggcctgctgggcttggcaacgagggactcggcctcggaggcgacccagaccacacaggtgagcccccgccccggggagtgttgacggcgggagggggtggcctcgggggaacgcgg

SEQ ID NO: 31949 - DNA, 2300 bp, Homo sapien
atagactggttaaagcaaatgtggcacatatacactgtagaatactatgcagccatgaaaaagaatgagttcatgtccttttcagggatatgaatgaagctggaaaccatcattctcagcaaactaacacaagaactgaaaaccaaacacctcatgtttctcactcataagtgggagttgaacaatgagaacacatggccacaaggaggggaacatcacacacccgggcctgtcgcaggggggctgggggctaggggagagatagcattaagagaaatacctaatgtagatgacaggttgatgggtgcagcaaaccgccatggcatgtgtatacctatgtaacaaacctgcacgttctgcacttgtatcccagaacttcattgtgtacattgtcttttcactttcttgatggagtcttttgaagcaaaaagcttttaattttaatgaagtccaagttacctattatttcttttgttgcttgtgctttggcgttttatatataataggaatccattgcctaattcaagatcgtgaagatttactttgatgttttcttccaagagttttacagttttatttcttacatttaggtctttgatccatttcgagttcatatttgtatatggtgtgaaatatggatccaactttattcttttgcatacagatagtactcatagaatcatttttttgaaaagactcttccctgtggaattgtcttggcaagtttgtgaaactcatttgaccctaaaagggggtttttatctccagtctctcacttctattccattaatctatgtatctacccttgagattgagagagctagtaattaaccgattaagaactgtttacttggtcaggcgcggtggctcacgctggtaatcccagcactttgggcggccgaggagggcggatcatgaggtcaggagtttgagaccagcctggccaatatggtgaaaccccgtctttactaaaaatacaaaaattacctgggtgtggtggcacgtgcctgtagtcccagctgcgcgagaggctgaggcaggagaatcgcttgaacccaggaggcggaggttgcagtgagccgagattatgccaccgccctccagcctgggctacagagcaggactccgtctcaaacacaacaaaacagaaaaaaactctttgctcaatactcctatggacttaatagcaatgattgctgctaatgtgattctaatactttttgggcatgccatcattgtttaatttcagagcaaactttctggaactgataaataataagctctccttaagaaattaaagtgcattaaaataaattgctttcaggggttcttaaacaagttcaagacatccaggagtgtgatacatttgagcgagaaatagctggcctagttcactctccacattaatcagaacgtctcccaccttctttttagggataagcactctcaaatatcattattcataaactaggggagggccgggtttccactcgcatcagttactttctctcccctgagaatatcttgcagccgctggaattttgggcccctttgctaggaggcaattaacaaattgcacttttactatcaaagctgagagtggcccagcagtggccctggccctgccggcacgcttccgatgcgtcgccctggcctgaagatcgccacagtcgggttcgcgccccgtggtcccctaaggcttccagggcgctggagctggtgcacaggacctgctcctccagggtccccatctgggtctccagcggtccttcctctctgccttctcctcgcagagcaccccgtgggcctagtctaaacgagggcaccactggtccggagttgcacttgttcgctccctcctgggctctggcagcgctgcatccccggggttgcttcgggttcgggcccaatagcagagtcagagccgagacgcatgtcccctgcaccggccaagggtgccgctggggctcgcgccaaggaggcaaaggcggggaccagaggcgccggaggcggcgcaacgcgcacaggtggcgcccggcctggccaggctctggcaggcgaggctgggtgtggtcgtgaaggggcgggcggaccggccccacactgcctcggttcggcaagtgggtcagttggctggggctcacttggcaacgggacgcgggaacgaggggcgcggacgcaggcccgggaggacgcggcggcgggaacctgggggcgcagggctagggcagcgggcccgacccgcacggctttcctggaaagcgctgcccctcgccgcggcgatgccctcgctgtggaga

SEQ ID NO: 31950 - DNA, 2300 bp, Homo sapien
agggtatggaatagaatggaatggaatagaatggaaaggaatggaatcaactcgagtgcaatgcaatggaatgaaatggaatggaatggaatggaacggaacagaacagaacggaattgaatagaatggaatcaaactgagtggaaaggaatggaatggaatggaatggaatggaatggaatggaataacatgcaatcaacttttgtggaatggtatggaatggaatggaatggaatggaatggaatggaatggaataaaaggacatggaatggaacagaatcaacctgaatggaatggaacggaatggagtggaattgtatggaatggaatggaatggaaaggaatcaacccgaagtgtatggaatggaatggaatggaatggaatggaatggaatcaaaccgagtggaatgcaatggaatgaaatggaatggaatggaatggaatggaatggaatggaatggaatggaatggaacggaatggaacggaacagaattgaatggaatggaatcaacccaagtggaaaggaatggaatggaatggaatggaatggaatggaatggaatggaatggaatggtatggaatggaatagcatgcaatcaactttggtggaatgttatggaatggaatggaatggaatggaatggaatggaatggaatggaatggaatggaatggaataaaggggcatggaatggaatggaatcaacccgagaggaatgaaatggaatggaatggaatggaatggaatggaatggcaatgaataaaatcgagtggaatgaaatggaatggaatggaatggaatggaatggaatggaatggattggaatggaatggaaacaacgcaatgcaatggtatcaactggaatggaatgcattggaatggaatggaatggaatcaccctgagtggaaaggaatagaatggaatggaacggaaaggaatggaatggaatggaaactaatggaaaggaatggaaacaaccaagtggaatggaatgcaatggaatggaatgcaatggaatggaatggaatggaatacaacaaaatggaaacaatccgagtggaatggcatggaatggaaagcacttgaatatagtggaatggattagaatcaaccagattagaaactaatggaatggaatggaatggaatggaatctacccgagtggaatggaatggaatggaatttaatggaatggaatggaatgcaatggaacgaaatggaatggaatctacccgagtggaatggaatggaatggaatttaatggaatggaatggaatgcaatggaacgaaatggaatggaatctacccgagtggaatggaatggaatggaatttaatggagtggaaaggaataggatggtatggaatcaacctgagtggaatggtaaagaatggaatgtaatggaacggaatggattggaataaaatggaatcgaatggaatggaaaaaacccgagtgggaaggaatgcaatggaatggaataaccggagaggaatggaatggaatggagtggaatcgaatggaattgaatggaatggaatggaatggaatagaatgaaatggaaaggaatggaacggaaacaacacgagtggaatggaatggaaagcaatagaatggcatggaaacaatgcaatgcaatggtatcaactggaatggaatgcattggaatggaatggaatggaatcgccctgagtggaaaggaatggaatagaatggaatggaaaggaatggaatggaatggaaactaatggaacggaatggaaacaacccgagtggaatggaatgcaatggattggaatggaatggaatggaatggaatacaacaaaatggaaacaacccgagtggaatggcatggaatcgaaaggacttgaatagaatggaatggattggaatcaacccgattagaaactaatggaatggaatggaatggaatctacccgagtggaatggaatggaatggattttaatggaatggaatgggatggaatggaatggaatggaatggaatggaatggaatggaacggaacggaatagaatggaatgcaatggaatggaatctacccgagtggaatggaatggaatggaatttaatggaatggaatggaatagaatggtatgaaatcaacccgagtggaatggtatagaatggaatgtaatggaacggaatggaatggaataaaatggaatggaatggaatggaaacaactcgagaggaatgcaatggaatggaataaaagggcatggaatggaatcaccctgagtggaaaggaatggaatggaatggaatgg

SEQ ID NO: 31951 - DNA, 2300 bp, Homo sapien
acatgcaatcaactttggtggaatggtatggaatggaatggaatggaatggaatagaatggaataaaagggcatggaaagaaccaaatcaacccgaatggaatggaacggaatggtatggaatggaatggaatggaaaggaattaacccgaagggaatggaatggaatggaatggaaaggaatggaatggaattaaccctagtggaatgcaatggaatgaaatgtaatgaaatggaatggaatggaacgggacagaacggaacggaattgaatggaatggaatcaacccaagtggaaaggaatggaattgaatggaatggaacggaatggaatggaatagcatgcaatcaactttggtggaatggtatggaatggaatggaatggaatgcaatggaatggaaatgaatcaaaccgagtggaaaggaatggaattgaatgaaatggaatggaatggaatggaacggaatggaaacaatgcaattcaatggtatcaactggaatggaatggaattgaatggaatggaatggaatggaatggaacggaatggaaacaatgcaattcaatggtatcaactggaatggaatgcattggaatggaatggaatggaatcaacacgagtggaatggaatggaatggaatggaatggaatggaatggaatggaatggtatggaatcaaccctagtggaatggtatgcaatggaatggaacggaacggaatggaatgcaatcaacccaaatggaatggaatagaatggagtggaatggtatggaatggaatagaatggaaaggaatcaacctgaagggtatggaatggaacggaatggaatggaacggaatggaatggaatggaatggaatggaatggaatggaataaaagggcatggaatggaacggaatcaacccgaatggaatggagcggaatggagtggaatgatatttaatggaatggaaaggaatcaacccgaagggtatggaatagaatggaatggaatagaatggaaaggaatggaatcaactcgagtgcaatgcaatggaatgaaatggaatggaatggaatggaacggaacagaacagaacggaattgaatagaatggaatcaaactgagtggaaaggaatggaatggaatggaatggaatggaatggaatggaataacatgcaatcaacttttgtggaatggtatggaatggaatggaatggaatggaatggaatggaatggaataaaaggacatggaatggaacagaatcaacctgaatggaatggaacggaatggagtggaattgtatggaatggaatggaatggaaaggaatcaacccgaagtgtatggaatggaatggaatggaatggaatggaatggaatcaaaccgagtggaatgcaatggaatgaaatggaatggaatggaatggaatggaatggaatggaatggaatggaatggaacggaatggaacggaacagaattgaatggaatggaatcaacccaagtggaaaggaatggaatggaatggaatggaatggaatggaatggaatggaatggaatggtatggaatggaatagcatgcaatcaactttggtggaatgttatggaatggaatggaatggaatggaatggaatggaatggaatggaatggaatggaatggaataaaggggcatggaatggaatggaatcaacccgagaggaatgaaatggaatggaatggaatggaatggaatggaatggcaatgaataaaatcgagtggaatgaaatggaatggaatggaatggaatggaatggaatggaatggattggaatggaatggaaacaacgcaatgcaatggtatcaactggaatggaatgcattggaatggaatggaatggaatcaccctgagtggaaaggaatagaatggaatggaacggaaaggaatggaatggaatggaaactaatggaaaggaatggaaacaaccaagtggaatggaatgcaatggaatggaatgcaatggaatggaatggaatggaatacaacaaaatggaaacaatccgagtggaatggcatggaatggaaagcacttgaatatagtggaatggattagaatcaaccagattagaaactaatggaatggaatggaatggaatggaatctacccgagtggaatggaatggaatggaatttaatggaatggaatggaatgcaatggaacgaaatggaatggaatctacccgagtggaatggaatggaatggaatttaatggaatggaatggaatgcaatggaacgaaatggaatggaatctacccgagtggaatggaatg

SEQ ID NO: 31952 - DNA, 2300 bp, Homo sapien
tggaatggaatggaatggaatggaaaggaatcaactcgaagggaatggaatggaatggaatggaatggaatggaatggaatggaatggaatggaatggaatcatcccgagtggaatgcaatggaatgaaatggaatggaatggaacggaacagaaaggaacggaacggaattgaatggaatggaatgaacccgagtggaaaggaatggaatggaatggaatggaatggaatggaatggaatggaatggaacaacatgcaatcaactttggtggaatggtatggaatggaatggaatggaatggaatagaatggaataaaagggcatggaaagaaccaaatcaacccgaatggaatggaacggaatggtatggaatggaatggaatggaaaggaattaacccgaagggaatggaatggaatggaatggaaaggaatggaatggaattaaccctagtggaatgcaatggaatgaaatgtaatgaaatggaatggaatggaacgggacagaacggaacggaattgaatggaatggaatcaacccaagtggaaaggaatggaattgaatggaatggaacggaatggaatggaatagcatgcaatcaactttggtggaatggtatggaatggaatggaatggaatgcaatggaatggaaatgaatcaaaccgagtggaaaggaatggaattgaatgaaatggaatggaatggaatggaacggaatggaaacaatgcaattcaatggtatcaactggaatggaatggaattgaatggaatggaatggaatggaatggaacggaatggaaacaatgcaattcaatggtatcaactggaatggaatgcattggaatggaatggaatggaatcaacacgagtggaatggaatggaatggaatggaatggaatggaatggaatggaatggtatggaatcaaccctagtggaatggtatgcaatggaatggaacggaacggaatggaatgcaatcaacccaaatggaatggaatagaatggagtggaatggtatggaatggaatagaatggaaaggaatcaacctgaagggtatggaatggaacggaatggaatggaacggaatggaatggaatggaatggaatggaatggaatggaataaaagggcatggaatggaacggaatcaacccgaatggaatggagcggaatggagtggaatgatatttaatggaatggaaaggaatcaacccgaagggtatggaatagaatggaatggaatagaatggaaaggaatggaatcaactcgagtgcaatgcaatggaatgaaatggaatggaatggaatggaacggaacagaacagaacggaattgaatagaatggaatcaaactgagtggaaaggaatggaatggaatggaatggaatggaatggaatggaataacatgcaatcaacttttgtggaatggtatggaatggaatggaatggaatggaatggaatggaatggaataaaaggacatggaatggaacagaatcaacctgaatggaatggaacggaatggagtggaattgtatggaatggaatggaatggaaaggaatcaacccgaagtgtatggaatggaatggaatggaatggaatggaatggaatcaaaccgagtggaatgcaatggaatgaaatggaatggaatggaatggaatggaatggaatggaatggaatggaatggaacggaatggaacggaacagaattgaatggaatggaatcaacccaagtggaaaggaatggaatggaatggaatggaatggaatggaatggaatggaatggaatggtatggaatggaatagcatgcaatcaactttggtggaatgttatggaatggaatggaatggaatggaatggaatggaatggaatggaatggaatggaatggaataaaggggcatggaatggaatggaatcaacccgagaggaatgaaatggaatggaatggaatggaatggaatggaatggcaatgaataaaatcgagtggaatgaaatggaatggaatggaatggaatggaatggaatggaatggattggaatggaatggaaacaacgcaatgcaatggtatcaactggaatggaatgcattggaatggaatggaatggaatcaccctgagtggaaaggaatagaatggaatggaacggaaaggaatggaatggaatggaaactaatggaaaggaatggaaacaaccaagtggaatggaatgcaatggaatggaatgcaatggaatggaatggaatggaatacaacaaaatggaaacaatccgagtggaatggcatggaa

SEQ ID NO: 31953 - DNA, 2300 bp, Homo sapien
gaatcaacacaaatggaatggaatggaaaggaatagaatggaaaggaatggaatgcaatggaatggaaagaaatggaataaacccgaatggaatggaatggaatggagtggaatggaataaacaccagtggaatgaaatcgaatggaatgaaatggaatggaatggaatcaacccgagtagaatgtaacagaatggaatggaatggaatggaatggaaaggaatggaatcaactggaatggaatgaaatggaatggaatggagtggaatggaatggaatgcaatggaatcaacacgaatggaatgcaatggaatggattggaatggaatggaatggaatggaacggaacggaatggaatggaatgaacccgaatgcaatggaacggaatgcaatggattggaatggaatggaatggaatcaaccagagtgcaatgaaatgtaatggaatggagtggaatggaatggaattgaatggaatggaatcaacccgaatggaatggaatggaatggaatggaatggaatggaatggaatggaatggaatggaatgcatttgaatggaatggaacgcaatggaatcaactggaatggaatgaaatggaatggaatggaaaggaactgaatcaacctgaatggaatggaatggaatggaatggaatggaatggaatggaatggaatcaactggaatggaatggaatagaatggaatcaacccgagtggattggaaaaaatggaatggaatggaatggaatcaagccgagtggaacggaatggaatggaatggaaaggaatggaatggaatggaatcaacccgagtggaaaggaatggaatggaatggaatggaatggaatggaatggaacggaatggaatggaatggaatggaatgcaatggaatcaactggaatggaatggaatggaatggaatggaatggaatggaatggaatggaacggaatcaacctgagtcaaatggaatggaatggcatggaatggaatggaatggaatggaatggaatagaatagaatggaaaggtatggaatgcaatggaatggaattgaatggaatggaacggaacggaacggaatggaatggaatggaatggaccccaatggaattgaatggaatggaatggattggaatggaatggaacggaattaacctgagtggaatggaatgtaatggaatggagtggaatggaatggaatggaatggagtggaatggaatggaatggaatggagtggaatggaatggaatggaatggaatggaaaggaatcaactcgaagggaatggaatggaatggaatggaatggaatggaatggaatggaatggaatggaatggaatcatcccgagtggaatgcaatggaatgaaatggaatggaatggaacggaacagaaaggaacggaacggaattgaatggaatggaatgaacccgagtggaaaggaatggaatggaatggaatggaatggaatggaatggaatggaatggaacaacatgcaatcaactttggtggaatggtatggaatggaatggaatggaatggaatagaatggaataaaagggcatggaaagaaccaaatcaacccgaatggaatggaacggaatggtatggaatggaatggaatggaaaggaattaacccgaagggaatggaatggaatggaatggaaaggaatggaatggaattaaccctagtggaatgcaatggaatgaaatgtaatgaaatggaatggaatggaacgggacagaacggaacggaattgaatggaatggaatcaacccaagtggaaaggaatggaattgaatggaatggaacggaatggaatggaatagcatgcaatcaactttggtggaatggtatggaatggaatggaatggaatgcaatggaatggaaatgaatcaaaccgagtggaaaggaatggaattgaatgaaatggaatggaatggaatggaacggaatggaaacaatgcaattcaatggtatcaactggaatggaatggaattgaatggaatggaatggaatggaatggaacggaatggaaacaatgcaattcaatggtatcaactggaatggaatgcattggaatggaatggaatggaatcaacacgagtggaatggaatggaatggaatggaatggaatggaatggaatggaatggtatggaatcaaccctagtggaatggtatgcaatggaatggaacggaacggaatggaatgcaatcaacccaaatggaatggaatagaatggagtggaatggtatggaatggaatagaatggaaaggaatcaacc

SEQ ID NO: 31954 - DNA, 2300 bp, Homo sapien
tggaatggaatggaatggaatggaatggaatggaatctacccaagtggaatggaatggaatggaatttaatggaatagaatggaacggaatggaatggaacagaatggtatggaatcaacccgagtggaatggtatagaatgtaatgtaatggaacggaacggaataaaatggaatggaatggaatggaaacaacccgagtggaatggaatggaatggaatggaataaccggagaggaatggaatggaatggagtggaatggaatggaatagaatggaatggaatggaatggattagaatgaaatggaaaggaatggaatggaaacaaaccgagtggaatggaatggaatggaatggaatggaatggaatggaatggaatggaatcaacccgagtggaatggaatggaacggaatataatggaatggaatggaatcatcccgagtggaatggaatggtatggaaagcaatagaatggaatggaacagaacggaatgaaatggaatggaatagattgaatgcgagtggaattgaatggaatggaatggattggaatggaatggaatggattggagtggaatggaatggaatcaacacgaatggaatggaacggaaaggaatggaatggaaaggaacggaatggaatcaacccgagtggaatggaatggaatggaacagaattgaatccaatggaatcaactggaatggaatggaatagaatcaatctcggttgaattgaatgtaatgtaatggagtggaatggaatggaaagaagtggaatggaatggaatggaatggaatggaatggaatggaatagaatggaatggaatggtatagaatcaacccgaatggaatggaacggaatggaatggaatggaaaggaagagaatagaatggaatcaacccgaatgggatggaatggaatggaatggaatggaatggaatggaatggaatggaatggaatggaatcaaccggagtggagtggaacggaatggattggaatggaatggaatggaatggaatggaatggaatgaaatggaaaggaacggaatggaatcaaaccgagtggaatggaatggaatggaatggaatggaatggaatggaatggaatggaatggaatccacctgagtggaatggaattgaacagaatataatggaattgaaaggaatcatcccgagtggaatggaatggtatctaatgcaatggactgcaatggaacagaacggaatggaatggaaagaatagattgaatccaggtggaattgaatggaatggaatggattggaaaggaatggaatggattggaatggaaaggaatggattcaacccgagtggaatgtaatggattggaatggagtggaatggaatggaatggaatcaacacgaaaggaatggaacggaacggaatggaatggaatggaatggtatggattggaatggcatcaacacgaatggaatggaacggaatggaatagaatggaatgaaatggaatggaatggaatggaatgcaatggaatggaatgcaatggaaaggaatggaatggaatcaacccaagtggaatggaatggaatggaatggaatggaatggaatggaatggaagggaatcaacacgagtggaatggaatggaatggaatgcaatagaatggaatggaatggaatggaatgggatggaatggaatggaatcaacacaaatggaatggaatggaaaggaatagaatggaaaggaatggaatgcaatggaatggaaagaaatggaataaacccgaatggaatggaatggaatggagtggaatggaataaacaccagtggaatgaaatcgaatggaatgaaatggaatggaatggaatcaacccgagtagaatgtaacagaatggaatggaatggaatggaatggaaaggaatggaatcaactggaatggaatgaaatggaatggaatggagtggaatggaatggaatgcaatggaatcaacacgaatggaatgcaatggaatggattggaatggaatggaatggaatggaacggaacggaatggaatggaatgaacccgaatgcaatggaacggaatgcaatggattggaatggaatggaatggaatcaaccagagtgcaatgaaatgtaatggaatggagtggaatggaatggaattgaatggaatggaatcaacccgaatggaatggaatggaatggaatggaatggaatggaatggaatggaatggaatggaatgcatttgaatggaatggaacgcaatggaatcaactggaatggaatgaaatggaatggaatg

SEQ ID NO: 31955 - DNA, 2300 bp, Homo sapien
gaatggaaactaatggaacggaatggaaacaaccagagtggaatggaatgcaatggaatggaatggaatggaatggaatggaatggaatggaatggaatggaatggaatggaatacaacaaaatggaaacaacccgagtggaatggcatggaatggaaaggacttgaatatcatggaatggattggaatcacccgattagaaactaatagaatggaatggaatggaatggaatggaatggaatggaatggaatggaatggaatacaacaaaatggaaacaacccgagtggaatggcatggaatggaaaggacttgaatataatggaatggattggaatcacccgattagaaactaatggaatggaatggaatggaatggaatggaatggaatggaatggaatggaataaacctgagtggaatgcaatggaaagaaatggaatggaacagaatggaatggaatggaatggaacggaacggaacggaatggaattgaatggaatggaatcaacccaagtggaatggaatggaatggaatggaatggagtggaatggaatggaatggaatagaatggaatggaatagcatgcaatcaactttgtaggaatggtatggaatggaatggaatggaatggaatggaatggaatggaatggaatggaataaaagggcatggaatggaatggaatcaacccgagacgaatggaatggaatggaatggaatggaatggaattgaatggaatggaaatgaatcaaaccgagtggaatgtaatggaatggaatagaaaggaatggaatggaaacaatgcaatgcaatggtatcagctggaatggaatgcattggaatggaaaggaattgaatcaccctgagtggaaaggaatggtatggaatggaatggaataacatgcaatcaactttggtggaatggtatggaatggaatggaatggaatggaatggaatggaatggaatggaatggaatggaacagaatggtatggaatcaacccgagtggaatggtatagaatgtaatgtaatggaatggaacggaataaaatggaatggaatggaatggaaacaacccgagtggaatggaatggaatggaatggaataaccggagaggaatggaatggaatggagtggaatggaatggaatagaatggaatggaatggaatggattagaatgaaatggaaaggaatggaatggaaacaaaccgagtggaatggaatggtatggaatggaatggaataatatgcaatcaactttggtggaatggtatggaatggaatggaatggaatggaatggaatggaatggaatgaaagggcatggaatggaatggaatcaaccagaatggaatggagcggaatggagtggaatgatatggaatgacatggaatggaagggaatcaacccgaagggtatggaatggaatggaatggaatggaacggaacggaacggaattgaatggaatggaatcaacccgagtggaaaaggaatggaagggaatggaatggaatggaatagaatggaatggaataacatgcaatcaactttggtggaatggtatggaatggaatggaacggaatggaatggaatggaatggaataaaagtgcaaggaatggaacggaatcaacccgaatagaatagaagggaatggagtggtatggtatggaatggaatggaatggaaaggaatcaactcgaagggaatggaatggaatggaatggaatggaatggaatggaatggaatcatcccgagtggaatgcaatggaatgaaatggaatggaatggaacggaacagagaggaacggaacggaattgaattgaatggaatgaacccgagtggaaaggaatggaatggaatggaatggaatggaatggaatggaatggaatggaatggaatggagtggaatggaataacatgcagtcaactttggtggaatggtatggaatggaatggaatggaatggaataaaagggcatggaatggaacagagtcaacccgaatggaatggaacagaatggagtggaatggtatggaatgtaatgaaatggaaaggaatcaacccgaagggtatggaatggaatggaatgcaatggaatggaatggaatggaatggaatggaatggaatggaatggaatggaatggaaaggaatggaatcaacccgagtggaatacaatggaatgaaatggaatggaatggaaaggaatggaacggaattgaaaggaatggaatcaacccgagtggaatggaatggaatggaatggaatggaatggaatggaatggaa

SEQ ID NO: 31956 - DNA, 2300 bp, Homo sapien
aaacaacccgagtggaatggcatggaatggaaaggacttgaatataatggaatggattggaatcacccgattagaaactaatggaatggaatggaatggaatggaatggaatggaatggaatggaatggaatggaatctacccaagtggaatggaatggaatggaatttaatggaatggaatggaacggaatggaatggaatggaatggaatggaatggaatggaatggaacagaatggtatggaatcaacccgagtggaatggtatagaatgtaatgtaatggaatggaacggaataaaatggaatggaatggaatggaaacaacccgagtggaatggaatggaatggaatggaataaccggagaggaatggaatggaatggagtggaatggaatggaatagaatggaatggaatggaatggattagaatgaaatggaaaggaatggaatggaaacaaaccgagtggaatggaatggtatggaatggaatggaataatatgcaatcaactttggtggaatggtatggaatggaatggaatggaatggaatggaatggaatggaatggaatgaaagggcatggaatggaatggaatcaaccagaatggaatggagcggaatggagtggaatgatatggaatgacatggaatggaagggaatcaacccgaagggtatggaatggaatggaatggaatggaacggaacggaacggaattgaatggaatggaatcaacccgagtggaaaaggaatggaagggaatggaatggaatggaatagaatggaatggaataacatgcaatcaactttggtggaatggtatggaatggaatggaacggaatggaatggaatggaatggaataaaagtgcaaggaatggaacggaatcaacccgaatagaatagaagggaatggagtggtatggtatggaatggaatggaatggaaaggaatcaactcgaagggaatggaatggaatggaatggaatggaatggaatggaatggaatggaatggaatcatcccgagtggaatgcaatggaatgaaatggaatggaatggaacggaacagagaggaacggaacggaattgaattgaatggaatgaacccgagtggaaaggaatggaatggaatggaatggaatggaatggaatggaatgcagtggaatggaataacatgcagtcaactttggtggaatggtatggaatggaatggaatggaatggaataaaagggcatggaatggaacagagtcaacccgaatggaatggaacagaatggagtggaatggtatggaatgtaatgaaatggaaaggaatcaacccgaagggtatggaatggaatggaatgcaatggaatggaatggaatggaatggaatggaatggaatggaatggaatggaatggaaaggaatggaatcaacccgagtggaatacaatggaatgaaatggaatggaatggaaaggaatggaacggaattgaaaggaatggaatcaacccgagtggaatggaatggaatggaatggaatggaatggaatggaatggaatggaatggaatggaataacatgcaatcaactttggtagaatggtatggaatggaatggaatggaatggaatggaatggaatggaattgaatagaatggaataaaagggcatggaatggaaccaaatcaacccgaatggaatggaacggaatggagtggattggtatggaatggaatggaatggaaaggaatcaatccgaagggaatgaaatggaatggaatggaatggaatggaatggaatggaatggaatggaatggaatggaatcaacccgagtggaatgcaatggaatgaaatgtaatgaaatggaatggcacggaacgggacagaacggaacggaattgaatggaatggaatcaacccaagtggaaaggaatggaacggaatggaatggaatagcatgcaatcaaatttggtggaatggtatggaatggaatggaatggaatggaatggaatggaatggaatggaatggaaatgaatcaaatcaagtggaatggaatggaatggaatttaatggaatggaatggaaacaatgcaattcaatggtatcaactggaatggaatgcattggaatggaatggaatggaatcaacccgagtcgaatggaatggaatggaatgcaatgaaatggaatggtatggaatcaaccctagtggaatggtatggaatggaatggaacggaacggaatggaatgtaatcaacccgaatggaatggaatggagtggaatggtatggaatagaatggaatggaa

SEQ ID NO: 31957 - DNA, 2300 bp, Homo sapien
gaatggaatggaatggaatggaatggaatggaataaaagggcatggaatggaatggaatcaacacgagaggaatggaaaggaatggaatggaaatgaatcaaaccgagtggaatggaatggaatggaatggaatggaatggaatggaaacaatgcaatgcaatggtatcaactggaatggaatgaattagaatggaaaggaaaggaatcaccatgagtggaatggaatggaaaggaatggaatggaaactaatggaacggaatggaaacaacccgagtggaatggaatgaaatggaatggaatggaatgggatggaatggaatggaatacaacaaaatggaaacaaaccgagtggaatggcatggaatggaaaggatttgaatataatggaatggattggaatcaacccgattagaaactaatggaatggaatggaatggaatggaatggaatggaatggaatggaatggaatctacccgagtggaatggaatggaatggaatttactggaatggaatggaatagaatggtatggaatcaacccgagtggaatggtatagaatggaatgtaatgaaacggaatggaatggaataaaatggaatggaatggaatggaaacaacccgagtggaatggaatggaataaccggagaggaatggaatggaatggagtggaatggaatggaatggaatggaatggaatggaatggaatggaatcaacccgagtggaatggaatggaatggaatagaatggaatggaatggaatggaatggaatggaatcaacccgagtggaatggaatggaatggaatgcaatggaatggaatggcatggaatcaaccctagtggaatggtatggaatggaatggaacggaccggaatggaatggaatcaacccgaatggaatggaatggaatggagtggaatggtatggaatggaatggaatggaaaggaatcaacgtgaagggaatggaatggaatggaatggaatggaatggaatggaatggaatggaatgaaatcaacccgagtggaatgcaatggaatgaaatggaatggaatggaatggaatggaacggaacagaatggaatggaatggaatcaacccgagtggaaaggaatggaatggaatagaattgaatgaaatggaatggaatggaatggaataacatgcaatcaactttggtggaatggtatggaatggaatggaatagaatggaatggaatggaataaagggggatggaatagaacggaatcaacccgaatagaatggagcggaatggagtggaatgatatggaatggaatggaatggaaaggaatggaatcaacccgagtggaatgcaatggaatgaaatggaagggaatggaacggaacggaacggaatggaattgaatggaatggaaacaacccgagtggaaaggaatggaatggaatggaatggaatggaatggaatggaatggaatggaatggaatggaatggaatggaaaggaatggaatggaatggaatggaacatgcaatcaactttggtggaatggtatggaatggaatggattggaatggaataaaagggcatggaatggaacggaatcaaacagaatggaatggagcggaatggagtggaatggtatggaatggaatggaatggaaaggaatcaaaccgaagggtatggaatggaattgaatggaatgcaaaggaatggaatcaaccctagtggaatgcaatggaatgaaacgcaatggaatggaacggaaagaaacggaacggaatggaacggaattgaatggagtggaatcaacccgagtggaaaggaatggaatggaatggaatggaataacatgcaatcaactttttggaatggtatggaatggaatggaatggaataaaagggcatggaatggaacagaatcaacccgaatggaatggaacggaatgaagtggaatggtatagaatggaatggaatggaaaggaatcaacccgaagggtatggaatggaatggaatggaatggaatggaatggaatggaatggaacggaatggaatcaaccccagtggaatgcaatggaatggaatggaatggaacggaacggaacggaatggaacggaattgaatggaatggaatcaacccaagaggaaaggaacggaatggaatggaatggaatggaatggaatggaatggaatggaatagcatgcaatcaactttggtggaaagatatggaatggaatggaatggaatggaatggaatggaatggaatggaatggaatcaaccccagtggaatgcaatggaatgg

SEQ ID NO: 31958 - DNA, 2300 bp, Homo sapien
tggaataacatgcaatcaactttggtggaatggtatggaatggaatggaatagaatggaatggaatggaataaagggggatggaatagaacggaatcaacccgaatagaatggagcggaatggagtggaatgatatggaatggaatggaatggaaaggaatggaatcaacccgagtggaatgcaatggaatgaaatggaagggaatggaacggaacggaacggaacggaatggaattgaatggaatggaaacaacccgagtggaaaggaatggaatggaatggaatggaatggaatggaatggaatggaatggaatggaatggaatggaaaggaatggaatggaatggaatggaacatgcaatcaactttggtggaatggtatggaatggaatggattggaatggaataaaagggcatggaatggaacggaatcaaacagaatggaatggagcggaatggagtggaatggtatggaatggaatggaatgcaaacgaatcaaaccgaagggtatggaatggaattgaatggaatgcaaaggaatggaatcaaccctagtggaatgcaatggaatgaaacgcaatggaatggaacggaaaggaacggaacggaatggaacggaattgaatggagtggaatcaacccgagcggaaaggaatggaatggaatggaatggaataacatgcaatcaactttttggaatggtatggaatggaatggaatggaataaaagggcatggaatggaacagaatcaacccgaatggaatggaacggaatgaagtggaatggtatagaatggaatggaatggaaaggaatcaacccgaagggaatggaatggaatggaatggaatggaatggaatggaatggaatggaatggaatggaatcaaccccagtggaatgcaatggaatggaatggaatggaacggaacggaacggaatggaacggaattgaatggaatggaatcaacccaagaggaaaggaacggaatggaatggaatggaatggaatggaatggaatggaatggaatggaatggaatagcatgcaatcaactttggtggaaaggtatggaatggaatggaatggaatggaatggaatggaatggaatggaatggaatggaatggaatcaaccccagtggaatgcaatggaatggaatggaatggaatggaacggaacggaacggaacggaacggaacggaatggaatggaatggaatggaatagcatgcaatcaactttggtggaaaggtatggaatggaatggaatggaatggaatggaatggaatggaatggaatggaatggaataaaagggcatggaatggaatggaatcaacacgagaggaatggaaaggaatggaatggaaatgaatcaaaccgagtggaatggaatggaatggaatggaatggaatggaatggaaacaatgcaatgcaatggtatcaactggaatggaatgaattagaatggaaaggaaaggaatcaccatgagtggaatggaatggaaaggaatggaatggaaactaatggaacggaatggaaacaacccgagtggaatggaatgaaatggaatggaatggaatgggatggaatggaatggaatacaacaaaatggaaacaaaccgagtggaatggcatggaatggaaaggatttgaatataatggaatggattggaatcaacccgattagaaactaatggaatggaatggaatggaatggaatggaatggaatggaatggaatggaatctacccgagtggaatggaatggaatggaatttactggaatggaatggaatagaatggtatggaatcaacccgagtggaatggtatagaatggaatgtaatgaaacggaatggaatggaataaaatggaatggaatggaatggaaacaacccgagtggaatggaatggaataaccggagaggaatggaatggaatggagtggaatggaatggaatggaatggaatggaatggaatggaatggaatcaacccgagtggaatggaatggaatggaatagaatggaatggaatggaatggaatggaatggaatcaacccgagtggaatggaatggaatggaatgcaatggaatggaatggcatggaatcaaccctagtggaatggtatggaatggaatggaacggaccggaatggaatggaatcaacccgaatggaatggaatggaatggagtggaatggtatggaatggaatggaatggaaaggaatcaacgtgaagggaatggaatggaatggaatggaatggaatggaatggaatggaatggaatgaaat

SEQ ID NO: 31959 - DNA, 2300 bp, Homo sapien
gagtggaatggaatggaatggaatagaatggaatggaatagaatggaatggaatggaatcaacccgagtggaatggaatggaatggaatgcaatggaatggaatggcatggaatcaaccctagtggaatggtatggaatggaattgaacggaccggaatggaatggaatcaacccgaatggaatggaatggaatggagtggaatggtatggaatggaatggaatggaaaggaatcaacgcgaagggaatggaatggaatggaatggaatggaatggaatggaatggaatggaatgaaatcaacccgagtggaatgcaatggaatgaaatggaatggaatggaatggaatggaacggaacagaatggaatggaatggaatcaacccgagtggaaaggaatggaatggaatggaattgaatgaaatggaatggaatggaatggaataacatgcaatcaactttggtggaatggtatggaatggaatggaatagaatggaatggaatggaataaagggggatggaatagaacggaatcaacccgaatagaatggagcggaatggagtggaatgatatggaatggaatggaatggaaaggaatggaatcaacccgagtggaatgcaatggaatgaaatggaagggaatggaacggaacggaacggaacggaatggaattgaatggaatggaaacaacccgagtggaaaggaatggaatggaatggaatggaatggaatggaatggaatggaatggaatggaatggaatggaaaggaatggaatggaatggaatggaacatgcaatcaactttggtggaatggtatggaatggaatggattggaatggaataaaagggcatggaatggaacggaatcaaacagaatggaatggagcggaatggagtggaatggtatggaatggaatggaatgcaaacgaatcaaaccgaagggtatggaatggaattgaatggaatgcaaaggaatggaatcaaccctagtggaatgcaatggaatgaaacgcaatggaatggaacggaaaggaacggaacggaatggaacggaattgaatggagtggaatcaacccgagcggaaaggaatggaatggaatggaatggaataacatgcaatcaactttttggaatggtatggaatggaatggaatggaataaaagggcatggaatggaacagaatcaacccgaatggaatggaacggaatgaagtggaatggtatagaatggaatggaatggaaaggaatcaacccgaagggaatggaatggaatggaatggaatggaatggaatggaatggaatggaatggaatggaatcaaccccagtggaatgcaatggaatggaatggaatggaacggaacggaacggaatggaacggaattgaatggaatggaatcaacccaagaggaaaggaacggaatggaatggaatggaatggaatggaatggaatggaatggaatggaatggaatagcatgcaatcaactttggtggaaaggtatggaatggaatggaatggaatggaatggaatggaatggaatggaatggaatggaatggaatcaaccccagtggaatgcaatggaatggaatggaatggaatggaacggaacggaacggaacggaacggaacggaatggaatggaatggaatggaatagcatgcaatcaactttggtggaaaggtatggaatggaatggaatggaatggaatggaatggaatggaatggaatggaatggaataaaagggcatggaatggaatggaatcaacacgagaggaatggaaaggaatggaatggaaatgaatcaaaccgagtggaatggaatggaatggaatggaatggaatggaatggaaacaatgcaatgcaatggtatcaactggaatggaatgaattagaatggaaaggaaaggaatcaccatgagtggaatggaatggaaaggaatggaatggaaactaatggaacggaatggaaacaacccgagtggaatggaatgaaatggaatggaatggaatgggatggaatggaatggaatacaacaaaatggaaacaaaccgagtggaatggcatggaatggaaaggatttgaatataatggaatggattggaatcaacccgattagaaactaatggaatggaatggaatggaatggaatggaatggaatggaatggaatggaatctacccgagtggaatggaatggaatggaatttactggaatggaatggaatagaatggtatggaatcaacccgagtggaatggtatagaatggaatgtaatgaaacggaatg

SEQ ID NO: 31960 - DNA, 2300 bp, Homo sapien
tggaatccacccgagtggaatggtatggaatggaatggaatggaatggaaaggaataaaatagattggaatagaatggcatcaacccgagtgaaatggaatggaatgcaatggaatggaatggaatggaatggaatggaatcaacccgagtggaacggaatggagtggaatggaatggaatggaatggaatggaatcaaccagagtggaatggaaaggagtagaatggaatggaatggaatggaatgcaatggaatcaactggaatggaatggaacgtaatgtaagggaatggaatgaatggaatcaacatgactggaatggaaaggaatggaatggaatggaaaagaaatgaatggaatggaaacaaccgagtgtaatagaatgaaaaggaatggaatggaatggaatggaaagcaatggaattcaaaggaatggaattaactcgagtggaatagaatggaatggaatggaatggaacggaatggaatggattggaatggaaagaaattctacggaatggaatcaaccagaatggaatggaatggaatggaatggcatggaatggattggaatggaatggattggaatcaacccgagtcgaatggaatggaatggaatggaatggaatggaatggaatggaatggaatggaatggaatggaatcgaatggaatcaactggaatggaatgaatggaatggaatggaatggaatggaatggaatggaatggaatcaattggagtggaatggaatggaatggaatggaatggaatggaatggaatggaaaggaatggaatggaatcaacccgaatggaatggaatggaattgaatggaatggaatcaaatggaaaggaatggaatggaatggaatggaacggattggaatggaatggaatggaatcaacccgagtggaatggaatggaatggaatgcaatggaatggaatggtatgggatcaaccatagtggaatggtatggaatgaaatggaacggaacggaatggaatggaatcaacccgaatggaatagaacggaatggagtggaatggtatggaatggaatggaatagaaaggaatcaacccgaagggtatggaatggaatggaatggaatggaatggaatgcaatggaatggaatggaatgcaatggaatggaatcaacccgagtggaatgcaatggaatgaatggaatggaatggaacggaacggaatggaacggaacggaattgaatggaatggaaacaacccgagtggaaaggaatggaatggaaaggaatggaattgaattgaatggaatggaatggaatggaatggaatggaatggaatggaatggaataacatgcaatcaactttggtggaatggtatggaatggaatggaatggagtggaatggaacggaatggaatggaatggaataaaatggcatggaatggaacggaatcaacccgaatggaatggagtggaatggagtggaatcgtatggaatggaatggaatggaaaggaatcaacccgaagggtatggaattgaatggaatggaatggaatggaaagtaatggaatcaacccgagtggaatgcaacggaatgaaacggaatggaatggaacggaaaggaacggaacggaacataattgaatggaatggaatcaacccgagtggaaaggaatggaatggatggaatggaatggaataacatgcaatcaacttggtggaatggtatggaatggaatggaatggaataaaagggtatggaatggaacagaatcaacctgaatggaatggaacagaatggagtggaatggtatggaatggaatggaatggaaaggaatcaacccgaagggtatggaatggaatggaatggaatggaatggaatggaatggaagggaatggaatcaaccccagtggaatgcaatggaaggaaatggaatggaatggaatggaatggaatggaacggaacggaacggaattgaatagaatggaatcaacccaagtggaaaggaacggaatggaatggaatggaatggaatggaatggaatggaatggaatggaatggaatggaatagcatgcagtcaactttggtggaatggtatggaatggaatggaatggaatgaaatggaatggaatggaataaaagggcatggaatggaatggaatcaacccgagaggaatggaatggaatggaatggaaaagaatcaaaccgagtggaatggaatggaatggaatggaatggaatggaatggaatggaatggaataacatgcaatcaaatttggtggaatggtatggaatggaat

SEQ ID NO: 31961 - DNA, 2300 bp, Homo sapien
tccttggctctgagggctttaccttcacggggtgaggaaaggggttgcattcttggcttttacattatattaggtgggttcgggttgaggtatctgcaattcaaatgagtattacaatctctacttttatggataagagactgaggcccaccaagagagggaatgacagtccatatcctggaaggtgaattgtcaggcactgatttccgctatttaacccctgccaatcatcaagtatttaaaggatccccggataccataccaataggtgttcaagagagaggcctgtaatctaggcgtctgagaaaacaaggctatagattccaatattagagacaacagggctctgggaagattaaggttgagttttctggatctgcagaatagagtcactgaggaccaattgcaagatcagaggagatgaaagaacaagtcagggcatgcttaggaaaagagaataccagggataggttttaggcaagagtcacactgaggaagggcaggttcttggcgtcgctcaggaagaaatccaaaagcaagcctctggtggaagaaagcagctctacggaggcattggcggtgttacaaccctgcatccactccggcagggcagggagccctccgtgggttgtgctcccagagcagcagcctaggggtggcttgtagtcacttttataattcacttttaatggcatgctaattaaggggcgggttattcagagatagctagaaatgggcagtaacttccatctgtttccatggcaaggggtggggacttctcgtgatgacatggcattggcaaactgtcatggcactggagggagcgtcttctggtgatctgaggtgtgaggtgctttcgctgcctctcccagtttcctgcgtgcctcttacctgaaagcctatcaacacccccatctgcccacctacaaacgtcactgccctttcaccccacccccgtttcacacgcactcccacatcaaccctgagcattcaagcctgcgtttccctgttaggaacatcggtggtagccagagctctgagaaacccctatgcagaactccttgcctagtttgtggcagaaatcagggaaggaaaggcaaatttcaggtctttctcacaataaataaataaagataggtagatttgattgatggatggatggatgaaacgtgggagtctacgggcaaatatttatcagacactggaagtgaaagttgtcacaaagattatggagtgcacctgtcttatgaccctgttattttatcctagtatatgcactagagcatattttctaactgtgtaaattgaaggctcacaaattagtttagtgagagaaaagataacagattggaagagaattaccatattcattagttgtgtttttaaaattttaaagtaaaatagagacatgatttttttcatgctttcgaatgcatctataaaaaatagacttgagggctgggcgcagtggctcacacttgtaatcgcagcaccttgggaggccgaggagggcggatcacgaggtcaggagttggagaccagcctgaccaacatggtgaaaacccgtctctactaaaaatacaaaaattaggcgagtgtggtggcgcgcgcctgtaatcccaggtacttaggaggctgaggcaggagaatcacttgaacccgggaagcggaggttgcagtgagccaagatcgcaccattgcattccagcctgggcgacagagtgagactctgtctcaaaaaaaaaaaaaaagttactgattaatagcatagaccaattggcctctattgaaatttcttcattattttcacaatgtcccaggctgtgaaaccagtatttaataaagaaccagaatgccacatctgtgtcaactgggtagggaccagtcctgatacattaagtccgggtctctgggtaactggactcaactgctgggcaaaacagaatgtccggtgtgggttcctaaaggaggaccgcaaagcctcatgggaattgtagtgtcaccttccaatgacgttaccatcaaggaccttgggaaccagcttttctctctgcggatgcgccgcccggcccactccgccattttcctccggaagtgtggcacccagaggcggtcctgtagctgggccggcttggggcttggttctatgtccctgtgggttggtgcaagggccaggaggaacccgtgagcctcaggggatcccagggggccggaccagtgttccctagttgtgggaacagacgcgtgggcgcatcgcgggagggcagggcctgaagagcaggtgcgggctgcggaccctg

SEQ ID NO: 31962 - DNA, 2300 bp, Homo sapien
gggtgcctcccaggtaggctgcttgggggtcaggggtcagggacccacttgaggaggcagtctgcccattctcagatctccagctgcatgctgggagaaccactgctctcctcaaagctgtcagacagggacatttaagtctgcagaggttactgctgtctttttgtttgtctgtgccctgcccccagaggtggagcctgcagaggcaggacggcctccttgagctgtggtgggctccacccagttcgagcttcctggctgctttgtttacctaagagagcctgggcaatagccggtgcccctcccccagccttgctgctgccttgcagtttgatctcatactgctgtgttagccatcagcgagactccgtgtgcgtaggacctccgagccaggtgccagatataatctcctggtgtgccgtttcctaagcccgtcagaaaagcacagtgttagggtgggagtgacccgattttccaggtgctgtctgtcacccctttccttgaccaggaaagggagctaactccctgaccccttgcactttcctgagtgaggcaatgactcaccctgcttcagctagtgcacagtgcacttcacccactgtcctgcgcccactgtctggcactccctagtgagatgaacccagtacctcaaatggaaatgcagaaatcaccggtcttctgcgtcattcatgctgggagctgtagacttgagctgttcctattcggccatcttggctcctcctcccattattttttaatattttctgaaaatcttctttaaagagagaaagccaaatgtcacccactttttcataaaaccttataggccaatctagtattcttttcttttttggaggtggattttccctcttgttgcccaggctggagtgcaatgatgtgatctcggtttactgcaaccccctgcctcccaggttcaagcaattctcccgccctagcctcctgagtagctgggattagaggcatgccacaccatgcccagctaattttgtgtttttagtagagacggggtttttccttgttggtcaggctggccctgaactcctgacctcaggtgatccacctgcctcggcctccccaagtgttgggattacaggcgtgagccactgcccctggccatttttttttaaagataatctcttgctctgtcaccctcctctccatattatagctctggggccaagctgcatcacaatggaaatcatggagccacaggaagaatccactcagctttgccacatgctgcccaagaggttgcttggagtaaccaaattaacatttttcattctgctcagagcaaaatacatgtgacaaaacatagacacgagccactttgcttagcacccagtgtcaaactggtaagacccaaacttgctcccagataggccgtgccacctctaaatctttttagaagcttctgcatattaataggcatccctagatgagactaatttgggagccctcatttttaaatgcacttcagggcattattcatttggaatgttccactgtaagttatctttagtaagattttgccatttctgtaagactttgctgcttcccaggcctaatgaattagccagaaggaactaagttttccagaaattaaggatcctatttttacctaatatattggctttactcccaggttcccttgattgacttagccaatgatttttttttcctacctaagcatgcgaggaaaatgaaacaaaggggtagaacacaaaaatccctgtgaattttgaaaagccaaattttacaatcctccaatattatcatttgctaccactttccttctgacccattcagatgtagggggcctctaactggaactggattcaagccagttaactactggatcaaatctgatcctggacccggtcccgtttctgtcataacttctaaaacatccagccagtcatggctggatagcagtttggaacagaaatttgctcaaagaaactcagagctcaaaacacaaatccatggagctctgaaatccgagagagaatttaccatgatccccagctgctctgagaggtcaaagggcacaagtgttacagaatcctgtgacgtcacttttctgcctgaaacctctggctggtggcacctttacctgtgttttgctcgggcccactgggttcgttccgtccactcggctcatgctagtggtgtggatcccacacctgccaagggtgagctgggtacagagcagtgaagggtgtgtgagcaagcaagcatgggatctggccactgcacacagccaagcatgccagctg

SEQ ID NO: 31963 - DNA, 2300 bp, Homo sapien
tacaggcgtgagccactgcccctggccatttttttttaaagataatctcttgctctgtcaccctcctctccatattatagctctggggccaagctgcatcacaatggaaatcatggagccacaggaagaatccactcagctttgccacatgctgcccaagaggttgcttggagtaaccaaattaacatttttcattctgctcagagcaaaatacatgtgacaaaacatagacacgagccactttgcttagcacccagtgtcaaactggtaagacccaaacttgctcccagataggccgtgccacctctaaatctttttagaagcttctgcatattaataggcatccctagatgagactaatttgggagccctcatttttaaatgcacttcagggcattattcatttggaatgttccactgtaagttatctttagtaagattttgccatttctgtaagactttgctgcttcccaggcctaatgaattagccagaaggaactaagttttccagaaattaaggatcctatttttacctaatatattggctttactcccaggttcccttgattgacttagccaatgatttttttttcctacctaagcatgcgaggaaaatgaaacaaaggggtagaacacaaaaatccctgtgaattttgaaaagccaaattttacaatcctccaatattatcatttgctaccactttccttctgacccattcagatgtagggggcctctaactggaactggattcaagccagttaactactggatcaaatctgatcctggacccggtcccgtttctgtcataacttctaaaacatccagccagtcatggctggatagcagtttggaacagaaatttgctcaaagaaactcagagctcaaaacacaaatccatggagctctgaaatccgagagagaatttaccatgatccccagctgctctgagaggtcaaagggcacaagtgttacagaatcctgtgacgtcacttttctgcctgaaacctctggctggtggcacctttacctgtgttttgctcgggcccactgggttcgttccgtccactcggctcatgctagtggtgtggatcccacacctgccaagggtgagctgggtacagagcagtgaagggtgtgtgagcaagcaagcatgggatctggccactgcacacagccaagcatgccagctgcagtgaggtgggcagctccaggtacaggcacaggtgccagctccctgtgaggctgcagctggaccagaccgactgcaaacagcttccactgtgtgtatcagggaatgcagtggcgcccagaaacttggagatgcaggaactgcagagccccaaagaaggcatcacagccctggcttggggagctcctaggtctgggctccctgaagggccacagctcttgtctccttctctcttctcttcttcttgcctgcaatttggcaagcaaggggggcgtttcagccctgtttatgttacacctctttcagccctgctagtttgcaggtcccgagttcttgtcctgagtccaggaagaatgaggtatgtgggcaagtagaaggtgagcaaggtgaagaggtgctttattgagcaacagtacagctcagaggagaactgcagtgggtaactcctttctgcaggcaggtcatcccaacgtctgttcagctctcagcagctgagagagacgcactgtggttagctgtgcccacattgccgaggctgttcgagctgaggagtgccttcaggccagtgctgagccactcttagccccacctcaacctccctcttgtgctcgtcactgcccaaattctggagggggccgaggtggcagggggctggcatgtcagcactgccctgagcttgcacaaaccgggccaggttgcgactgtgcctgggttcagcctcaacttgtatccgaagttggagtgggctctgggagtggagagatgccaggtggtgggaccaggtacgactgagcctgtgggggcaggggggcttgctgggcctctgagagtgcaaagatgcccgggtttgcagtcatggctggatggctgcagctgtgcctgggagggcagggctcctgcctgccaatttagaaggggtggggctcccaccccttcctggctcccaccagcttcgaggagcgcacagccccagccactcctccccactgcagccagtgtctccgtagcaactgctccatgtggaccactgctgccatcacagagcagtccttgcaggtgcctttcttgtacctcagcactcctgggggtcattagaagccctagcaacgc

SEQ ID NO: 31964 - DNA, 2300 bp, Homo sapien
atcatggctggtctcagtgatgagtgcgactgggcagtgtggcaggagagatgctctgggacttctgaggggcgatcatgagagtccttacagcttctgcctgggcctcttggacacacaccctgggagaagccagacaaacctgactacctgacgctgccagactgggaggaagtccgtgctggccacgaagagagggctgggtgcctgctccatgtccccagccactagagtccttccagatgagaccaaggacatcatgaagcaaccaaccaacaccgccctgtccagtgtcttgacccagaaaattgtgacatgtaaaaagaataaattcctggtttaagccagtaaggttactggtacattgttacatctcagataattaaaaccttgaaaaactcatgagagatcacaagtagaaccttgatctgaaacggcatgtagcgatttatattgagtattaggttaaaaatgcaagaatggagcatagttaatattttacgttaaagctaaaactataattgcctacttcaaattttcagttaattagtttgtcactttttgttcttaaccaagaaatcaactagttttagtccataaacagttagaactgatgcacacatccgtttctccttactcattttaaacaactatctgaaataggaagtgtaatataatctttaaagaatctgaaaacatgacagaaatgtttaaactataaacatatattgtatatgttagcatattgtatacattgcatattaacataagctagaatcattgacataaatttatataaacaaaaggtgtaaaatatgacagtgttcttcttgatttttgtctttgcatatttctttattggcctttgtcaaatgtgacccactaactcctgaatgctttctctctccccattgattcctaaggatgtcaccacagtgttggccagatgcacaggtcacaggggactgaatctcatcaccccacaaacatactattcaggttttgccaagaatgacactgtaaatgtaacgaagcttccgtgcttgttagtgaacaccaactcagctcctctcctgtattcagaaatcagcatgagatgaaaacaacaagcaggccaggcacggtggctcacgcctgtaatcccagcactttgggaggacgaaacatgtggatcacctgaggtcgggagttcgagaccaccctgatcaaaacagagaaaccccatctctactaaacatacaaaattagctgggcatggtggcaaatgcctgtaataccagctactcaggagctgaggcaggagaattgcttgaacccgggaggtggaggctgcagtgagccgagatcacaccactgtgctctagcctggacaacaagagtgaaactctgtctcaaaagaaaaaaaattaaaaataaaagaacaaggaaacaaaagtaacaaggcttgacaccagatgagcctgaatctaagcaagaaaagcccagaagaaatcccattttgggtcactggttgcatggtagtaataccatacacataagggaagagaggaggatgtggctttcactttgaattttttgagcttaaggtaacttttgcgtagctacaaagaagcattcaacagagagttaaacctatgatggaaagactgaaggggtccaagctgtagagaaacaggactgcaaaccacaaagggctgaatcagtcaaggagaactgcagggcgggatgaacagggactaatggaacatttggataagctgttgagaagaaaggagaattcagagaaaaagaactgtcagtgaggtcataataggaactgttacagtgaactaaatatggcctgggaaggactctgtacttctagatttgagtccctgtggacaaactgcaacctaacttaataggtaggaagactgaaaacctaacttaggagtatgcgcctgtaactatagctgagtcctggccaatcccaacagccaaacttctgccactcacacactgctgagtgttcagctgtgttcagataaggcaaatgctgagcactggaaccagtccagttgcttctggacctcactgctgagaatggtaagggacccagttgcttctggacctcactcctcacttcagatttctgtacatcacgttgcctttattgtctataaatcttccaccatgtagctgtgctggagtctcaccaaatctgctgtgattctgggggctgcctgattcgtgaatcattcattgctcaattaagttcctttaaatttaattcagctgaagattttcttttaatagatggt

SEQ ID NO: 31965 - DNA, 2300 bp, Homo sapien
caaaagacagacgaagaccaggcatggtggctcatgcttgtaatctgaacaatttgggaggccaaggtgggtaggttgcttgagctaaggagttcaagaccagcctgtgcaacatggcaaaactctatctctacaaaaaatataaaaattagccaggtgtggtgccatgcacctgtagtcccagctactcagggggatcaagtgaggattggttgggcctgggaggcagaggttgcagcgagccaagattgcaccattgcactacagtctgggtgacagagcaagaccctgtcttaaaaataataaacaaacaaatagaaaataactagaaaaatggcagacctaaatccaaccttagcaatgattagttacaatgtaactggacaaatactctacttaagacagagactgccagacctgagaggaaggcaagacccaacaatatggcatccacagagacacaatttaaacacaaagacacaaacaaagtatgagaaaaaatatgctatgcagacactaatcataaaaatatgctatccagacactaatcataaaaagcttcaacagagatgttaacactagatgaaagaggcttcagagcaaaatatatcaccagaaataaacagggtaatttaataaaaataaaagaatcagagacgatgatgttacaattaaaaattgtgcctcaaaatgcacacaaagtacacacacacacacaacctcaaagtatgtgaatcaaaaacaacagaacaaaagcaggaaattgacaatgcaaaattatagctggtgaattaatactgctctctcagtaactgatgggacaaccagataaaaatattggaaaaatatggatctaaatgacaaaatcctgacccaaatggtacttggcagtaccaagatagactgtatgtcgatcgattgagaaaaggttcaagcctgaaatactatacaaaggatgttgtctgaacacttgaaattaaattagaaaccaacaacaaattgataaccagaaaagcctcaaatgtctgaaaaccaagtaataaactttgaaataccctgtgagtcaaaaaagtattcacaaggggaactggaatgtatttggaacaaacttgttataaaaatctcatttctggtagactaaaggtgacaacttctttcctgctcctctctctgtgaggaccaattccccttaaaccttgaccaaactactgacttatttggccaacagaaggtgacaaaggtggtatttggggacttcagaagccaggctgagaaaacagaacacttatccaggagaaagccagtcaccaggcaggaaatcccactcccctgagacctcatgatggaaaccacacggccagtccatgactagctacatgcattgacatcccccactgagcctccagcaacaccgactcccaacaactagtgagcctccagcaacatccactcccaaccgctagtgagccaccctgcacaccacctcactgtgctttcacacaatccagcttggctgcaactgtgtgtgagatgagctgaccaccaagactctctaagccaaaaaacaagtaataatgagttgttttaagctgccaagttttggggatggtttcttcagaatagataactggaacagaatatgacagctggaaatgagctgctgtggtaatcagaagctacaatatgtgacacgactgtgaggctgatctgtaactgggcctcaaggagaccattcatgcaacctggaagagcatcaagacacttggtcagggcctgaaggacggtgagaaaatgtcattggaaactggagaaaaggcctgagagttacatgctgagggactgtgggaaaactatggccacaacatggaaactgaaagggcactgcaccatctcagggatctgcctaaggagacatctgggaagaacatggaaagtgctaccagcctcccctaactgtcactgaataaatatgacaggagagggacatgatctaaagaagaaggttcagttttcaaacagaatttagagaaaatataaagaaataatttcttgtctcaaaaggccaaagtaaaaaaaaaaaaaaaaagaaaagaaaaggaaaaaaaatgaaaaagaagccattgaataccctattgaccataagaaaaaggcagggaaagttggtcaacggcaacccaggcactgaaggaaaaagaacatggagaatgacaaaagcccagagggaagagtaaaaggacacaaacaccattctcagggaccaggactgggcgccgttctcagggaccaggactgggcactaa

SEQ ID NO: 31966 - DNA, 2300 bp, Homo sapien
ttatgtgtttcattaattacctttattaaaaacaacacaattatattacaataggacaaaaaatgtttaagcaaatgaaaacgaaaccatgacatacccaaactcaggaggaggcaacaaaggcagtgctaaagggaagcttacagctgcagatgcttaaattaaaaagaagaaagatctcaaacccatgctaaagggaagcttacagctgcagatccttaaattaaaaagaagaaagatctcaaacccgtgctaaagggaagtttacagctgcagatgcttaaattaaaaagaagaaagatctcaaacccttgctaaagggaagcttatagctgccggtgcttaaattaaaaagaagaaagatctcaaatcaataacctaacattacacctgaagaaggaaaaaaaaaactaatgacaatccaagcaaaaggaagaaaataacagattacagcagagataagcagaataagaccagaaaaaaaggaaaaaaaacactgagtttgtttttttaaagatcaataaaaattttaaaactcacagctatattaagaaaaaaagagaaatctcaaatactacaatcataaataaaagagttgacagtacaacacatgccacagaaatgaaaaagattacaagacactaatgtgagcaaccatatgccaccaaactgggcaacctagaataaatttataaattcctagaaacacaaaccaccatactgcatcacggagaaataaaaaatccaaagagacctgtaactagtaagaagattcaaccagtaatcaaaaaccccaccaaaaagaaaattccaggtccagataacttcactggaaaattttaccaaacatttcaagaagaattaattccaatcctctgcaaaatcttccaaaaatgttcaaaaaaccagaaggggacattccaatccattctatcaggtcaacatttatctggttccagagccagatgaacaccttttgtaataaaaacactcaaagaattagtaatatatggaaactcctcagtaaataaagattatacatgaaaagctcacagctaacatcatactcaatcgtgaaaaactaaaatcttttcctctaggatcaggaataagatagcaacttctcttcctgccacttctattcaccacagcactggaatttctacttagaataattaggcaagagaaagtaataaaaacatgccgatcggaaaggaaaaagtacaaaattttgttcacagacaacaagatgtaatgtgtaaaaattctgaaattccacaaaatactggtagaataatgaaattcaacaaagtttcaggatatggtaacactctcaagtcagttgcatttctataaactaacaatgaacaatctgcaaataaaattttaaaaagaggccaggtgcagtggctcacacttgtaatcccagcactttgggaggccaaggcgggtggaccacctgaggtcaggagttcgtgaccagctgggccaaccccatctctaatataaatagtaaaactctatctctattaaaaatacaaaaattagctgggcatagtggcagacacctgtagtcccagctacttgggatgctgaggcaggagaattgcttgaacttggaagttggaggttgcagtcagctgagattgtgccactgtgctccaacttaggaaacagagtgagacgcggtctcaaaaaaagaaagaaaggaaagaaagagagagaaagaaaagaaaagaaaagaatagaaaagaaagagaaaacaaaagaaatttttaaaaagaatgacatttggccaggtgcggtggttcatgccagcaatcccagcagtttgggaggccgaggcgggcagatcacctgaggtcacaagttcaagactaacctggtcaacatggagaaaccctgtctctactaaaaataccaaaaagttagctgggcgtggtggcgtgcacctgtgatcccaggtacttgagaggctgacgttggagaattgcttgaataaggaaggtgcaggttgcagtgacctgagatagtgccactgcactccagcctgggagacagagcaagactccatctcaaaaaaaaaaaaaaaaaaagaattacatttacaaaagcattaaaaaaattagaggctgggcgcggtggctcacgcctgtaatctcagcactttgggaggctgaggcgggcggatcacgaggtcaggagatcaagaccatgttggctaacacggtgaaaccccgtctctactaaaaatacaaaaaattagccgggtgccttggcgggcgcctgtagtcccagct

SEQ ID NO: 31967 - DNA, 2300 bp, Homo sapien
ttcttgggtcctatgctcactacctgtgtgatgagttcaattgtgctgcaaacctcggcatccctaaatatgcctttgaaagaaacctacagaggtaccacgttaatttagaatacaaactagaaaaaaaaaagagaaaagtttactataagtagagaacagaaatttctttttaagataaaatttattgaagtaaaaaatgggttaaactttcataaagggcagagttttctaagaatttcaaagcaatccattcattgcaaaagatggctttaattacttatttttttttttttttttttgagacagggtctcactctgttaccaggctggagtgcagtggtgcagtcttggctcactgcagcctccacctcctggcttcaagcaattctcctgccttagtatcccaagtagctgggactacaggtgcgcatcaccacgcccagctaatttttgtatttttagtagagatggggtttccccatgttggccaggatggtcacgatctcctgacttgtgatcggcctgctttggcctccccaagtgctgggattacaggtatgagccaccatgcctggccattgtttaacctttgtactaataaaacactacctttctaaaatcatgtatatgcaatagatcaatattaactgcatttttgtcagattactctaaacagcattacacatatacatcctctgttatctaatcttaaaataagtagaaattttactttatttatgtgattatttttctatttaagcaaacttcaagttatgtctagtcactaaaaatactaaaggccacattttgtaagtgatgtcttatttttatgataatgtttcttgtttaacttaaacattattattatttttacttattttagatggagccggactgtgtagaacaaataattagagaaacaaagagaagtacgttgccaaaatttattaattaaatttaggtttattttagaaataaagtgtaaatagcaaatggcattccttttcattcttgggttagtagatactacatcaatattttttttcttacacacatctaatgaaagatgtgaaaacagaaactttcacagagaagactgtacttatacaccataaattcatcatgttccaaagcttaaacagttcccaagaagtctgtgcatctctttttcactggctctacactttcttaagttttgccatcctcatggaactgtcagccagcacactgaaacgattctcagaaaacaaaagcatcatcaagttctcagggtttcggtagagattgaaggccaacagacctaagactcattaagaaatacttagctgagcaataacccttcataagcagtcacttgacaggtgacattttaaatctcctgtcaattactgtgtcattggcttacacttgttctcaggaaaagttccaaatttttcaccatgaaataaaaacacccatatcaaagtaattctcgtcaagttactcagccttgtctctcgccacttactgcactctgccctttgctctagcaccaaactggatggagtggaactctgcagggctcttcctcacctctggctctttgccttcccctcttccctctatctgggaagctttttcttgcccttcaggtatcaacctatgttatctcctccaccagaaagcccatgatattgacataaaagtgggtagatgtcccttctatgtgttccagtagtgccctgctctatacctgtcatggtatctttgactctatatggacattgcctgcctgtctgtttttttttaggttatagcatatgactgttgggaggtggaccatgccatcttcatcttgtaattccagtgctggttctagtaccttagcatgtggctgttgattacatgaatgaagaatgaaaaactctgatatttaaacacaattagaattaatgccatgtgtaaactattaaatagtaattttgtattgtaaatgcacatacatatttctcattcttattaactctgataaagttatcaactctttagtttttaaacgcacacttagtcaactgaagtgttttaggtaaagaacataattctttatttttctttccagctgctgctgtgtcggacacttgctcccatctactttcttctctagaatccacgggtaagccacatctaacgaagagaatatttaaccataaagtcttaaagaaaaattgtatgatttaaaagattataaaactttattactgggctatttacacattttagttgtttctcataaaatgtataacattacaatatttact

SEQ ID NO: 31968 - DNA, 2300 bp, Homo sapien
gggattacaggtgtaagcccctgaatctggccagatatttttctttttatggctgaataatactctgtgtatgtatatattacattttctttatctattcacctactgatgggcattaggtttgggctaccttttggccactgtgaataatgctgctgttaatcgggtgtacaaatacctgtttgagtccctgctctcagttcttttgggtatatacgcttaaagggtgttgatggatcatataattctatgcttcatatttttaaggagctgctaaaccattttccacagtgggctgtaccattttacattccaaaaagcaatgcatacagcttccaatttctctatagccttgctgacagttaatattttctgtttatgtattgtatttttatagtgtttgaaattaatctgaggctttttgctgataccaaaatattaggaaaggttttccaaaaataatactgcttattataaaggattttacgtgttacttgatgccctgtgatctgttttctaagtaagaagaggaacttcttggctgggcacagcggctcatgcctgtaatcctagcacttttggaggccgaggtgggtagatcacctaaagtcaggagttcaagaccagcctggccaacatagcgaaacccagtctccactaaaaaaaaaaaaaaaaaaaaaaaaaaaaaaaaaaagaaattagctgggtgtggtgggggggtgactctaatcccaggtattcggaaggctgaggcagagaattgattaaacccataaggcagaggttacagggaccgagattgcaccactgcaccccaggctgtgtgacagagcgagagtccatctcaaaaaaaaaaaaaaaaaaggaaagaaagaagaggaacttctctccatccagcctcattccactgcaccaactcttctgtgtcgggttgtgcacgggagaaagggagcttggcaactctttgctgtgttgagttgtggtagcccatcactgggttgtaaagtgccttgcctcctttcctcccctcctttttctttgagacagagtctcactctgtcatccaggctgaggtgcagtggtgtgatctctgctcactgcaacctcagcctcctgggttcaagtgattctcctgcctcagcctcccaagaagctgggactacaggcacatgccaccacacctggctaattttttttatttttagtagagacagggtatcaccatgttggccaggctggtcttgaactcctgacttcaggtgatccacccaccttggcctcccaaagtgctggggttaaaggcatgagacactgcgcccgtccacctcctcttttacttgggagaaatgcacagattctgggtgccatgtgcatttgttttgggagtgataattgatctaacttatggaaataatactagatagttagcggatggattctgtatctgatgagagttttgggcaaaactcctagtttctgagtcttatttttcccctgattcaagaaaactgtgaattatccagccagtaaaaaactctcacagctccggatgtgagtttaggacactggatttctaccactcattttcttactacttttcttgtgcaaggatcatggcacaagttgcagtttccaccctgcccattgaagatgaggagtctgttgaagatgaggagtccttggagagcaggatgatggtgacattcctgtcagctctcgactccatggtcagaccttctgttctcacattctgtagttcagtaggactgggcggtagataaggttgatttgtttttgtagaacttacaattttgtgatttttagttctaatgagtagacctttttcatgaatagtagttacggtcaaacacctctgaccaaatgtgcatgtggagtttctacactgattttcagacaatctggatcccaactgggtatcccacaattccatcctgacactccctggagttagtgcagaccccgcaggatgggagctcagtcccaggagtctaccctcactccacatgccaattgcaagtcttgggttgttacatgtagttttgaccaaccagttagaaaacagagtttcatgacccccattggtgggtggaatcatttgctcggacagcttgcagaactcagaaaaacagattgttttctttttttctgagatacagggtctcagtctgttgccaggctggaatgcagtggtgtgatcaaagctcactgtagcatgggactcctgggctcaagtgatcctcccacctcagcctcccaaatagctgagattataggcctgt

SEQ ID NO: 31969 - DNA, 2300 bp, Homo sapien
tgtgtctttcatctcttcacccccaggcctcagggactctcctgtggctcccagttactctccagccatccccaggttcctgcgggagtcagccccatgcacccaggagtcgcccagagactcacacgtctcgggagaatatgagcggtcccccagccctgactcctcaagattcatgcctgcctcacccagcttctccctctcccctcccagaaactcagacccaaggggcagctcctcaccagggatgtggaagaactctacatcatcccgcagggcttcaccagtctcacatccatcatcaacagaattccacagctttacgtttccctttcctaaccaagcaggacagtcactcatgtcattgtgttctcccatgtcctcctctggagattcttcacagtcacctcattcatcaataatataccatatgttcttactgccatcatccagcagctcacccccagccacccatgactctcctgtctgtcccagctactctccaaccacgcccacatttcagcggctgtctgtaccccacaccccagcaacacctacaaactcacagacctcagtgagatcctggccagattctctcacgtcttcacccccagcccttacggaccctccagtctgtcccagctactctccaaccacgcccacatttcagcgcgggtcggttccgggaacccagggatcaccgccaagcccaccactttcactgagttactccccagtctctagcacgtctttatctccaaccctcagggactcgcctgtctgtcccagctactctccaaacacgcccacacttcagccggagtccgttgcaggcacccagaaatcaccaccaaactcaccaatttcactgcgttactccccagtctctctcatgtcttcaccatccctcagggactctcccgtctgtcccagctactctccaaccacgcccacattgcagctggagtcagttccaggcaccccggaatcaccaccaaactcacctgtttcactcagttactcctcagtctctagcacgtctttatctccaaccctcagggactctcctgtgtgtcccagctactctccaaccacgcccacacttcagcgggagtcagttccaggcacccaggaatcaccaccaaactcaccaatttcactcaattactctccagtctctctcatgtcttcaccagccctcagggactctcctgtgtgtcccagatactctccaaccatgcccagatttcagcgggagtcagttccaggcacccaggtatcacctacaaactcagcagtttcactgagttactccccagtctctctcatgtcttcacccccagccccctgggactctcctgtctgtcccagctactcccccaccacgcccagatttcagcgggagtcagcctcccacactccagaatcacctacggactcacagacttcactgaggtcctccctggtctctctcaggtctttgccctcagcccacagggactcttgtgtctctttcagctactctcaaaacttctctagattccagctggagtcagttccaggcacccacgatacaccaccgaactcacgaatttcactgacttactccccagtctccctcatgttctcacccccagccctcagggactcttctgtctctctcagctactctccaaccatctccagatttcacgtggagtcagcttcacgcacccaggaatcacctacaaactcacggaccttactgcaaccctcccccatttctttcacctcttcaccccctgccttcagggactctcctgggtctcccagcttctctccagccttccccagatttctgccacagtcagccccaggcacccaggacaaccctagacactcacgggccacacgagactatctccctatgacctgtacctatacagggatggctcccacgcatccctcagtgaccccaaacccatctccacttacactcagacactcccagggcctgacagctactccctgttattgtccttcagttcgaagccctggccaatctactagcccacatgacgcagttacctggccattactccacggttcccgtgagggccccacacccagcctcacaagagaccctcctgcattccgtcctcacacgcaggcctgtccatctacttgctactgtcacactcttgccagcagaagaggcccctgtcatggccgatatcaccacccagtctatcctcaccccacagctgtgcagcgggaccctcctgctggcccacgtggctgccagagcccatgctggcaag

SEQ ID NO: 31970 - DNA, 2300 bp, Homo sapien
tcacccagcagctcacccccagctctcggggggtgtcctgtgtctcccagctactctccaaacaaccccagatttcagctggagtcagctgcccacacccaggaatcacctacaaactcacgagcctcacggtgctccacccctgtgtctttcatctcttcacccccaggcctcagggactctcctgtggctcccagttactctccagccatccccaggttcctgcaggagtcagccccatgcacccaggagtcccccagagactcacaggtctcgggagaatatgagcggtcccccagccctgattcctcaagattcatgcctgcctcacccagcttctccctctcccctctcagaaactcagacccaaggggcaactcctcaccagggatgtggaagtactctacatcatcccacagggcttcaccactctcacatccatcatcaacagaattccacagctttacgtttccctttcctaaccaagcaggacagtcactcatgtcattgtgttctcccgtgtcctcctctggagattcttcacagtcacctcattcatcaataatataccatatgttcttactgccatcatccagcagctcacccccagccacccatgactctcctgtctgtcccagctactctccaaccacgcccacatttcagcggcagtctgtaccccacaccccagcaacacctacaaactcacagacctcagggagatcctggccagtctctctcacgtcttcacccccagcccttacggaccctccagtctgtcccagctactctccaaccacgcccacatttcagcgcgggtcggttccgggaacccagggatcaccgccaagcccaccactttcactgagttactccccagtctctagcacgtctttatctccaaccctcagggactcgcctgtctgtcccagctactctccaaacacgcccacacttcagccggagtccgttgcaggcacccagaaatcaccaccaaactcaccaatttcactgcgttactccccagtctctctcatgtcttcaccatccctcaaggactctcccgtctgtcccagctactctccaaccacgcccacattgcagctggagtcagttccaggcaccccggaaacaccaccaaactcaccagtttcactcagttactcctcagtctctagcacgtctttatctccaaccctcagggactctcctgtgtttcccagctactctccaaccatgcccagacttcagcgggagtcagttccaggcaccctggtatcacctacaaactcagcagtttcactgagttactccccagtctctctcatgtcttcacccacagccccctgggactctcctgtctctccaagctactctcccaccacgctcagatttcagccggagtcagcctcccacactccagaatcacctacggactcacagacttcactgaggtcctccctggtttctctcaggtctttgccctcagcccatagggactcttgtgtctctttcagctactctcaaaacttctctagattccagctggtgtcagttccaggcaaccacgatacacccccgaactcacgaatttcactgacttactccccagtctccctcatgttctcacccccagccctcaggtactcttctgtctctctcagctactctccaaccatctccagatttcacctggagtcagcttcccgcacccaggaatcacctacgaactcacggaacttactgcaaacctcccccgtttcttccacctcttcaccccctgccttcagtgactcccctgtgtctcccagcttctctccaaccttccccagatatctgccacagtcagccccaggcacccaggacaaccctagacactcacaggcctcatgagactatctccctatgacctgtacctatacagggatggctcccacgcatccctcagtgaccccaaagccatatccacttacactcagacactcccagggcctgacagctactccccgttattgtccttcagttcgaagctctggccaatctactagtccacatgacgcagttacctggccattactccacggttcccgtgagggccctacacccagccgcacaagagcccctcctgcattccgtcctcacacgcaggcctgtccatctacttgctactgtcacactcttgccagcagaagaggcccctgtcatggccgatatcaccacccagtctatcctcaccccacagctgtgcagcgggaccctcctgctggcccacgtggctgccagagcccatgctggcacga

SEQ ID NO: 31971 - DNA, 2300 bp, Homo sapien
acagattaaccaaacaaagaaaggttgggaaaacgtatcctcagcaatttcccaagaaactgaaggaagagcatgataggtaagtaagcctatagcagtgtgtttttgtttttttgttttgttttgtttttttctgagatggagtttctctcttgttgcccaagctggagtgcaatggtgtgttctcacctcactgcaacctatgcatactgggttcaagtgattctcctgactcagcctccctagtagctgagattacagacatatgccaccatgcccagctaatttttttgtatttttagtagaaatgaggtttcaccatgttatccaggcttgtctcgaactcctgacctcaggtgttctgcccacctcagcctcccaaagtgctgggtttacaggagtgagccaccgtgcctggccacctatagcagtatttatcagcggataattgtcattgtgctataaactaattcaaaattggactaatgttccttatgattaacaagttttatagttttaccagggatatttagccctgcctggtaatcagaaaaatgcaaattaacataaaataagatatattttgtaaagtcatgctgatattgaaaaagtaattactaccattgaaaatgtgaggaaaaaggcattctcatacactgttggtatatgaaattggtaaattatttctgaagggtaacttagtgctgtgtatcaaaatttcaaataacctgacatccctttaactcaacaactccacttctgggactagatttcacaggaaaacataacttgtgtaaacatacacacacttattaagggcattaattatatattacacataatgaacaatagcttaataaatatataaaatatatgtaataagaaggtgaattggaagtattaagaaagaattataaaaagtgtggggtaacagatgttagactctttagcctagttttagatgacaatcatctgcagatatagtttgtgtgagagacatcttactctgtaaatcatttggagagacacatacaatatttcatagagatgaaaatttatttctagtgaacttatacacttgtcaataaatcgtaactttaaaaatttagttgattgtaaatgatcttttctaatcggggagtaattatgactgtgtgatttgaaaaggtaattttgaacttctaactatactgaattatttccagtatccttttttataatacatactagagtgactagtaacaaaaactttagcagaatattctttccttactacttttcaagtatatacattcgtttgaagatgttgaagtgagaaattaaatatctgagaactacaaaggaaaaataatccagcacatagaaattttattaggatgataaggagcatctgcagaggtagatcacaggatgatctctttgttttttaacaaaatgaattttaagataaatgtctttatctgcagatgcatcttaagacaagaaagtgaagaaaaaacaaatgttaatatgctgtacaaaaaaatagagaagaattagaaaggaaagagaaacaatataagaaagaagttgaagcaaaacaacttgaaccaactgttcaatcactagagatgaaactgaagactacaagaaatactccaaatcagataaatcaatctttggtaaaaattctatattttaaactttattttatcaatgttacttataatatcctcttgatttaatatataatattttggtctaaaacaaaccagaaatgttatctcattttcaaaaaatgaatgatgacacttacaggtacaattattaatatttattataaatcatggcatccacataggatattattttattacaaagagcttttgaaaacaataatatgccataatatatacttagtgataacctattgataaagattttttcccagtaaagttgttccttgtacttcccactatttcatattgattactgtacctaatactataaagaggaaacaaattattgcaatcacaagtaatctcattatattctaagaagagctctataaattttatcttatttaccattggtgttttgaaataaaagtattctttcgtattgatacatttacaccacagaagtaactgtgatctgtcagagaactagaagtagagtcagaagtcctggggaaaatcctatagcttgcttatatttttaacatctctttttcaaaattgtggtaactagatgagttcatcaatgaatgtatataggagtgactagtataatgtctagatttatgatttagtaaatgtaat

SEQ ID NO: 31972 - DNA, 2300 bp, Homo sapien
gaaaaactacttcttgggtcctatgctcactacctgtgtgatgagttctattgtgctgcaaacctcggcatccctaaatatgcctttgaaagaaacctacagaggtaccacgttaatttagaatacaaactagaaaaaaaaagaaaagtttactataagtagagaacagaaatttctttttcagataaaatttattgaagtaaaaaatgggttaaacttttataaagggcagagttttctaagaatttcaaagcaatccattcattgcaaaagatggctttaattacttattttttttttttttgagacagggtctcactctgtcaccaggctggagtgcagtggtgcagtcttggctcactgcaacctccacctcctggcttcaagcaattctcctgccttagtatcccaagtagctgggactacaggtgcgcatcaccacgcccagctaatttttgtatttttagtagagatggggtttccccatgttggccaggatggtcacgatctcctgacttgtgatctgcctgctttggcctccccaagtgctgggattacaggtatgagccaccatgcctggccattgtttaacctttgtactaataaaacactacctttctaaaatcatgtatatgcaatagatcaatattaactgcatttttgtcagattactctaaacagcattacacatatacatcctctgttatctaatcttaaaataagtagaaattttattttatttatgtgattatttttctatttaagcaaacttcaagttatgtctagtcactaaaaatactaaaggtcacattttgtaagtgatgtcttatttttatgataatgtttcttgtttaaattaaacattatttttttttttacttattttagatggagccggactgtatagaacaaataattagagaaacaaagagaagtaccttgccaaaatttattaattaaatttaggtttattttagaaataaagtgtaaaaagcaaatggcattccttttcattcttgggttagtagatactacatcaatattttttttcttacacacatctaatgaaagatgtgaaaacagaaactttcacagagaagactgtacttatacaccataaattcatcatgttccaaagcttaaacagttcccaagaagtctgtgcatctctttttcactgactctacactttcttaagttttgccatcctcatggaactgtcagccagcacactgaaacgattctcagaaaacaaaagcatcatcaagttctcagggtttcggtagagattgaaggccaacagacataagactcattcagaaatacttagctgagcaataacccttcataagcagtcacttgacaggtgacattttaaatctcctgtcaattactgtgtcattggcttacacttgttctcaggaaaagttccaaatttttcaccatgaaataaaaacacccatatcaaagtaattctcgtcaagttactcagccttgtctctcgccacttactgcactctgccctttgctctagcaccaaactggatggagtggaactctgcagggctcttcctcacctctggctctttgccttcccctcttccctctatctgggaagctttttcttgtccttcaggtatcaacctatgttatctcctccaccagaaagcccatgatattgacataaaagtgggtagatgtcccttctatgtgttcctgtagtgccctgctgtatacctgtcatggtatctttgactctatatggacattgcctgcctgtctgtttttttaggttatagcatatgactgttgggaggtggaccatgccatcttcatcttgtaattccagtgctggttctagtaccttagcatgtggctgttgattacatgaatgaagaatgaaaaactctgatatttaaacacaattagaattaatgccatgtgtaaattattaaatagtaattttgtattgtaaatgcacatacatatgtctcattcttattaactctgataaagttatcaactctttagtttttaaacgcacacttagtcaactgaagtgttttaggtaaagaacataattctttatttttctttccagctgctgctgtgttggacacttgctcccatctactttcttctctagaatccacgggtaagccacatctaacgaagagaatatttaaccataacgtcttaaagaaaaattgtatgatttaaaagattataaaactttattactgggctatttacacattttagttgtttctcataaaatgtataacattacaatatttact

SEQ ID NO: 31973 - DNA, 2300 bp, Homo sapien
ttcttcagcctcagccaggccttggaacttgactaggccatccacttcaccagagatgccttcaagaacatcagtgagctccttgccaatccgtccaggaaggacctggacccagccacggacctgttagtgctgtctcagggacaccagaccaacatcctggacatcatcctcatacacaaggaagctcttaccacagtcatggagaacaggcaacatgtggcagaagggaagacacaggtacagaggctgatggcatcattatcacaggaacaggatttctttggccactttggctgaaattcaccacttccatccaatccactcaagcgagagacttgaaatcacagatggagcatttcttgcaacaggagatactattttttcaaaaagtcacctaaaatttgatagtgttggatgactagctattagattgtggactttttccagttcacgggtactttctacagcagaatgataacaatatcaaagagctagtgccagctatcggtggtagtacaaggatgactttgtgctcaactgaaacccagctgaatatagaattgtgtaggaaagtgttaatatggtgatagaatagaaacagtagcaaatgaactaaatcatactatgaatgcctacactaccattataactttttgaagaatgataataccacttactttattgccttttgaagtaggaatattttagtggatatgctatagacctgaaaccatataaagaatcccaaagaagctggctggataaagcctgctatggatgtctttatacacaaagactgatgaggcaattcgaatatgtgtccccaccaaatctcatgttgagttatgcttcctaatgttggaggtggatcctggtataaggtgattgaatcatgaaggcaaatttctcatgagtggttcagcactatccccttggtactgtcctcacaatcatgagtgacttgtcgtgagatctggccactgaaaactctatatcactccctactctccgtgatttcctcttgccatgtgagacaattcaccctttcattaccttgcacaatgattgaaagatttctgaggccccccagaagcagaagcactaagcttcctgtccactctgcagaaccatgagccaattaaacctctttttcaaaataaatcttaccaaaaatggcaaatgaggactggagcattgctataaagatacctgaaaatgtggaagcaacttcggaactgggtaatgggtagaggttggaagagtttggagggctccaaagaagacagacagatgagaacatttttggactatcttagagactggttaaatggttgtgacaagaattctgacgaaaacatggacagtgaaggccaggctgagggggcctcagataaaaataagaagctttctggaaaatgtctcccttttggatatggaaagcttacacaatgtctgtaccatcattgtaccttagacacagtgaacttgctttttatttcagagactcgtaggcaaaagagaatgtagccttgacccagatgagactttggactttgtaactttgagttaatgctgaaatgagttaagactttgggaaactgctggcaaggcatgactgtattttgcaatgtgagaaggacatgagatttgtggggtcagggacagaataatacggtttttctctatgccccttccaaaactcatgtgaaagtacactccctaatgttagagtcggggcctaggtggaaaaagctttaatcataaaggagtgggagtggatccttcacaaatggcaaagcaccaagcccttaatgccatcctcctgacagtgagtgagttctcatgagatctagtagtttaaaaggctgtggaacctctttcctctgtcttgttccaacttctgccatatgaaacatgtcattgccgcttggatttccggtgtggttaggaggggcctgatcagtgtgggcctggtcagtggacctaggtctgtgaggactatttagtgggatcgtggtcagcaggggtctgcttagagagggtctcattagtggggtctagtagtgggggttttggtgagtggggacctattggctgccagttgtttggtgtctggtcagtgcaaacctgggctgtggggcttgatcagtggagacctggtcagctggggcttagtgctggcctggtcagcatgggctgcggcaccggtgacaaggtcaaggggtgctattcagtggaggactgggcacatgggacctagtcagcagaccctggtgggcgtgtcctcatcagtgagg

SEQ ID NO: 31974 - DNA, 2300 bp, Homo sapien
agtgctaaagggaagcttacagctgcagatgcttaaattaaaaagaagaaagatctcaaacccatgctaaagggaagcttacagctgcagaaccttaaattaaaaagaagaaagatctcaaacccgtgctaaagggaagtttacagctgcacatgcttaaattaaaaagaagaaagatctcaaacccttgctaaagggaagcttacagctgcagatccttaaattaaaaagaagaaagatctcaaacccgtgctaaagggaagtttacagctgcagatgcttaaattaaaaagaagaaagatctcaaacccttgctaaagggaagcttatagctgccggtgcttaaattaaaaagaagaaagttctcaaatcaataacctaacattacacctgaagaaggaaaaaaaaaactaatgacaaaccaagcaaaaggaagaaaataacagattagagcagagataagcagaataagaccagaaaaaaaggaaaaaaaaacactgagtttgtttttttaaagatcaataaaaattttaaaactcacagctatattaagaaaaaaagagaaatctcaaatactacaatcataaataaaagagttgacagtacaacacatgccacagaaatgaaaaagattacaagacactaatgtgagcaaccatatgccacaaaactgggcaacctagaataaatttataaattcctagaaacacaaaccaccatactgcatcacggagaaataaaaaatccaaagagacctgtaactagtaagaagattcaaccagtaatcaaaaaccccaccaaaaagaaaattccaggtccagataacttcactggaaaattttaccaaacatttcaagaagaattaatgccaatcctctgcaaaatcttccaaaaatgttcaaaaaccagaaggggacattccagtccattctatcggtcaacatttatctggttccagagccagatgaacaccttttgtaataaaaacactcaaagaattagtaatatatggaaactcctcagtaaataaagattatacatgaagagctcacagctaacatcatactcaatagtgaaaaactaaaatcttttcctctaggatcaggaataagatagcaacttctcttcctgccacttctattcaccacagcactggaatttctacttagaataattaggcaagagaaagtaataaaaagcatgccaatcggaaaggaaaaagtacaaaattttgttcacagacaacaggatgttatgtgtaaaaattctgaaattccacaaaatactggtagaataatgaaattcaacaaagtttcaggatatagtaacactctcaagtcagttgcatttctataaactaacaatgaacaatctgcaaattaaattttaaaaagaggccaggtgcagtggctcacacttgtaatcccagcactttgggaggccaaggtgggtggaccacctgaggtcaggagttcgtgaccagctgggccaaccccatctctaatataaatagtaaaactctatctctattaaaaatacaaaaattagctgggcatagtggcagacacctgtagtcccagctacttgggatgctgaggcaggagaattgcttgaacttggaagttggaggttgcagtcagctgagattgtgccactgtgctccaacttaggaaacagagtgagacaccgtctcaaaaaaaagaaagaaaggaaagaaagagagagaaagaaaagaaaagaaaagaatagaaaagaaagagaaaacaaaagaaatttttaaaaagaatgacatttggccgggtgcggtggttcatgccagcaatcccagcagtttgggaggccgaggcgggcagatcacctgaggtcacaagttcaagactaacctggtcaacatggagaaaccctgtctctactaaaaataccaaaaagttagctgggcgtggtggcgtgcacctgtgatcccaggtacttgagaggctgacgttggagaattgcttgaataaggaaggtgcaggttgcagtgacctgagatagtgccactgcactccagcctgggagacagagcaagactccatctcaaaaaaaaaaaaaaaaaagaattacatttacaacagcattaaaaaaattagaggctgggcgcggtggctcacgcctgtaatctcagcactttgggaggctgaggcgggcgggcggatcacgaggttaggagatcaagaccatgttggctaacacggtgaaaccccgtctctactaaaaatacaaaaaattagccgggtgccttggcgggcacctgtagtccc

SEQ ID NO: 31975 - DNA, 2300 bp, Homo sapien
gggggtgcctcccagttaggctgcttgggggtcaggggtcagggacccacttgaggaggcagtctgcccattctcagatctccagctgcgtgctgggagaaccactgctctcctcaaagctgtcagacagggacatttaagtctgcagaggttactgctgtctttttgtttgtctgtgccctgcccccagaggtggagcctgcagaggcaggacggcctccttgagctgtggtgggctccacccagttcgagcttcctggctgctttgtttacctaagagagcctgtgcaatagccggtgcccctccccagccttgctgctgccttgcagtttgatctcatactgctgtgttagcaatcagtgagactccgtatgcgtaggaccctccgagccaggtgccagatataatctcctggtgtgccgtttcctatgcccgtcagaaaagcacagtgttagggtgggagtgacccgattttccaggtgccgtctgtcacccctttccttgaccaggaaagggagctaactccctgaccccttgcacttcctgagtgaggcaatgactcgccctgcttcagctagtgagcagtgcacttcacccactgtcctgcgcccactgtctggcactccctagtgagatgaacccagtacctcaaatggaaatgcagaaatcaccggtcttctgcatcattcatgctgggagctgtagactcgagctgttcctattcggccatcttggctcctcctcccattattttttaatattttctgaaaatcttctttaaagagagaaagccaaatgtcacccactttttcataaaaccttataggccaatctattattcttttcttttttggaggtggattttccctctcgttgcccaggctggagtgcaatgatgcgatctcggtttactgcaaccccctgcctcccaggttcaagcaattctcccgccctagcctcctgagtagctgggattagaggcatgccacaccatgcccagctaattttgtgtttttagtagagacggggtttttccttgttggtcaggctggccctgaactcctgacctcaggtgatccacctacctcggcctccccaagtgttgggattacaggcgtgagccgctgcccctggccatttttttttaaagataacctcttgctctgtcaccctcctctccatattatagctctggggccaagctgtatcacaatggaaatcatggagccacaggaagaatccactcagctttgcaacatgctgcccaaggggttgcttggagtaaccaaattaagatttttcattctgctcagagcaaaatacatgtgacaaaacatagacacgagccactttgcttagcacccagtgtcaaactggtaagacccaaacttgctcccagataggccgtgccacctctaaatctttttagaagcttctgcatattaataggcatccctagatgagactaatttgggagccctcatttttaaatgcacttcagggcattattcatttggaatgttccactgtaagttatctttagtaagattttgccatttctgtaagactttgctgcttcccaggcctaatgaattagccagaaggaagtaagttttccagaaattaaggatcctatttttacctaatatattggctttactcccatgttcccttcattgacttagccaatgattttttttcctacctaagcgtgcgaggaaaatgaaacaaaggggtagaacacaaaaatccctgtgaattttcaaaagccaaattttacaaccctccaaaattatcatttgctaccactttccttatgacccattcagatgtaggaggtctctaactggaactggattcaagccagttaactactgtatcaaatctgatcctggacccggtcccgtttctgtcataacttctaaaacatccagtcagtcatggctggatagcagtttggaacagaaatttgctcaaagaaactcagagctcaaaacacaaatccatggagctctgaaatccgagagagaatttaccatgatccccagctgctctgagaggtcaaagggcacaagtgttacagaatcctgagatgtcacttttctgcctgaaacctctggctggtggtgcctttacctgtgttttgctcgggcccactgggttcattccatccactcggctcatgctagtggtgtggatcccacacctgccaagggtgagctgggtacagagcagtgaagggtgtgtgagcaagcaagcatgggatctggccactgcacacagccaagcatgccagctg

SEQ ID NO: 31976 - DNA, 2300 bp, Homo sapien
acgaagcagcctgggtgacagagcaagattccatctcaaaaaaataaacctagaagaaatggataaatgaaattgaagccataataaaacatctcctagcaaagaaaagcctggattcaatggcttcactggcttcatggattaattttaccaaacattgaaggcagaattactatcaatcctacccaaactatcccaaaaaacagagaaggctgtagtatttccaaacacatcctatgaaaaagacaattcatcacgtctaagtgagatttatcccgatgatgccaacatggttcaacatatgcaaatcactcaatgtgacacatcatatcaacagaatgaaggacaaaaaccatatgataatttcaatagatacagaaaagcatttaataaaattcaacatccctgtgataaaaagaaaccctcaaaaaaaaactagatatagaaggaacataacacaacacaataaaaaccaaatgcatcagacccacagccagtatcatcctgaacagggaaaagctgaaagcctttcttctaagttatggaacaagacaagaatgtccacttccaacactgttactcaacacagtacaggaagtcctagctagagcaattcagacaagagaaaaacaataaaagggatgcacattggaaagaagtaaaattattaatgttttattgtttgcagatgacttgatcttatatttggaaaaacgtaaggactccaccaaaaaactattagaactaatcaacaaattcacagtcacaacataaaaaatcaagctacaaaagtgagtagcatttctaaatgaaaaaaatgaacaatctaaagaagaaaatcaagaatgtaatcccatttacaatagcgacaaataaaataaaataactgggaataaacataacagaagaagtgaaagatctctacaatgaaaagtataaaatatcgatgcaaaaaattaaagaggacacaaaaaaactagaaagattgtccatgttcatttattggaagagtaaatattattaaaatacccatacttcacaaagcaatctacagattcaatgcaatccttattgaaatactaataacacacttcagagaaatggaaacaaaatcctaaaatttataggaaaccataagaatggaatggaacggaatggaatcaacccgaatggaaaggattggaatggaaaggaatggaatggaattcaatggaatggaatcaaatggaaaggaatggaatggatggaatggaatggaatggaatggaatggaattgaatggaatggattggaatggaatggaatggaatcaacccgagaggaatggattggaatggaatggagttatcccgagtggaatggaatggaatggaatcatccgagtagaatggaatggaagggaatgcaatggcatggaatggaatagaattaacccgagtggcaaggaatggaatggaatgaaatagaattgaacagaatggaatcaacccgattgaaatggaatggaatggaatggaatggaatggaatggaatggtagggaatggaatagaatggaatggaatcaactcgagtggaaaggaatggaatggaaaagaatggaatgtaatagaaaagaatggaatgcaatggaatgcaatggcatggaatgaagtcaacccgagtggaaaggaatggaatggaatggaatggaacggaatcaacctgagtggaatggaatggaatggaatgaatggaatggaatttattggaaactaatggaatggaaaggaaacaaaccgagtggaatggaatgcaatgaatttcaatggaatggaatggaatggaatggaatggaatggaagggaatggaatggaatggaatgcaattcaacgtaatagaaacaaaccaagtggaatggaatggaatggaaaagactggaatgaaatggaatggattggaatcaatccgattccaatgcaacggaatagaattgaatggaatggaatggaagggaatggaatggaatggaagggaatggaatggaatggaaaggaatggaatgaactggaatgcaatggaatggaatggaatggaatttaattgaacggaatggaatagaatggaatggaatgaaatcaacccgagtggagtgcaatggaagggaatggaaatgaatggaatggaatggaatggaacggaatggaatgaacacgagtgtaagggaatggaatggaacggaatagaatggaatagaatggaatcaacccgagtggagtgcaatggaagggaatggaaatgaatggaatggaatggaacgg

SEQ ID NO: 31977 - DNA, 2300 bp, Homo sapien
gaacggaatggaatgaacacgagtgtaagggaatggaatggaacggaatagaatggaatagaatggaatcaacccgagtggagtgcaatggaagggaatggaaatgaatggaatggaatggaacggaatggaatggaatgaacacgagtgtaagggaatggaatggaacggaatagaatggaaaggaacgggaaagaatggaatggaatggaatgaacacgagtggaatggaatggagaggaatggaatggaattgaattgaatggaatggaatggagtggaatggaatggaatggaatggaatgaaatggaatggaatggaacggaatcaacccaaatggaatggaatggaatggaatggaatggaatggaatggaatggaatggaaaggaatggaatggaatcaacacgagtggaatggaatggaatggaaaggaacggaatgcaatggaatggaatgttatggaatccacccgagtggaatggtatggaatggaatggaatggaaaggaataaaatggattggaatggaatggtatcaaaccgagtggaatggaatggaatggaatggaatggaatggaatcaaccggagtggaacggaatggaatggaatggaatggaatggaatggaatcaacccgattggaatggaaaggaatagaatggaatggaatggaatggaatgcaatggaatcaactgtaatggaatagaatggaatggaacggaaagaatggaatcaacatgaatggaatggaaaagaatggaatggaatggaaaagaaatgaatggaatggaaacaacccgagtgtaatagaatgaaaaggaatggaatggaatggaatggaaagcaatggaattcaaaggaatggaattaactcgagtggaatagaatggaatggactggaatggaatggaatggattggaatagaaagaaattcaacggaatggaatcaaccagaatggaatggaatggaatggaatggaatggaatggaatggaatgcagtggaatggtatggaaaggaatggaatggaaaggaatcaacccgaagggaatggaatggaatggaatggaatggaatggaatggaatggaatggaatggaatcaacccgagtggaatgcaatggaatgaaatggaatggaatggaatggaacggaacagaacggaactgaatggaatggaatcaacacaagtggaaaggaacggaatggaatggaatggaatggaatggaagggaatggaatagcatgcaatcaatttggtggaatggtatggaatggaatggaatggaatggaataaaagggaatggaatggaatggaatcaagccgagatgaatggaatggaatggaatggaatggaatggaacggaatggaatggaatggaatggaatggaaatgaataaaaccgagtggaatggaatggaatggaatggaatggaaacaatgcaatgcaatggtatcaactggaatggaaagaattggaatggaaaggaatggaatcaccctgagtggaatggaatggaaagcaatgaaatggaatggaaactaatagaaaggaatggaaacaacccgagtggaatggaatgtaatggaatgtaatggaatggaatggaatggaatgcaatggaatggaatgcaatggaatggaatggaatggaatggaatgcaatggaatggaaaggaatggaatggaatacaacaaaatggaaacaacctgagtggaatggcatggaatggaaaggacttgaatataatggaatggattggaatcaacccgattagaaactaatggaaaggagtggaatggaatggaatggaatggaatggaatggaatggaatctacccgagtggaatggaatggaatggaatttaatggaatggaatggaatggaatttaatggaatggaatggaatggaatggaatggaatcaacccgagtggaatggaatggaatggaaaggaatgaatggaattgaatggaatggaattgaatggaatggaacggaacggaacggaatggaatggaatggagtggaatggaatggaatggaatggaatggaacggaattaactgcagtggaatagaatgtaaaggaatgcagtggaatggaatggaacggaatggaatggaatggaatcaacccgagtggaatggaatggaatggaatgcaatggaatggaatggtatggaatcaaccctagtggaatgatatggaatggaatggaacggaatggaacggaatggattcaacccgaatggaatggaacggaaaaagtgtaatggtatggaatg

SEQ ID NO: 31978 - DNA, 2300 bp, Homo sapien
ggaatagaatggaatcaacccgagtggagtgcaatggaagggaatggaaatgaatggaatggaatggaacggaatggaatggaatgaacacgagtgtaagggaatggaatggaacggaatagaatggaaaggaacgggaaagaatggaatggaatggaatgaacacgagtggaatggaatggagaggaatggaatggaattgaattgaatggaatggaatggagtggaatggaatggaatggaatggaatgaaatggaatggaatggaacggaatcaacccaaatggaatggaatggaatggaatggaatggaatggaatggaatggaatggaaaggaatggaatggaatcaacacgagtggaatggaatggaatggaaaggaacggaatgcaatggaatggaatgttatggaatccacccgagtggaatggtatggaatggaatggaatggaaaggaataaaatggattggaatggaatggtatcaaaccgagtggaatggaatggaatggaatggaatggaatggaatcaaccggagtggaacggaatggaatggaatggaatggaatggaatggaatcaacccgattggaatggaaaggaatagaatggaatggaatggaatggaatgcaatggaatcaactgtaatggaatagaatggaatggaacggaaagaatggaatcaacatgaatggaatggaaaagaatggaatggaatggaaaagaaatgaatggaatggaaacaacccgagtgtaatagaatgaaaaggaatggaatggaatggaatggaaagcaatggaattcaaaggaatggaattaactcgagtggaatagaatggaatggactggaatggaatggaatggattggaatagaaagaaattcaacggaatggaatcaaccagaatggaatggaatggaatggaatggaatggaatggaatggaatgcagtggaatggtatggaaaggaatggaatggaaaggaatcaacccgaagggaatggaatggaatggaatggaatggaatggaatggaatggaatggaatggaatcaacccgagtggaatgcaatggaatgaaatggaatggaatggaatggaacggaacagaacggaactgaatggaatggaatcaacacaagtggaaaggaacggaatggaatggaatggaatggaatggaagggaatggaatagcatgcaatcaatttggtggaatggtatggaatggaatggaatggaatggaataaaagggaatggaatggaatggaatcaagccgagatgaatggaatggaatggaatggaatggaatggaacggaatggaatggaatggaatggaatggaaatgaataaaaccgagtggaatggaatggaatggaatggaatggaaacaatgcaatgcaatggtatcaactggaatggaaagaattggaatggaaaggaatggaatcaccctgagtggaatggaatggaaagcaatgaaatggaatggaaactaatagaaaggaatggaaacaacccgagtggaatggaatgtaatggaatgtaatggaatggaatggaatggaatgcaatggaatggaatgcaatggaatggaatggaatggaatggaatgcaatggaatggaaaggaatggaatggaatacaacaaaatggaaacaacctgagtggaatggcatggaatggaaaggacttgaatataatggaatggattggaatcaacccgattagaaactaatggaaaggagtggaatggaatggaatggaatggaatggaatggaatggaatctacccgagtggaatggaatggaatggaatttaatggaatggaatggaatggaatttaatggaatggaatggaatggaatggaatggaatcaacccgagtggaatggaatggaatggaaaggaatgaatggaattgaatggaatggaattgaatggaatggaacggaacggaacggaatggaatggaatggagtggaatggaatggaatggaatggaatggaacggaattaactgcagtggaatagaatgtaaaggaatgcagtggaatggaatggaacggaatggaatggaatggaatcaacccgagtggaatggaatggaatggaatgcaatggaatggaatggtatggaatcaaccctagtggaatgatatggaatggaatggaacggaatggaacggaatggattcaacccgaatggaatggaacggaaaaagtgtaatggtatggaatggaatggaatggaaaggaatcaacgcgaatggtatggaatagaatggaatggaat

SEQ ID NO: 31979 - DNA, 2300 bp, Homo sapien
aatggaatggaatggaatggaatggaaacaatgcaatgcaatggtatcaactggaatggaaagaattggaatggaaaggaatggaatcaccctgagtggaatggaatggaaaggaatggaatggaatggaaactaatggaacggagtggaaacaacccgagtggaatgcaatggaatggaatggaatggaatggaatggaatggaatggaatggaatggaatacaacaaaatggaaagaacccgagtggaatggcatggaatggaaaggacttgaatataatggaatggattagaatcaacccgattagaaactaatggaaaggagtggaatggaatggaatggaatggaatggaatggaatggaatctacccgagtggaatggaatggaatggaatttaatggaatggaatggaatggaatggaatggaatcaacccgagtggaatggaatggaatggaaaggaatgaatggaatggaatggaatggaatggaatggaatttaatggaatggatcggaacggaacggaatggaatggaatggaatggaacccaatggaatggaatggattgcaatggaatggaacggaattaactggagtggaatggaatgtaatggaatgcagtggaatggaatggaacggaatggaatggaatggaatcaacctgagtggaatggaatggaatggaatgcaatggaatggaatggtatggaatcaaccctagtggaatggtatggaatggaatggaatggaatggaacggaatggacttaacccgaatggaatggaacggaatggagtggaatggtatggaatggaatggaatggaaaggaatcaacccgaatggtatggaatagaatggaatggaatggaataaaaggtcatggaatggaacggaatcaacccgaatggaatggaacggaatggattggaatggtgtggaatggaatggaatggaaaggaatcaactcgaaggctatggaatggaatggaatggaatgcaatggaatggaatggaatcaacatgagtggaatgcaatggaatgaaatggaatggaatggaacggaatggaacggaacggaattgaatggaatgaaatcaacccgagtggaaaggaatggaatggaatggaatggaatggaatggaatcaacccgagtggaatggaatggaatggaatgcaatggaatggaatggtatggaatcaaccatagtggaatggtatggaatggaatggaacggaatggaacggaagggaatcaacccgaatggaatggaacggaatggagtggaatggtatggaatggaatggaatggaaaggaatcaaccctaagtgtatggaatagaatgcaatggaatggaatggaatcaacccgagtggaaagccatggaatgaaatggaatggaatggaacggaacggaacggaattgaaaggaatggaatcaacccgagtggaaaggaatggaatggaatggaatggaatggaatgaaatggaataacatgcaatcaactttggtggaatggtatggaatggaatggaatggaatggaatggaatggaatggaatggaataaaaggtcatggaatggaatggaatcaacccgaatggaatggaacggaatggagtggaatggtatggaatggaatggaatggaatggaatggaataaaaggtcatggaatggaatggaatcaacccgaatggaatggaacggaatggagtggaatggtatggaatggaatggaatggaaaggaatcaactcgaagggtatggaatggaatggaatcaacacgagtggaaagcaaacgaatgaaatggaatggaatggatcggaatggagcggaatggaaatgagtggaatgaaatcaacccgagtggaatggaatggaatggaatggaatggaatggaatggaatggaatggaatggattggaataacatgaaatcaactttggtggaatggtatggaagggaatggaatggaatggaaaggaataaaagggcaaggaatggaacggaatcaacccgaatggaatggaacggaatggagtgaaatggtatggaatggaatggaaaagaatcaacccgaatggaatggaatggaatggattggaatggaatggaatggaatggaatggaatggaataaacccgagtggaatgcaatggaatgaaatggaattgaatggaatggaacggaaaggaagggaattgaatggaatggaatcaacccgagtggaaacgaagggagtggaatggaatggaatggaatggaatggaatggaataacatgcaa

SEQ ID NO: 31980 - DNA, 2300 bp, Homo sapien
aatcaaccctagtggaatggtatggaatggaatggaatggaatggaacggaatggacttaacccgaatggaatggaacggaatggagtggaatggtatggaatggaatggaatggaaaggaatcaacccgaatggtatggaatagaatggaatggaatggaataaaaggtcatggaatggaacggaatcaacccgaatggaatggaacggaatggattggaatggtgtggaatggaatggaatggaaaggaatcaactcgaaggctatggaatggaatggaatggaatgcaatggaatggaatggaatcaacatgagtggaatgcaatggaatgaaatggaatggaatggaacggaatggaacggaacggaattgaatggaatgaaatcaacccgagtggaaaggaatggaatggaatggaatggaatggaatggaatcaacccgagtggaatggaatggaatggaatgcaatggaatggaatggtatggaatcaaccatagtggaatggtatggaatggaatggaacggaatggaacggaagggaatcaacccgaatggaatggaacggaatggagtggaatggtatggaatggaatggaatggaaaggaatcaaccctaagtgtatggaatagaatgcaatggaatggaatggaatcaacccgagtggaaagccatggaatgaaatggaatggaatggaacggaacggaacggaattgaaaggaatggaatcaacccgagtggaaaggaatggaatggaatggaatggaatggaatgaaatggaataacatgcaatcaactttggtggaatggtatggaatggaatggaatggaatggaatggaatggaatggaatggaataaaaggtcatggaatggaatggaatcaacccgaatggaatggaacggaatggagtggaatggtatggaatggaatggaatggaatggaatggaataaaaggtcatggaatggaatggaatcaacccgaatggaatggaacggaatggagtggaatggtatggaatggaatggaatggaaaggaatcaactcgaagggtatggaatggaatggaatcaacacgagtggaaagcaaacgaatgaaatggaatggaatggatcggaatggagcggaatggaaatgagtggaatgaaatcaacccgagtggaatggaatggaatggaatggaatggaatggaatggaatggaatggaatggattggaataacatgaaatcaactttggtggaatggtatggaagggaatggaatggaatggaaaggaataaaagggcaaggaatggaacggaatcaacccgaatggaatggaacggaatggagtgaaatggtatggaatggaatggaaaagaatcaacccgaatggaatggaatggaatggattggaatggaatggaatggaatggaatggaatggaataaacccgagtggaatgcaatggaatgaaatggaattgaatggaatggaacggaaaggaagggaattgaatggaatggaatcaacccgagtggaaacgaagggagtggaatggaatggaatggaatggaatggaatggaataacatgcaatgaactttgatggaatggtatggaatgggatggaatggaatggaaaggaaaggaatggaatggaatggaatggaatggaatggagtccaacaaaatggaaagaactcgagtggaatggcatggaatggaaaggacttgaatataatggaatggattggaatcaaccacattagaaactaatggaatggaatggaatggaatggaatggaatggaatggaatggaatctacccgagtggaacggaatggaatggaatttaatggaatggaatggaatggaatggaataaaatggaatgcaatggaatggaaaaatccgagtggaatggaacagaattgaatggtataaccggagaggaatggaatggaatggagtggaatggaatagaatggaatggaatggaatggaatggaatggaatggaatagaatggaatggaatggaatggaatggaatggaatggaatggaatggaatagaatgaaatggaaaggaatggaatggaaacaacccgagtggaatggaatggaatggaatggaaaggaatggaatggaacagtacggaatgaaatgcaatggaatagattgaatgcgagtggatttgaatggaatggaatggattggaatggaatggaatggattggagtggaatggaatggaatcaatacgaatggaatggaacggaatggaatggaatggaatggaatggaaaggaa

SEQ ID NO: 31981 - DNA, 2300 bp, Homo sapien
aatggtatggaatggaatggaatggaaaggaatcaacccgaatggtatggaatagaatggaatggaatggaataaaaggtcatggaatggaacggaatcaacccgaatggaatggaacggaatggattggaatggtgtggaatggaatggaatggaaaggaatcaactcgaaggctatggaatggaatggaatggaatgcaatggaatggaatggaatcaacatgagtggaatgcaatggaatgaaatggaatggaatggaacggaatggaacggaacggaattgaatggaatgaaatcaacccgagtggaaaggaatggaatggaatggaatggaatggaatggaatcaacccgagtggaatggaatggaatggaatgcaatggaatggaatggtatggaatcaaccatagtggaatggtatggaatggaatggaacggaatggaacggaagggaatcaacccgaatggaatggaacggaatggagtggaatggtatggaatggaatggaatggaaaggaatcaaccctaagtgtatggaatagaatgcaatggaatggaatggaatcaacccgagtggaaagccatggaatgaaatggaatggaatggaacggaacggaacggaattgaaaggaatggaatcaacccgagtggaaaggaatggaatggaatggaatggaatggaatgaaatggaataacatgcaatcaactttggtggaatggtatggaatggaatggaatggaatggaatggaatggaatggaatggaataaaaggtcatggaatggaatggaatcaacccgaatggaatggaacggaatggagtggaatggtatggaatggaatggaatggaatggaatggaataaaaggtcatggaatggaatggaatcaacccgaatggaatggaacggaatggagtggaatggtatggaatggaatggaatggaaaggaatcaactcgaagggtatggaatggaatggaatcaacacgagtggaaagcaaacgaatgaaatggaatggaatggatcggaatggagcggaatggaaatgagtggaatgaaatcaacccgagtggaatggaatggaatggaatggaatggaatggaatggaatggaatggaatggattggaataacatgaaatcaactttggtggaatggtatggaagggaatggaatggaatggaaaggaataaaagggcaaggaatggaacggaatcaacccgaatggaatggaacggaatggagtgaaatggtatggaatggaatggaaaagaatcaacccgaatggaatggaatggaatggattggaatggaatggaatggaatggaatggaatggaataaacccgagtggaatgcaatggaatgaaatggaattgaatggaatggaacggaaaggaagggaattgaatggaatggaatcaacccgagtggaaacgaagggagtggaatggaatggaatggaatggaatggaatggaataacatgcaatgaactttgatggaatggtatggaatgggatggaatggaatggaaaggaaaggaatggaatggaatggaatggaatggaatggagtccaacaaaatggaaagaactcgagtggaatggcatggaatggaaaggacttgaatataatggaatggattggaatcaaccacattagaaactaatggaatggaatggaatggaatggaatggaatggaatggaatggaatctacccgagtggaacggaatggaatggaatttaatggaatggaatggaatggaatggaataaaatggaatgcaatggaatggaaaaatccgagtggaatggaacagaattgaatggtataaccggagaggaatggaatggaatggagtggaatggaatagaatggaatggaatggaatggaatggaatggaatggaatagaatggaatggaatggaatggaatggaatggaatggaatggaatggaatagaatgaaatggaaaggaatggaatggaaacaacccgagtggaatggaatggaatggaatggaaaggaatggaatggaacagtacggaatgaaatgcaatggaatagattgaatgcgagtggatttgaatggaatggaatggattggaatggaatggaatggattggagtggaatggaatggaatcaatacgaatggaatggaacggaatggaatggaatggaatggaatggaaaggaatggaatggaatcaaccggagtggaatggaattgaatggaatggaatccacctgataggaatgaagtggaatgtaatccaatggaacggag

SEQ ID NO: 31982 - DNA, 2300 bp, Homo sapien
tggtggaatggtatggaagggaatggaatggaatggaaaggaataaaagggcaaggaatggaacggaatcaacccgaatggaatggaacggaatggagtgaaatggtatggaatggaatggaaaagaatcaacccgaatggaatggaatggaatggattggaatggaatggaatggaatggaatggaatggaataaacccgagtggaatgcaatggaatgaaatggaattgaatggaatggaacggaaaggaagggaattgaatggaatggaatcaacccgagtggaaacgaagggagtggaatggaatggaatggaatggaatggaatggaataacatgcaatgaactttgatggaatggtatggaatgggatggaatggaatggaaaggaaaggaatggaatggaatggaatggaatggaatggagtccaacaaaatggaaagaactcgagtggaatggcatggaatggaaaggacttgaatataatggaatggattggaatcaaccacattagaaactaatggaatggaatggaatggaatggaatggaatggaatggaatggaatctacccgagtggaacggaatggaatggaatttaatggaatggaatggaatggaatggaataaaatggaatgcaatggaatggaaaaatccgagtggaatggaacagaattgaatggtataaccggagaggaatggaatggaatggagtggaatggaatagaatggaatggaatggaatggaatggaatggaatggaatagaatggaatggaatggaatggaatggaatggaatggaatggaatggaatagaatgaaatggaaaggaatggaatggaaacaacccgagtggaatggaatggaatggaatggaaaggaatggaatggaacagtacggaatgaaatgcaatggaatagattgaatgcgagtggatttgaatggaatggaatggattggaatggaatggaatggattggagtggaatggaatggaatcaatacgaatggaatggaacggaatggaatggaatggaatggaatggaaaggaatggaatggaatcaaccggagtggaatggaattgaatggaatggaatccacctgataggaatgaagtggaatgtaatccaatggaacggagtggaatcaactcgagtggaatggaatggaaaggaacggaatcgaatccaatggattcaactggaaagcaatgcaatgaatttaaatggaatggaatggaatggaatggaatcatccgagtggaatggaatggaatggaatggaatagaattgaatggaatggaatcaacccgattggaatggaatggaatagaattgaatggaatggaatcaacccgattggaatggaatggaatagaattgaatggaatggaatcaacccgattgaaatggaatggaatggaatggaatggatcggtacggaatgcaatagaatgtaatggaatcaactcgagtggaaaggaatggaatagaaaagaatggaatgtaatagaaacgaatggaatgcaatggaatgcaatggcatggaatgtagtcaacccgagtggaatggaatggaatggaatggaagggaaaacaggaatggaatggaatcgaatgaaattaaccctagtggaatagaatggaatggaatggaatggaatggaatggaatcaactggaatggaaggaaatgcaatgcaatggaatggaatggaatgcaatggaatggaatggaatcaacccgagtggaacgcaatggaaggtaattgaatggaatggaatggaatggaatcaacccaagtggaatggattcgaatggagtggaatggaatggaacagcacggaaagcaatggaatcaactagaatggaatggaatggaatggaatggaacggaatcaacctgagtggaatggaatggaatggaatgaaaggaatggaatttattggaaactaatggaatggaaaggaaacaaaccgagtggaatgaaatgcaatgaatttcagtggaatggaatggaatggaatggaatggaatacaattcaacgtaatggaaacaaaccgagtggaatggaatggaatggaaaagactggaatgtaatggaatggattggaatcaacccgattccaatgcaacggaatagaattgaatggaatggaatggaagggaatggaatagaatggaaaagaatggaatagaatggaaaagaatggaatgaactggaatgcaatggaatggaatggaatggaatttagttgaacggaatggaatagaatggaatggaatggaatca

SEQ ID NO: 31983 - DNA, 2300 bp, Homo sapien
atagaatggaatgcaatggaatgcaatggaatggaatggaattaacccgtgtggaatggaaaggtatggaatggaatggaatggaataaaatggatcggaatggaatggaatcaacccgagtgaaatggaatggaaagaaatggaatggaatcaacaggagtgcaatggaatggaatggaatggaatggaatggaatggaacggaatggaatggaatcaaccagagtggaatggagtggaatggaatgcaatggaatggaaggcattggaatcaactggaatggaacggaacggaatgcaatggaatagaatggaatcaatctgggtggaaaggaatggaatggaatggagtggaatggaatggaaaggagtgtaatggaatggaatggaatggaatgaaatgaaatggaatggaatggaacggaatcaacccgaatggaatggaatggaatggaatggaaagcaatggaatggaatcaacacgagtggaatggaatggaatggaaaggaatggaatggaatggaatggaatgttatggaatccacccgagtggaatggtatggaatggaaccgaatggaatggaaaggaataaaatggattggaatggaatggcatcaactcgagtgaaatggaatggaatggaatggaatggaatggaatggaatggaatggatcaacccgagtggaacggaatggaatggaatggaatggaatggaatggaatcaacccgagtggaatggaaaggaatagaatggaatggaatggagtggaatgctatggaatcaactggaatggaatgcaatggaatggaatggaatggaatcaacccgagtggaatggaaaggaatagaatggaatggaatggagtggaatgctatggaatcaactggaatggaatgcaatggaatggaatggaatggaaagaatggaataaacatgagtggaatggagaggaatggaatggaatggaaaagaaatgaatggaatggaaacaacccgagtgtaatagaatgaaaaggaatggaatggaatggaatggaatggaatggaaagccatggaattcaaaggaatggaattaactcgagtggaatagaatggaatggaatggaatggaatggaatggaatggaatggaatggattggaatggaaagaaattcaatggaatggaatcaacaagaaaggaatggaatggaatggaatggagtggaatggtatggaaaggaatggaatggaaagaaatcaacccgaagggtatggaatggaatatggaatggaatggaatggaatggaatggaatggaatggaatggaaacaacccgagtggaatgcaatggaatgaaatggaatggaatggaatggaatggaatggaatggaatggaacggaacggaacggaacggaatggaacggaattgaatggaatggaatcaacccaagtggaaaggaacggaatggaatggaatggaatggaatagcatgcaatcaactttggtggaatggtatggaatggaatggaatggaatgcaatggaatggaatggaatggaataaaagggaatggaatttaatggaatcaacccgagaggaatggaatggaatggaatggaatgcaaaggaatagaatggaaaggaatcaaaccgagttgaatggaatggaatggaatggaatggaatggaatggaatggaatggaaacaatgcaatgcaatggtatgaactggaatggaaagaattggaatggaaaggaaaggaatcaccctgagtggaatggaatggaaaggaatggaatggaatggaaactaatggaacggaatggaaacaaaccgagtggaatggaatgcaatggaatggaatggaatggaatggaatggaatggaatggaatacaacaaaatggaaacaacccgagtggaatggcatggaatggaaaggacttgaatataatggaatggattgaaatcaacccgattaaaaactaatggaatggaatggaatggaatggaatggaatggaatggaatggaatggaatctacacgagtggaatggaatggaatgaaatttaatggaatggaatggactggaatggaatcaacccgagtggaatggaatggaatggaaaggaatgaatggaatggaaaggaatggaatggaattgaatggaatggaaaggaacggaacggaatggaatggaatggaccctaatggaatggaatggaatggaatggaatggaatggaatggaatggaatggattggaatggaatggaacggaattaacccgagtggaatggaatgtaat

SEQ ID NO: 31984 - DNA, 2300 bp, Homo sapien
gtaaattacctctaagtctgttttctacttgaaaataatcatactgactcaactgaaagcaatgttgagaaataacagaggttgtacattctataaatttttatggacaccatgcatatgccaggccagtgttgggagctggggcaaagcagccgacccatccttcatctagcttaactcttatacacattattataaagtatgctgcaaataaattaatagagcaaatgactagctataattaattgtgggcttattgtaatttagaggtgtcacgaaggaagcccttttctgtgcaaaataacatgtgtctcagtctttgaagtaccatggtaaacggtaaaaaaaaaaatcataaatattacacacacaaaagatttgaaacttgtattaaatgacatataatttattatttcctagatgtagattaagctgaaacataaatagaataaagaatgcaggagcagcttccctgctcagagtaagggcggatattcttactgctagatctgcccaacaagcaatcccctatctcagagtccagaggtacctacccatcactgtggggccccgctgaggtactgtcatgataaaggtgatcaataaggatgttctatgagagattcttgtcttgcgaaagaacctgaagcaaataataaataacttcaggtacagttctgagattccataaagtgattcataaatgtttgaatgataaaaatattatataaatagtattataaggatgtaatttattaaagagaaattagcgattaagatggagggagcattttaccatgggagtgctgtgggacacagaaactggtttgtctgagccccttccaaatagcataacatttgtgtcctgatttaaaatctaaatttcagagcctggaaacccaaaagcctgggctgtagaaatctaaaaccaaaaagaccgtgcgttctgttacctgtgatttgtggtgtcacctactctttgaggctcccagatggcccagggccttaggatatggggatgccttgtaggtgtgttgttgttggagttggtggctgggatgagggtggaggcagggtagggtgggggtgggttggggtggggggaatcctccgttaatatctcgaaatattgttctgttaccataatgcggtgtgataagttagcttcaagtattgaaaaatcagggcaggactcatggaaatggtgcgaattcttgacttagggtcagaagaattcaccaaaattaacgtctccctctgccaaataacagccagtttcaatttctggacggcctctccgcgggagtgacaggttttcttagatgccgccgggggtctttcacgggctggtggtctgccccctggactcgtccatgtgttaggctcagtccgcagctcagagcgcggccctgtatttctgtctgatgtctggggcatacagatgtgtgtgacggacaatgctcgtggcattcgaagcctctttaacagacattagtgactagaggaaagaagtgtgcgaactctgcgaaacaagtatgcggactctggaaaagaagtacatttcgaaagtggggagaggatggatcttcgtaggagaaatggaaatttgctccccaccagaaggtttgctggaaattaagacgcggcaattcttaatccagtttcctgcggtaggaagcagctgacaagagaagtcccagtccgagttcggcgcgaactggacaagtgtcgtgggacaagtggcgggagacccggccgcgtcgcgccgggcgctagggacggacgcatttccctacttccagcagctggtacgagccgcccccaactgcgctgcgctgctctattctttgggaaacacttcgcgtgctttgtttcagacgccgacccatctttcttggtgggtctccagctccaccaatcccgcccgccactgggcggggtttcagggtcaaggtggaccaatttcccagcttcgcccctacacgcgctctcggacccctgggggtgactgacagcagccgggcccaacccgctgctccggagcatggcctccgccaggggcgttacggagacaaggccccaggaccaatcgtattggccagtggggggcggggcctcgttgccagctccagaccggcgctatgggcactccttttgtcaaatgagagacgcagcagggcggcccctgagccgcggtttagccaatggagaaggcgagatgggcgggctgggagtgcccggcggcgggtcctcagcttcgagccgaggtgcagtgagctggtggggggaccgcgaggcga

SEQ ID NO: 31985 - DNA, 2300 bp, Homo sapien
ctaatgttgggatgcttttctatcattttcttgccatgagcttacttaattgtaccagtaattctagggaagagaggggaaagtgaacatttcatttgagacttatctttctattaagttcaagttcactgctggcaggattttataactactgaagtactttttgttttaccttagaattcacatgaaaatttcatgaactttaacatttggttgggaatttaactttattgtcagactatttctaggaggtcactaattgcatgtttttaaaaaactttagtgtcaaattaattgagatagtatttaattatatcaaaacatttgtttattttctgagtttgtttttttacaatattggaaataaatgacgctgacatttttcctttttcttttcaagattttcagctgaactctcatctctcaacactggcaaatattcataagatctaccacacccttaataagctggtaagtcattcttttaaagacaaaattaccaactgtttgaagtagtcattttgtataagtgtatttgataaaaatttagattctagatattaggatatcagttgtttatgaaaatgctaacggtatgtgatttcttcgtaataacgaacatatttctttcagaacctaacagaagacattggccaagacgatcaccaaacaggtatctgtaaatgctaacactacttaattttaaatagcttcttaatattaggaaagagaaatactagctatgaatgcgctatgttgtcataatgtactccattaacaaattgttccttggctgaggttgtttttcagggagtaatgaaggcagccatgttatagcttcttcccagtaggaaatctcttctggaagcactttttaatgcctttaaagaggctcgggattctcatagtttcaagataccttgttttctctactgcagtattttcatttatattaaaaaggtgctacagtaatgcaatttgaaaggtattccacaaatatttgagaaattcagctgaaaaatgatttaatatggtgtgtgtgtatgtgttcatagttactgaagatttagaaatcagaaaattgaagcttgattagtataagttatcctctaaccctgtggttctcagagtttagctggcattatgatcacctgagggaaggccttgtttaaagtacagatgttaggttccaccccagagtttctggttctgtagacttggggtggggccccagagtttgctcctatgtgatgctgatggagctggtctggagaccactctttgagaaccacttctctcaactgttagtaatcatcaagtccagaaacttgcatttgatctatggttactaaaatcctagcaaaaattatttaaacacattttaaagtttttgaaaatggccatagtaatagacgaattgaaatttgtcttagtctgggctgctgtaacaaaaataccttaaactgagtagtttataaacaatagaacttgattgttcatggttctggagactggtaagtttaaggtgaaggcaccagcagatcctgggtctggtgagggtctgttcctcactgatggtgcctcttgctcactgcatcttaacatggcagaaggggcaggcagctccctcaggcctcttttataagggcactaattccattaatgagggctctacctccctgacctaattgcctcccaactctacctcttactaccagcagtctggggattagctttcagcatgtaaattttggaggggcacaaactttcaggccatagcagtgcttgttggggaattttgaatagcacaaaagtaaatagagtggaaagttacagtcgtcttttagacaactatttagacgtctctttagatgactaaatagagtgaaaagtgacagctgtcactttctgccagcacatggtttaacattggttctttcagacttttttttcaaagcaaaaactctttaagaaaaaggtatgatttctcattttctattcttagcataagttttaattctttccagtggaacccaaacctcctgaacctctttcagtgtcatccaaagctttgaacttctatttctggataaagatttgttcacaaatgaactgcagttcaatcaccttttttgacttcagacttttctttgccaaaataaaacagtacagcaccagcatttcctctgtaatcttcctttatgataccacctcctacatctataaagtgttttgcagccaagccagcgtggagctactcttccacaacacctggaaggaggagctctatctaaatgtct

SEQ ID NO: 31986 - DNA, 2300 bp, Homo sapien
gcaccattgtatatataatgatctcagctttgaacgtagaaaaaatatctttgttcctgggcaaatcaattcaatttctagtattgcataagaagcacactgtaaaaataaatcactcctccatgctgtaggctacctttgctgttcatggccatgtgtacctgaatttaaatgcccttgaaaatatgggaggattgaccttgtatgaaacaaaagttttaaagttacattgtaaatttcattcacttcactccatgcattcatttacacacaaacaacataacccagtgacagactgcagactattaaaaatgtaaaacattggatagatagatagatagataatgttccttttttttttgggagttcagaacagatacaaagcaaaacaatagcaacgctgaatgttactaatgtgtatcaattccttcagtgtttactgaaagatttctgtaagaataaagacaaatttggaggctaaagcaggaaaaatgaccaggccataagatgtgagatgaatctggaaggatacacaagactgtggctggccgggtgtggtggctcacgcctgtaatcccagcactttgggaggccaaggtgggcgggtcacctgaggtcaggagttcgagaccagcctgaccaacatggagaaacctcatctctactaaaaatacaaattagtgagttgtagtggcacatgcctgtaatcccagctactcgggaggctgaggcaggagaattgcttgaacccgggaggcggaggttgtggtgagctgacatggcgctcttgcactccagcctgggtaacaagagcgaaactccatcttaagactgtggctaagaggaaaaggcattgaacttggaactgggaatgaactgaaagtgaatttcagtatgcgatatgcatagatcattctttgcagaagccacatcttgtagtggctccacatgaacttatcaagctaggtcattaagtttacctagataacacaggctttgaataccaacctgagggatttggactataggcaataaggagccctttgaggatttcaaatgaaggaataatataggaaatacgttattgtaggaaaataatcctttggagtcacctaggatggatcacaaagaaggaaagtcaagaggcagaggcaagaaagtcagttaagccattttagtatttcagactgcagtgatgaaaactaaactgagtgccattagaacagaaaggaagggacaatttcttggaaactcatatactcaataatgtgattatttgtacacacagtggcttttaagtggaatttagtttaaaacaaatcacaaaaattacccatttttaaacttatttttgtgatacattcagccattgtaatttgtacacacttctttttaaaaactttgaattttttctcaaaaatgtttggtacaaaagatactcaatgtttctgtatcgtattacatcttcatggcttggagccagaacatgtatttgataacacattatgttgtatgtatctaaatgatttcataatgatttgaaaagtcacacaagccacacagcaaaacttgtatttcttctagtcatgaaaagtaagagcctcttttgtgagttaaactttttactcatagagttatggagggtcacggtttagtgtaactggttgtcatttatgtaataaactacatggttgattactatgttgtagataagcataatagactttgctctgtattaatggcctgcaaagaaacagggaagtctttaatcttggtaaggtttcattcatcccaaagcacactgtggagtgaaaactactggaaaagcagatgcagaggtgaggcctaactgaatatgtattttctgaaaaatcaggggagtcctttctttaaaatgtgacataaatgtaattttatactatggctatttcattttggtagctacattttcatgccccagtaagaaatcaaacattcgcttaaattggcaaccaagacaagataactttccgaaatcttaaattgaaaattaaatttgctgcttattgctgttagtttttatatattattgtgaataagtcaattcattttcctttttccaggcattatgaaaaacctctatttcagagtcattaccatagttataggtctttattttactggaataatgacaaatgcatcaagaaaaagcaatattttattcaattctgaatgccaatggaatgaatatattctgacaaattgttcttttaccggaaagtgtgatatacctgtggacatatcacagacagcagccactg

SEQ ID NO: 31987 - DNA, 2300 bp, Homo sapien
attctatagcaatctgcaaagactctgtttcaaagtaacaccacgttcacagatactggaggttaggacttggatatgcctttttgcagggcactattcaaaccactgcaaagtgaacaaaggtgtaagtgtcttcataatctgactcatactccagccctggggacctgtgttttgtgcttccaaatgctaatatcatgcaacagtcaaaagaaagagcaaaattaaaggctgtgatgtatggtagaaagagcaaagactagtcagatggacctagattcaatactggctctttaggagttgaaaagatggtcagccatttaacctctacaagccttgatttcttcatttgtaaaagaggcattgccaggcacagagttgactttaaatgtcattatttcaggggaaaaaaggctgacaatagtacatttgaaaataacccacattaaaatgtggtcatgtgagtgaattggatctctttaaaagagaatagaaattggcattaagaatagtgggatgtcctgtcagagatggacatcagcgatgaggaaagaatccaagagaaggtgatattcaaatagccaaaggagcatttggtttcaggaaaattggctaccaggtatctcaccacctaagtgggagggaggttggcaaaatcaagtcagggcttagaaattgggatactgggcagatttctaagatatctattaagtttaattactgtgctagacattggagattaaacgatgagtaagacacctaccttccagatagaacacaccatcttttgaatgaaatcagcaggtagacaagataaaaatacaatgcaatctgaagtgctagaaaaggctaggcacacagttaaggaacagatctgtgggagcctctgaagcctttagagaaaatatgacgtttgaatagaatagttcttgaaggatgaataagagtgcgcgtgccagggaagaagaactttcccagcagagagaaaaacgcaaagcttaggaattaaggactagaagataggaactcagaatcagttaaaagcccagttgtgcaaattgatcaatgagaccacaggcagaatattaacacagagccttactgctgactcctgcatcattgggctttaacttagaattttcctgcctaaaatgcatgtttgtcccacagactcagagaggagtgagtctagagatatgagtcaagtggttccagcatttaggaaaaaagaaatgcagagagactgatgaccagctaggtactgactcccactgaattagacagtactagggcccaaaggtgcttattagaagtgattcagctacatgaggaacagttgctattgacttcactgcattttttttcagctaaaataattattggattatatctacaacagggaacaatgaatgtctactcaagtaactcgtacatttgagtggcttcccggtgttcagtaaatgtccgttcaattaggttcccgaggatatacatggtaacactatctccaacactaaatgaaaaatccatccccagtatcgcaggataaaaacatcagacttcataggcctccgaagtcaagcagcccgaaggattcaacgtcctccttgaggactctcagtcttcaagactccagccacctaagtgaccactcgttcacttctgcccacgcagtcaccacgccggtccgcgtccacttgtggtctcgatatcggcccctcccaccctagccaaggagaccttggtccgagaaacaaagagagcctcacagctccggatggcaccgatctttcagcgatggggaacaaaggggaaggggagaagcgtcctcgatttttgagggtgccctttctgaggaatctgcaggcggcccggggtggagcggaatccccataggccccttctggcccctgtgcaatacaacgcgccccaggccaaggtcctaggtgcaggggccgccgcagagcctgagcccgcagggctgggatgcgggtcgtcagggatgcgggctggggaggggagggtgtgagcagcgggtgcccccagtccccgccagggcgcaagcgcaggcgcgcagggtgcggtcgcggaggggcgggcacagtcgggcggggagctcggcggcggcgggcgcgggaagatggcggcagcggcggcggcggctgcagaacaggtctgtgagtaccgccgcggccgcgggctggaggagcgggggaggccgcgtcctgccggctgggcccgcgggagccctggccgggggtgcggggggcgcgggccgcagggtctgggttcggcggggc

SEQ ID NO: 31988 - DNA, 2300 bp, Homo sapien
ggggcaatttacaaaagaaagaggttgaatggacttacagttccacatggcgagggaggcctcacaatcatggtgggaggcaaggaggagcaagtaacatcttatatgggcggcagcaagcttgtgcagggaaaattccctttttcaaaaccaccagatcttgtgagacttactcactatcacgagaatagtacaggaaagacctgactccatggttcaattacctctcactggacccctcccacaacacgtggaatccaagatgagattttggcaaggactcagccaaaccatgttagtaactgtttggggtaacttttttctgaataagttttcatacaaacaattcatattcatgatagaaacttgaaaaaatcagaaaaatataaaagagcaattaaaataacccacaattataccttgggttcacattgtgtaatttaacacagtgtatacaatttagtgttctgcctttttcgttatagtgaaaatttgtagatagtatatattctacaacaacaagatttttagtgtgcaacatttcattatttgcttaaccattaccctattgttggaggtttagattgtttacaactagttttctttattaaatataaacatactaatccacattcttaataatagcaaatgtaggccagtattagtttatatttaataaacagcaattactagagcaattgctactgcattttgccaagcattgtactaaatacatgaattatcttactaagtttcataataatcctatgagagaattattttccttttacagatgatgaaaccaaggattacaggctaattaaggtgctcacagcaaggaaaaatcctttacctctaatttatctgacataaatgttccaatatgggtttttatgaataagtaaatgggactgttcaaagattccaaatgcctgtagaaatatgtaattattaggtccaaattgagaaatttgaagtttttctcaattcattttacatatatatatatatatatatatatatatatatgaagttgtttaatgaatatttagctgttttgttgagtgggtatttttaacattagaaattattattctactccaatcaaataacatgttatacccctatagtccttattttgtggtctacagaaaatagtaggaacacaggctccaaaactgagcctttcattttcattagcagatagtaaagccactgtaatcaagagaaataaaaaatgagaggtggtgaaaattcttgattttacaatacttgaatatatgcagtgttcacagattttcaagtacctacagagatgaaactaagttaaactagctagctaaccagctgaggctctgctccccaccgctgttttaatgaatggataggaatgatttataatcagcacattttttgatggtatataaaagagcttgcttcgaaagcgcttaaagatggtcgaaatggtttcctaagtagttgaacctgtttctgtagcagaatacacacttttgaaatagtgccaaactaggtcaagaaagtcccaattagagaattcagaattaaatgaagctttagagtgctcaatgactctaaaaaaaaaagtactaaaatacatactgccaaatcttatccaaacctgagggattaactttaatttgtgaacatcctggagctaaactctattaacttgggtacccacccagtgggtcaaggaacaaagtaaaagctagaagtaagaagtactgaaattttagttacaagtttcatacaggtaaacccaaggcgctacaaatgaagaattaaaggaatgaaaggcgaaagaataaaggggccaaagaggtgatctcctgagagcctagccccaaacttctatagagacttaacttctgcttttctggacacgcgtgggcacccagaaccccgaatggggaggaatgctgtagacgccctgctgccctccagcccgcgcggctgcgcgtctcagtccacccctggggcgcgcggctgtcacccagggcggggcggcgcgggcgttgccacgacgcgggccgcgcgcgtccctggcagccaacccgtccacgtcaaggtttgtttaataatcgccagggtatctatggccgggctcaggcggctgctggggagccaggagaccgcgcgggacggcggatgaggcgcggcggctgcggcccagggcacctcccctctggcttcccgaacccggccaggtccgacccgagggggaggatggaaacacctgccgcgctctgagccccccagaagagaacacccttcccgcc

SEQ ID NO: 31989 - DNA, 2300 bp, Homo sapien
cacacgaactgctagggaaactgtgaaatgtggtctagttttgtgtccaggaggaaagggagataggttttggtgactacacagcagtcctgccacaaaagcataccagagccaggcagctcgtgggtcaagtgaggccctggtctgtctgcagtgggtcccagagtgaagtaattaccctggttatctactgttttgcccttgcagacaaacacgtgtgatcaaaatctaaaccattgccttgaactcattgagcaagttgccaaggtgcagggacaactctttgggatcctcacagcagcagcccaagaaggtgagaatggcctgtaatttcccatccagttctgcttgcctttctctcttttcttggtgcttttttgtgttctttgactgttggtgtggttgggtttctctcactgacctgatgacctgatgtgtgtattctctcttttttttttaattatactttaagttttagggtacatgtacacaacgtgcaggttagttacatatgtatacatgtgccatgttggtgtgctgcacccattaactcgtcatttaacattttaggaggacgtaatgatggtgtggaaacaatcaagtcacgccttttgccttggctggaggcttcctttactgctgcttccctgggaaaatctgttgacagcaaggtcccctctctgcaggtagggatgctgaaggataacccttgactttctgaacagtgagataaaacgaatcagaaacctccaagagaagaagaggacttgattttggtagactgatagagtgtcacaatttgtgatggatattggtggtttccatgggacggtgttagtttttgaacaggtagagatcagactagaaagagcgcacataccttgcttaaggcatccacatcattacatctgggcaaccaaaacattagttactttactttgaaacatttatatggatttacctataatcctttctaaaacagaagcatttagaaagcatttagtctgttctgagaaaaccaaacatcacatgttctcactcataagtgggagctgaacaatgagaatacatggacacagggaggggaacaacacagcagggcctgttgggggattgcaggggtgaggggagagagagcgttaggacaaatagctaatgcatgtggggcttaaaacctaggtgacaggttgataggtgcagcaaaccaccatggcacacgtatacctatgtaaaaaacctgcacattgtgcatgtgtatcccagaacctaaagtaaaaataataataataataataataataataataataacagaaagaaagcatttagtctgttctgagcaagagcattataagatagtggctgaaggatccctgcttggagatcactgagcagaaaaccagtccctcttttatggccctgggtaggtatctaaacatttatgtctcaattttcttatttgctgaatggagacaatggttttgctgatctaaaaggttcatttgtgagaattaaatgtgataagcacactaaacaagttacacagggcctgacacatgttaagtactttatagacttcagttatcattaagtaattttttttccctgagaatttatggacgcttctcaggtttttatcctctgtgtgggtgttattctaggtataaagatgtagaatttcaaactgtttttggaaattgaggtataatttatattcagtgaaatccatagattgctatttcagcaaatgcatatacctgtgtaaattcccatccctattgggatatcagacatctccatcactctagagcatttcttgcaccttccccagggcaaccatcttctgatttttatcactctagattaattttgcctgtactagaacttcatgtgcatggagccgtgcataattgtgctcttttgagttgggctgttttttaaaaattcatccatgtcatttaatgtattcagactgttttttttttttttttttggtgtatctttccaggacacgtttgatagggagagacataaagatcccagtcctcgggatcgggatatgcaacagttagactctaatttgaactcaacccggagtcaatgcaaccaggttcaagacgagtaagaggaatgcaagttatctttttccaaaaagaattgttttcaatttaattaagttttaaattcgaaaggagaataatggctcatgtaaaatgtgggcatttgcaaataagtaatatgattgtgtgtgtgtctgtgggcatgtgtgtatgacagagagagagggagagagagacaga

SEQ ID NO: 31990 - DNA, 2300 bp, Homo sapien
taagaagacttgctcagccgcaattagatttacccaaggctcatccatagaaaaggaaaagacaggagcctggaaggactcaaggccccagcagtcatctagaggatgactttgagaggcttggttataatccaggaataaagttagagttgcatgtccttccccttgtccttgttctgcagaacccccttgtcaggtatgttggtgaggttgtggctgtgatggcttaggagaaagaagtgcccctctgtcacaagggagggaggggcactcatttttctgatgatgctcttgtttgcaatgagaacagggtcctgggggtggcttgtaatctggaggttttggacattttcttctctagtgtcctggatttctgcagtgatgacaggcccgtgttctgttagtgttatggggacgagccttggggttattggctaatgaaaaagaatgtgccaatgctgtcaccgtgtaattagtgtggtgctggcatttttcctcctccaatggaactgtttttgttttggatatttcctcctgattattgaaaatcttaaagcctacatttaataaagtaagaaagggagtttgtgggccatgctctaatttttggagtttttgtctgatgtctggggaagtctgacttataaaatgtatggccagaattgataggctgttagggatttgggggtcaaaacttgtgtatttatgcacatcctccaccagtgtagcctggaaaaggatgaggctctcagatggctcctgagtgatttcttgtaatttagaaaaattaacaggttttattactgcctttttcatttcttccaacaaaaaagagatcatataatgtcatctgcccctgcctctctttgggccggcatcagcggcccggtattgccaattgggttctgggtcagggacagcttctgccccggctttatcattgttaggattatggacatgagcttcatctgcccaagcttgaccatatgcgtgacctttcttcatgggaacaacaagtagttaataccacaaatatatcttgctagattcaatcaaaggcaatagttgaagcctaaaattcttgaatgaacttagagggatccaggctaaatgaacccaaacttggattaaatttgtgaaaaatcagacattagaaaagggacatgaacttggattgctcctaaatctccattagctacctcacagagaggcaaaacattttgggattttccgaggactctgtactagtggtatatgtaactcctgtgtgagtatctgacagggataaagtatatggacatggggatgtttgattaggggatggagcagatggggagagcgtaggtaaagcaggagcaggctgaggacagagtgataggcaaaagggtcatctaagacaccagacttgaggaggtaggaagtttcttggaaggatacatgaaaatttttatgtaattttgagttttgggataaagccaaaaagacctgaacatatgggataaagacaaaaagaccagaacatatcctttttgagggtctggtaaaatgcatctacttgtaaaataatattgtgatgcaaagttccattaataggccaatttgatgtattagggattacaaaagaaaattacatgcttctttttgagcgtttatgggtcaaaatcggactgatttttaagaacgcatgcattctggagatgtatagaaattctagttgcttataaatttttgggacagaagtctggtaccagatgctggagtcagataatagggaagtctaatcacttctgaattcctcagataaggagttttgcctccggatggtcggattcattggccaccagatgatctttgctttacttaagaagcaaatcaaaggatttccctggctgattctcgctcaccaacaggtcctccaggagccggtctcccagccctgcccctcgcagccgtagctgcagccgcagcagatctgccagcccctccaccgctgtcaaggtcaggagaccgtccccaaaccgctccaagctgtccaatgtggcgcgcaaggctgccctcttgtcccggttcagcgattcctattcccaggcccgcctggacgcgcagtgcctgctgcggcgctgcatcgacaaggctgagaccgttcagcggatcatctacatcgccacagtggtatgtgacgcctgcgggactcccggctccttagggcagccgggagacaagttctgtaacgtgaatggaacaacttacaaagactagtggatcctgaggtcactgaagtgggggagattccagtctcc

SEQ ID NO: 31991 - DNA, 2300 bp, Homo sapien
ttcacagtgtaaagcaggaaatggtgtgggagatgtgagaccattctgaggtcagcgatagcccaaaggctctgcagtattccctccaatggccaaggattccgtgtgtcatctgcaggagtgagtaggcctgctgtatttcttgtaactgctgggtgttacaaaataagttacaatgttttacactttaaaaaaaaaacagaaggaacatttgctttattggttacttactagtttagcctctaggttatggcacagcatgctaaaaaatcatgtgtttaaaagtaaatgttggtaaaatgctggcatctggtcctattgtgttgatgcattttcacttctgtggtcataggaaatggactggtctaaagagagtgaggcacaacacaagcagggcattagtttgaataggaagtcaatcatatttggttttatggcctggtgtattttgggtttaagataaaatagggaaaaatgtcagaaatgatccctatgcatttattttcatggatacccttaatttcatgggcatgcctaataatgatctatgttctaactggagcttagggcttattttagatattggagtgtagctttattacagatggattttatctttcaacattgcattttgatcaactttgtatattcacgtgtattaaaatattgtgcactaaatgttttgcccttgtttgctattatatggtcaaggcatttatcagcactattgtaatgaactcatgtaagtggcatgggtcagggaaaattatttcctacttttctgcctaattaaatttctgttttccagtattacattaatttatttttggcttccatttctgtataaccaaaatagttactgtatttgtgtggcattcctattattttgttgctaaaaatattgtagtttttatttaaaataatctgtaccttaattttttaaaatgtaaccaattcaagcactttaagcaataatgtcaatcttgtgaaattttaatcagtttaacaccctgcctctaaaattgtttgcaaaaaataaataaatgaataaaatgggaattctctttctagagaattatatccgggtaatgctacacacatggacttaaaatcctttttataaagtgtgagtcagtggcaggtcttatgtccaagtaattattacaaacaattttgaagcagtggaaatgtacagaacattctgatcattataatatataaaggcagtattactctcaaggttgataaaaatcaatgttctggagataactcatcactttttttgagtgaaaaagatcaacagaatttaattcaggaaatggtatctggagaatagcaaattgagaatatcagtgaaaagaatttagggatagttaactaggcatcacagtgaatttatttttggggactttgcatataaaatccttttaaccagttatgaaatgaaagatccattccccaaataagaaggcagcttccagtatctggtttctaggaaggagtaggactgtgattggtccctggtgccctgacttctgggcctgtttctgagccatgggggaccccccagcttcagaaatactcacgtgggttcacaccactccctgccccagaaggagggcaggcacaggtccatgccatgtggcctcagtgaagcctacagtaactatgggtagggctgcttttccctgtcaatcacccagggcacctgtgggtggacagaagattgtcatcggaatacatgcttgggcccaattatgggaataaaacctcatagaccaagagcagggaatgtgccagtaagtgttgagtctcccagctgctgtccatcttctcggggcagtgcagttgaacctgactgagctggaacagagactgttgggaaggtcacttctgtctgccacgaaggccaaaggcagagaagaccttcttgggactgtgtttttctttcctaggcctcactttgtcctgggatttataggacaggcctgtcactaccaaggtgacacaaattctagagaatgtattttcccatttcttcaaatttcctttcctctctttttattgatacttaaaatacctttactaaaaaaatgaagccttccatttccattcccttatatttacatgaagataaaaatacttactaagtcgttgtatttgtccattctggcagtgctataaagacatacctgagcgtgggtcatttctgaagaaaagaggtttaattggctcatggttttatgggctgtacaggcttctgttctgggggaggcctcaggaaacttacaatcagcaga

SEQ ID NO: 31992 - DNA, 2300 bp, Homo sapien
ttgaacacttcagttttaggatatataccattaaaaggtatgcaaaagatccttttaacttgctgatatagcactcagtaatcagatgctgttcaatttccattatgtcgatggtgttttcaatcctgtgaactttgcaatccatgcgccaatgttggcagaaatactgaactcttattacaaaattttcatatcatttaaagctttagattattgcctttatagtggaacttctgtgaaattgagtcctgagatctgagttttagccttgaggttgctcctgaccttgagacattaatactcaaatcttaaagttttctgggcctccgtgctgggattggtcatagttcagttgtttcctgtcttctctcttctcttcctctcccagagtgctcagcccaggttaccacaccaacttaatctgtaacatttcggtaagtcatctgggcaggatccttgatcctctaagccttatgtgactgatctgcaaaaaaggagataatagcatgtaccagctgatagttatggtggcgattaaaggagatcaggaatgtaaacattgggtgcagtggttcacgcctgttgtcccagcgctttgggaggccaaggtgggatgattgctggagcccaggagtttgggatgactcggggctgcccagcctcaggctgggcaacatagcgagaacctgtctcttaaaaaacagagagagagagaagaaaatcagtcatgacttacaatggaagaaattatcatcaggatgtatttggaaataatatttaggttgaaagacttaagcaggaatattatttctcatgtccactggaaaacacagtgacatgactcccaaaaccttcagtcaacaagtctgtcttactgtttcctccccagattctagggatattagcaatcaacggctctcaaatctttactcttggttagataaaagctatcttcaactaatttttcttctgattcaatttgtcattaaatacactgatctaagaatttatcacgcatctcacttgtacaatttctcctttgaaagcatcgaattgcaaccttgtatgtgtaactgttccacacattcagaaacgggccccttcaattcgcgtggacctatctgctaagtggtgcacagactcgcgctctgagcccgcagccacgacctttaatgcgggaaatgtgcatgatcccatacagcgcccatctcaacaactagaggctgggtgcacccgagaggggtatgcctgccttgaagatatggaaaagttttgttttcgttctttccactccttggacagtccctagtgcttgcgcggaaccgggacgtctcctttggacccgctaatgtcacaagccgcccgagcgcgccgctgctggcctccgcccagacccggattcctcccccttcccggcgccctttctcgggcgcccggcccgcagctggcgagggctctctgaccgctccggtgtcctcgccccattttacttcttgggtccccgccggtgccatctggttggaaccctcgggaggaactaaaagttggacgtcgccacccctacccctcgccaaaaaataaacaccgggggctgccgaggcccgccaggaggaaggcgacgaggaaaaagcgaggacggaaggcggccccgggttcgccccggcctgggccgcccgcttccccaccccgcgcaccgtaccgtccccggctccctggctccccgacggcgaggagggccgccgcttccgcgtcggggtcggccgggggacctgcgaggtgcggctgccgcagcggcgcgccccggagcctggcccggcattccagtccgaatagaaagaggcagggaatcaaatggaaaagcaggaggccaggcctgggcgggcgagctgggaaggaggcggcgcggcggggcccgggaacccagcctggagcgctctgagcggccggctcggactcacgcggcgcgcccgggccgcccctcctccccgcgccgccggccgcggcccaggctccctcgctccgccactccccgcccctccgcgctccctccccgccctccccgcgccgccgcctcctcctcccggcctccctctcccagccaaactgaaagccggaccccaggccgccgcgctgccgcccggcctccccgccagcgcgccaccatgggcagtcccggtttccccttgtaaagatggcggtgagggatcgctgcaacctttagactaatgactgtccgaaacatcgcctccatctgtaatatggtgagtggccgagccgcctcggggtcgcgcccgactcgc

SEQ ID NO: 31993 - DNA, 2300 bp, Homo sapien
tgatttaaaaatttttaaatcactattttacaattactaacataaaaagttgtataaggaatgaacataaatggatgtcaaggctaaagggtgatggctaactttattttatttatttattttttttcagatggagtttcactcatcagccaggctggagtgcaatggtgtgatttcggctcactgtaacctccacctcctgggttcaagcaattctcctgcctcagcttcctgagtagctgggattacaggtgcctgccaccatgcccagctaatttttgtgttcttagtggagtcagggtttcatcatgttggccaggctggtctcaaactcctgacctcaggtgatccaaccgcctcagcctcccaaagtgctgggattataggcgcgagccacagcacctggcctgggtgatggctaactttatactgaagggatcagatttacaccacctgagcccactgatgaagcccagaaaaatggggcaaatacgacaatgtgtacctcgtgatatgatgcgccaggaagtataaagttttcttgtacaaaaaagtcaatgtgaatttcatcaagtcactttataggaaatatgagagaaaaagaaataagttaaattacactaaaatgatgtaataagacaaatccagaacgtgggtcatgtgtaaaatttggacaattaatccagtttctacaacaaatccctcgtcagatgagggaagacggtcgttacaaactaaaagagactaactaaatgctatgtataggtcttatttgaaacctgattaaaagaaactgagtgtaaaaagacagctctgagatgctcagaggaatcaagtatttttgcaaacacttgagcaaaagtaagggtagatggtcagatgaaatgagactaacaaaatattgctaactgctgaagcttgatgctgtgtatatggtttattatactgtttacttttgggtatgcttgacattttccacaacaaaaagtttttaaaatatgctttagctctaggcacctgcctcttccaagtcaggctaatgaagtcaagaagacttagcaagaagttgaagttcttattactcaggaattaaacatttctttcaggtaataactcccctataaatgtccttctagaaagtcaaaactcagttttcatatcctgaaatctattatttttctcaaagcccaaaaaagccaggcatggtggctcacgcctgtaattccagcactttgggaggctgaggcgggccgatcactcgaggtcaggagttcgagaccagccaggccaacatggtgaaactctgcctctactaaaaatacaaaaattagccaggtgtggtgccgtgcacctgaaatcccagctactcgggaggcttaggcagaaaattgcttaagccttggaggcggaggttgcagtgagccgagatcacgcaattgcactccagcctgggtgacagagcgagactccgtctcaaaaaaaaaaaaaaaagaaaagaagtccttgagtcaaagcctaaaaaagcactggtggttttttcctgtactgcattactctcttctctaaaagcttaatgagatgcatggagtaactggaactccatttatattgttggctgctcgagaaccattgaaagaccctaaaaagcatcacatagctattaagtgaaagcaaactctttgcattaaataaggaaaaaaaacagctgtctagactcagaagtttttggtgttgtaagatgcactatttaaataatgataaaatgttgaaacaagaatggttgtacttcactgtcacatatttctagaataaaaggatagttaccttagaatgctgcatctataacttactttgttcttgttcaccttgaagaaaatggattcagaatttaaatttcctgaatgaaaactactctaattaattaatctgattgcatttgtaaattctgaagtcactactgtaaaaatgtgtgtagtaatttaattcttagagaccatttggttttcattgcctttaatgttaaattggctacttcactcactcccgggtagttaacattcacaacacaattctcttgtccaacattctttcaaatgtctgtttccactccagaagacatcagccagtatgcttaggccgtttttagtaattctgtaagtaatatttctaactttactttttaaaaagtcttcatcaaggctgggtgcaggtctcatgcctgtaatcccagcactttggggaggccaaggtaggagcattgcttgagtcaaggagttcgacattagcctgggcaacatagt

SEQ ID NO: 31994 - DNA, 2300 bp, Homo sapien
tttaatagacatttctcctctaagcccagtgaacagttttactatttcgaatgaactgtttgtaagttcattgaattgaggtatttggccagaaatgtgaagccttcagattaaggtgaatttctcttaaatcaaacacaaatataattctttcataattccttcccatttttatcccctgatttggggaggagggaagacattctgcacaactacccccagcccctgctaggttgctgctgaattcctgcattagtctctttactaaggagatttacttctcttttcctatattttcccatgttgcctgaccacatgcattgccatagttaaaggaaaggtaatatctctcagctatccaaagggactataaaaagaacagattccaactagagatatgtttggaagactcttgagaaaggtgaagggacaacaaactggtattcactctccaatttcaacaagatcctatgaatatctgcaagatgatgactaggtgctagggtttattggtaaattttactcaacttcttcttcccaccaaaaccaccttaatcacacccgaaaccacaccctacatcagatcctatcattcccctgttaaaacacacacacacacacacaacaaacaaacaaaacacttgaacagctttccatcattcttagcacaaagtataaactctttcacaaatacaaaaattaaccaggcatggtggtgcatgcctgtaatcccaactacccgggaggccgagacgagaatagtttgaacttgggaggtggaggctgcagtgagccaagatcgtgccactatactccagtctgggcaacagagcgagactccatctcaaaaacaaaacaaaacaaaaaaactcttccagggtttcctgcatggtctggccccaagccattctcatctcaggccactctgctccttaagttccatttctgggagtccttaaacaggtaaagccctttcctgttttatcttggggctctggacgagttgttctttctgtttacaaagccacaccccaccagagctgcctgtcttgatctgttaaccaagtgtaggctattttttggtttcccttcctgctccacccccaacacctggggaaaggctaggtagcatgttgtttgaggggctctgccttcaggctgcttgagttcaaatcctggatctaccactggctagctgctctgtgactttgggcaagttacataacataattatttccccatctataatttggagatgattaaatatattttgaggattagatttgttagcagatggtaagtacgtgaaacagcaatagaagttctccttttagcatatactccaattttcttctacttatttgtttgccaagtttgagcctgttaccttgagattgctatggttgccttctcaacctccccaactcctaccctccagctgattatggtctacttattggactctgtaaatgaataaagagggagcatgaggaaaggaggtagtccttctagctttaggagaggccacgggagtgagcttgttgaacaagacatggtcgtggcttctctttaagcttacggtttaggcggacacagatgatgaacacacaccggattagtgtggctttaagaaagggaatcccagggccttaggccaaccctggagtaacctcgatgccctctccagaagggcacccgaggaagggtctagggcccaagagcaccaaaatcaccaacgccggggattggtaggtagcctgaaaaatctaattcagagaaggatgctccgcgcgcagacatggcttatccccgtgctactgcatgagccacacctaggccggccccggacaccgacagccaatggccgggcccgtcccgccccatccgggattggctgtgcgtgccgcggccctccaccccgccccgctcaggatcttcccgggattggctgagctacccgacctctccaggggatcggctgcgcgccccgcccttgcccagagtcttcccgggattggctgcgggcctcgcgaccctcctgcttccctccccgccccgcgccgcctctctggtttgtgcgcccgtcgcaggtcgcaggcctctttgtcagctggagttgcgcggtgagtgcatctccagtcttcggctttcggtctcccgcggggagggcgcccggccggcccgtgggtccgatcaggggctgggctcgcccggtgtccccacgagctttgcccgcctcgagctcctctgctcccggcggccagaacggaggggtagagcagccctcggcggcccggggg

SEQ ID NO: 31995 - DNA, 2300 bp, Homo sapien
tatactatactaaaagttccacaagggcaaggtccttgatttggggttttattcactattttctctcaggtctactacagtgcttgactatggtaggttctcattagttttataaatgaataaacataacccaacaacaaggctattgctcccaagaattgagtatatctttcattttatttcacaatcactattctcctcatctctggccttactcaatcttacagtgaaaaacatagacactgtactaggtaaaagtagcttggggtaaaataaaatgtgaatttaataggtagagaaagggagaaggagaaaaagtcaagttacttaaacatagaaatgggttggtgaccagtgttatgaatgtaaaagtgtctaaagacatatgcagaaaggattcttctaagagtattgctttcttttgcgtagttgagaataatgttatttcagtggatggatatgttcatcacactgtaatgcatgtaaaaacaacgtgtaaagaaacatcaataaaaggacatctcaaagagtgctacttggaaaaaaaaagaaaaaagaaaaagatatggggtagtgagtcaacattagcaaggggtagtataaacagtgtttaaacccatgtcttgagccaggcaaaagagcaagtgacagagagaggacctcaatgaagaaagaggagacaaaaaataatggcctggggagagcttagacccgtggggctggcagagcccagaccagaggcgtgggagccgcgctgctggtgctgggggtgctccagccggcagaacagtgggaagggaaaagcagtgggcccatttagaggttgaaagaggcagggactgagaagctccagggtttgaggaccactcccccatccatacaacagttagtatcccaactgcggaccatatgtcccacgccccagagcgatggcccttgtggttttttttttgtttgtttgtttgtttgtttgtttttgagacagagtttggctcttgttgcccgctggagtgcaatagcgcagtctcggttcaccgcaacctctgcctcaagcgattttcctgcttcagcctcccaagtagctggcattacaggcatgcgccactataaccggttaattgtgtatttttagtatagacggggtttctccatgttggtcaggctggtctcgaactcccgatctcagatgatctgcccgcctcggcctcccaaagtgctgggattacaggagtgagccaccgcgcccggccgccccttgtctctttaggtctcttctgctttatcaaacatggacacaaaaagggtgctcctcaggcgtacaggcgccgccaaccagccactgcttctggtaaagagtctttcatcgcatttagtcatttctacagtaaaacgtattttccaaagagtacagaacaccagtcatgatgagttttgtttctttgtttcttagaatcaggggtttcattcgtccacagagaaagatgatttcctatttttgtattttcaagttgtaacacatgttttttcccttagctcttataacgttaatatttttatatttcattatgggtttttattcttcattaaaaatgtcagtccaagggaggcctttgtttcgtccatttaaggattagaagattgcctggcacagagtacacacctgatgaaggcgtgctgaatacctaagtgaataaaaacgcggcataaatagcagctcagggctctaggcggtcgcgtgactgagagcctaggcgccaaggggaggagagggtaatcgcgaagtctccccaggggagaaaccgaggggctgagagaaccagatcgacgagggccaaggcccagcaggatgcctgaagaagccgattctcctgcccagggtacctgaggttcgaaggatgcttcgtgcaggctcgccttgtgtctcacccgccagacctaggaagccagacctaggcaggcagtggacacaggtggccaatggctgggcccgtccagcccccgtcctgccctcgtcccgaagtttcctgggattggctgcctgccccgcggccctcctcccagccccgccctcgcccagagtcttccctgcgccgaaagcgcaggtatgttcctagtcttgagcgggagaaaatcacccagctcggagcacctggccagtgggaccggtgggttcctggtgcctgaatccggctgtccgctctgcggtgccccgccccgccccaacccaggatcttcccagccccgctccgccccaacccaggatcttcccagccctcgtgtgtccccgctcacttcagttc

SEQ ID NO: 31996 - DNA, 2300 bp, Homo sapien
caacattaaaatgtgcttttccatttataaaatatgttaataaaatttattacaaaattacacatacctgaatagctgaaataaaagattagatatccgtgaaatatcaaagggctcctaagaagttagaatgcaacaactatatttcatatacccaattttttccaatatatatccatatatcaatttttccatatatcaaatttttgtattgcatatcctcatctggataaaacatattgaaccatttcatttaagcacactagattttcaatgttttagtaaggtttagcttctctttccctttcttttggaggtatattccttaaaatgatgttaagttctctttggagcacttggttctcttaaccaggagagaagtaattcattccatagcagagtgccttgataagttgtttcagacattgcaaataaaatgtatttacactgtttcatcacattaagaagttactgtattaaacgcattcctaggcaatacttacatgtaatctctcttaactccattcctggagaattatcttctttacttggaaaacatcacttttttttttcctgattacaagtcattctgagagatgtcagaaacctatatggtgcaagtgagtactgtgggttttcttaacatcaaaaataagatcaatgcctgaatgattagttaacttactaaacaaagaaagaaaagaaaaggacacctttgaattcgctcatagagcaacttgaaagattcaaaaatgttaatgtttctaggttaatagtcatgcgactgaagtgacttttgaaatatataattcctgaagcctagatagaatcttaacattcttgtgggtttaaaggtgaaatgtttcaaaggattgggaatgaatgtattaacagagaggctatgaagagaatgaaagagctaacagaaagtgccacactggaggggaacacacacacaccagtgtgcacacacgtgcacagccacacacacacacacacacacacacctgttcatatagctcctacagcaaactgggctcagttttgagaacttgaatatgagccaaatgcctgctcaagggaatgagtccagcctaggtccgcatagcccgagagacggggccagctatcgaagaaagaatgtaggagccatcaacatcgaaaccagaaacaatgactggagacctgaattccaaacctggaatgtagaatataaaggaatggagaagcacattgttttcagagaatcccagagctgaaacactgggaataagaggagaagaataattaacatgtatgaaatccagaaatcctgtggaccagtaatgatcagcaaaatgcctggccagggctggaagccccaagggccactgcctatggctagttttcccagcataccctaacctctttcagtgctgctgggacctctgcccttctcatctcaggcccaccttcctgcaaccccttcagcagggaagaaatgtctgcctgggagatccctctcctaggatcacgaccttcagggagcagtcaggccagaacatcagggtttcggaggccatagggaagggaaggccaccagtgccctctcagaggcccctgcatggagcccatggtgtctggcattttcacctttctatttgggtattatgatatccacttttattcgtgaggaaattgaacttattctgggtcattcagttcaaaattagcaatattaagttttaaaatttcttctactgttctccaaaactcagattctgttttttttttttttttttttagactgagtctcactctgccgccaggctggagtgcagtggcacaatcttggctcactgcaacttccacctccagggttcaagccattgtcctgcctcagcctcccaaatagctgggactacaggtgcgtgacaccatgcccagttaatttttgtatttttagtagagaccaggtttcaccatgttggccaggatggtcttgatctcttgacctcgtgatctgctcgccttggcttcccaaagtgctgagattacaggcatgagccactgcgcccagaccaaaactcagattcttttacttatgacatcatcaaaagcacatcagagttctactcctaataacaaatgtttaatttttaatgaaatgtaggtgttagacctttactaagtacgggcaggaatttctgacagaagcggattttagaaaccctggttcttatgtgtcctccctctctctcttgctctgtctgttcattcattatttatttatttatttttgagacagggtctcactctgt

SEQ ID NO: 31997 - DNA, 2300 bp, Homo sapien
agatacgaaggtaagtctgctgagaggcttctgaccaagagttttccttgttgggaaggaaagaaggaaggaagaagagctctctcttgttttgctccttctgcgccctgcctttggttgtggacacgtaagattgtgatgtttggagctctttagccattttgcaaccataaggtaatgggtttacagtttaaaaaactaaagaaaacaatctactcaaaaataaaaaggaggaaagaaacagagattgaaaagcacttggcttcttgatatcatcattggttgctgaaccaacgctgagacttcccgtctgttgactacctgttaactaattgacgaatgtccgtatagtttaaaccagcattaatttttttttttttttttttttttttactcacagctgaaagcatcctagctaatacagcatctctctgggtattgaacattctcttactggtacaatcgtcccttcagtatacatgggggattggttttaggaccactgcatataccaaaatctgcatatactcaagtccttcagtcagtgctgtggaacccatgagtgccaaaaggcagccctccatatacacagctttcatgtcttgccagtactatatttttggtccatgtttggttgaaaaaaaacctatgtatatgtggacgtacatagttcaaatctgtgttgttcaggggtcaactgcacttagttttcccatgcagctaaattcaattcttcccgctgtaaattaatccttttccctctttttttgtcacagtggggacaagacttgctgcttatcaatctttgcagtagagggaattctgtggcaggcagctatcagacttgaactgcaataccggctcttcctggctttccagcttgtgggccccgcctccataatcatgtgaaccatttccttaaaatcaatcaccccctgtgacttatttatatatatatgtatatgatctgtttctctggggaaccctgactaatacaatgatctaaaccaattttctgttttgattttagctttgtattacggcaatttgctatctatccaaaaatcaataaaatagaattaaaaactcccatgcatctagcacccagcttcaacaatggttaatttgcaacttttctttctcatgctatactcccacccacttaactacctcccatattatttccaggccaaccccagacattttatcattttacctatatacctttcagtatgcatccctagaaactaatgacttttaaaaatataaccacaataccatttccacacttaaaaataattccttaatatcatcaaatattccatcatgtttaaatttccaccaattatctatctcttaaaaattggggctgagcatggtggctcacacttgtaatcccagcactttgggaagccaagatgggtggatcacttgagcccaggagttcaagaccagcctgtgcaacatggtgaacccccatctctactaaaaatacaaaacatttagctgggagagtagtggtgtgcaccagctatttgggaggctgaggtgggaggatcacctgagcccaggaggtcgaagctgcagtgagctgagattttgccactgcactccagcctgggcgaccagagtaagaccctgtctcaaaaaaaaaaaaaaaaaaaaaaaaaaaagttatactatgtatcattttttaaagttaatacagaagtaggacctactcattgaagaagttttggaaaacatgagaaagcacatagaataaaaatgaaaatcacctgcagtccccaccagcctataagatgccattgtatgattagaaaaagatggacctttccagcaggcacaacctgtgccaagatgccagccaccacttattgtctcaagtggtacccccgcatcctgcacaaactgggccattgtacactcatggccctgaatattccaccagtgtttacattttgaagtagagccttccagattgtttatggatataggcataatttttgtataatcagttccatgctatacattctgttttgtaagcagctttttttttttcacttaataacagaccatagagagtggagccaagatggccgaataggaacagctccggtctacagctcccagcgtgagcgacgcagaagacgggtgatttctgcatttccatctgaggtaccgggttcatctcactagggagtgccagacagtgggcgcaggccagtgtgtgcacgcaccgtgcgcgagccgaagcagggcgaggcattgcctcacctgggaagcgcaaggggtcaggg

SEQ ID NO: 31998 - DNA, 2300 bp, Homo sapien
gtaatacctacctcataggactgttatgaaggtaaaatgagatttttaaatgcaaaacccctgtgtacaacctagaatgaaacaagcgctcattatgtatcgtcacttctcctgccttgcctccttcctctttttaactctatgaatgtcccagaaggagaggtaggtggagtggagatgggctatatgctaggtatttggaatttgaatagctctcttttcttttttacatctttctcttgcttctctcttttctgtgttctttaaagcatagccagatcatttagatctaaaataagaacaccaaatcaagcctttgcgttgcagacagaaaaatcacgggttttgtatgggcttatggtaatgaaaatcaagcccaagaaactaaatgattcaaagcaaaattccccttgacagcttttgtcatgtctctgtgtgtgtgtgtgtgtgtgtgtgtgtgtgtgtatgttaaactagtactttagcctacatcattattttaccatgtaagcatgatagaatagcaggctttttggaggggaaagattttaaaagtacatggttacctgtaattacagtcttgcaaagtttgattttatagaagtgacattcaagtctgatttaaaccatgcagaaagacatggtgcatattggaaatgctttttctttctgactcaaatggctgtttcgttctagtgatctccctagaagtcagccttttattatgtttattgtaaggttgtgtgtctttctaattacgtggcccatcctagaaaacttgctaccttgagattacctttctatttctccttgcattcctgcaaacacctaaacctctgtagacaagaggttcatctcagagtctgaactggctgaggatcataaaattctgtcaaatacctggtcaattaagttctggctggaagagggggtcaaattagatgactgacatgtgcggataagggcactggtttatttcacattttagcctttaatgtgggtgggtacacaaagccacagagtttgttgccataccccaacataaaagcctctgggacaaggttgaaagggtagcggggagagggccttggatagcggatggggtggttaacccgcgactctggtgacattttgccatcagccgctggtgacatcttgccatcagctgcagctacagaatgttgctcgcaggaggaatttggcctgccgttgaagatgtgtttctcagatgagactgtaaggggccggagcttgggattttaggagtgcagggcccacctcttccttggtatcaagccacttaactaaactcttgcggtgtcttatgaccagggacgaagtgcggggccccttcagacgtcgcagctggagtaactgttttctttccatttcacagctcttgaaggaggtgtgactgagtgaggcgctggaaagcttgttctataattacttcttgatccgcttctaggcgtgctgtgcatgcgtccgaccatgtgtgtttgcgttagcttgcgccgtcgacaagagccagagaacgtgggtctaggataaaacgtggatgatatttttgcttcaaatgtcacattttacgggggtctaaaggtcttaggctggagtctttgcggatgattgccaactgtagctgaatctatgagctgggatgtacccaagccagtgcaatcgctccaaatcagggcgggcggcactaagccggggagcaaacaccgctcccggcccgcccagagcagacgccctaggttggggctgcagcgagtgcgcgcgtgggctgtggagccggcggaggcagcggtccggaatggctctgtggaggctgcgctctcttcctggccccgcagccacagcagctgccccatgctcgcgcggcaggacctaccaggcgcccaccctgggctgcgccgcctcggaccacccgctgctcccctccgcccgctgcctcttctccccgcgcctcacggggctccgcactgactccaggcgcctccgggggcgtcgcgcgcgcggagcggcgccgggggcggggcctcgtgtagggcgccccgggattggctgtggggagagggggcggggccggccgcggagaaaacagccggcgcgccgcgcgagtgcagtctgggtctggagcctgagccctgcggaacctcggcgctcggccccaccccgcccgtacctgcacttatttattgttgttatttcttaccgcggagccccgcagtcgggtcctcccgcccgctcccgcgcagcgctagcattctccagtccctcagtcccttcccgcgcgg

SEQ ID NO: 31999 - DNA, 2300 bp, Homo sapien
ccacagcagctgccccatgctcgcgcggcaggacctaccaggcgcccaccctgggctgcgccgcctcggaccacccgctgctcccctccgcccgctgcctcttctccccgcgcctcacggggctccgcactgactccaggcgcctccgggggcgtcgcgcgcgcggagcggcgccgggggcggggcctcgtgtagggcgccccgggattggctgtggggagagggggcggggccggccgcggagaaaacagccggcgcgccgcgcgagtgcagtctgggtctggagcctgagccctgcggaacctcggcgctcggccccaccccgcccgtacctgcacttatttattgttgttatttcttaccgcggagccccgcagtcgggtcctcccgcccgctcccgcgcagcgctagcattctccagtccctcagtcccttcccgcgcggtgcgccgcagccgaggcgatgcgcctcattcagaacatgtgcaccatcgccgagtaccccgcgccgggcaacgccgcggcctccgactgctgtgtgggcgccgccggccgccgcctggtcaagatcgccgtggtgggcgccagcggcgtgggcaagaccggtgagtcgtcgcgcttagccctgggtctggtcttggacgacccctgacgggagttgaggctgaacaaggcgtggggagcggtgggagctgcagcccgaccgctctccgtccccgcgcagggagccgctgccccttgggagtgggcttagccgttgtctacgccacccgcctgcttccacagacgggggaaacaaggatcaagaatggccaggcagctttctggggaccaccggcaccgccgccatcagaactttggggtgtttgagcctctggcaatgcctggcacagaaaggggagttagtgaagctagcccccctgggaggtcttgaaggttaggaagacatgggtctactggaaggcttaggtgtggctcagccgggctcagaggagggggtgggcccagtgagccttccagctgcacagagccataattcacgatgccttctagccccctcctttttgtctggaaagaagggtcaaggagctacagggtaggaatttcacttggtggccatctatggctttctttgggagaactgttttccaggcagggggtggggtggagaacaatctaacttccaaggttaacactttgacgttcttttttctgacgtgcagcactggtggtccggttcctcaccaaacgattcatcggtgactatgaaagaaatgcaggtgagacaatgcatttgagaaaaattctgtcccattgcaggaggactgcggttcccattttccagcgcttcccagggaggttctttcagtgacagtccgagcctgaggatcccgccacttaaaactttccccagtccccagccctccatggcgcccccctcccataactaccatctggcctcattccattccaagcccattcatcattttatcaagtgcctgaaagtattccccttggtatgttttaactatagtgaccccagttggaagcaccctttgtagtcaagaacctctcccttcaaaacactcctgcaaaagtcgtaaaaaaaaaaaaaaggagtccctagctccttcccccacccctctccttctctgctggctgcctttcagaggtgaccttttaaagcaaaggccaaaggagagcagttgtaaacctaaagttcctccttcttaacaaagacaaacaactggatggtagaattttaggaggagaattcccgaataaatgagaggacacatttttcaatccttatgattaagaatagccactggggaggcttaagagctttctgcctatgctctgttagcaaattgcttaactctgtagaccatatgagtacctataggggattatttgaaatgagctgtataagctatcccaagataagacatggcagccttctgatttgatgtagagttgattataattatatcacatttttattccaactgataacattggctgtgtgtttactaacagtatttgtctagcaagccattatatctaacggccaaaatacaaagttacagtcaaagaatgaatcaagtactcaagaaaacagaaacctcacataggctgagcaagataatttgcatcaagggagtactctaaaaatggaaactttgtttaaaactagataaataagttttcaaaaacttgcaaactttgccctggttttaataaatctaacatagggttaaaattgctgttgttttttaaaaaaaatctgaagtaagccca

SEQ ID NO: 32000 - DNA, 2300 bp, Homo sapien
tcattcttgccgtttgtagtggtgctttaaactgtgctgtaaataaataaataaataaacaatacaatgaaaagtcttcctctcacctttctcccttgcttggtccgccaccccataatcattgctgctgatagttactatgtttcacaccggagcttatttttgcatatttcagcaatttaaacttccgtattccccctgccactttttacacaaatgctaacccatcatacacagtatcctcaccttgcttttttcattcacacactattctgtaccttgtttctgccacacaagcacagagctttcttattctctttcatggcattcctccctgtggatgcaccccatttattaaacagctccctactgatggcacttgggtggtttctaatcttggtactacaaacaataaacagcctttttggatctcatttgcatacatgagcatatgcaaagaataaatgactaggagtgtgattgctatgttgaatgcatctgtaatattgataggtattaccgaattgctctctgcattgatggtaacaattaaccctcccaccagcaatgtataagagggcctgttaccccatggcctcatcaaaagagtgtattttcaaacttttggagtgtcaatagtctgatttaaaaaaaaattccatcttggcatagctttaattgcaatttctttatgagcaaggtggatccatagttttcaaaatatttctgtctgaccggtgtttctgttcattgccttgcccttcctgatcatgtaaccatgagatctctggacaaacaatggtctgtttgactaataagcataaaaaggttggtatccccaagtgagaagatgctagttttccctgcatcttatccctgggaaagatgccaactatattcctgctgaatggttatttatgattttaatggtttataccttgctttatttctaagctatttaaaacaagaaaattggaaagggaaaatttgagtaaaaaaaaatgactggaagaaaagcaagatgaagccaggaatgaggtcagtacactaaatatccttgacagttgctacagacaagtcacatatttggccaatcagagagagaaagagtttaatacaggatatgcctcaactgtgccctgttagaaactggctttactgaagctataatagatcagagagtgcattgagggaagatattccttcctcctttgcccttcatgccccagacttcgtgccatatctgactggaggattgggaggaaggtggtccaccaagcgagaaaagaaaacgggaagaacttggcagcaagaactaaggaaagaggtggtgaaaaacagctcagaaagcgcagggtcaataaggcggctggctccccatataacctaaacatggacgggttattcaggttacagaaaaggaaggcatttagcagaatttatcaaactgtagaagttgttgcaaactaacatctccctaattctactgaaattcttatgataccatgtagtctgctttctgacctttgtcagattcctttatgtcatcttagcttcttttcctggccaagtcatacttgggaattgagctctgtagaaggaagagggattgctttaagcttggttattgacagcacattgtaaataacattggagttcctagcagaggagagcataatgctaagaatgttcaggaaaaactggagaccatcttcatgtcttcatgtctgtatcaaacaacagtactttgtttctcagtatacataaaattgtcactttaaatagaaaaattagtcatagtatgattatagctctggtaagatatatttgcttgtagaagggagcatgagaagcagaaaagcatgctaaagcattggggtgaaagtttatttaaaagcccaatgttgttatattgtcttttctgtgacacacacacacacacacacacacacacacacacatataggcattgctcagtatcaaaataaacttgctttgctttcttcattgcagataaagctgtcctctctccagacaaaccaaacaatccctttactcatagtattttgtctttccaggcatcttataagccattgttgaagcaagttgtggaggaaatatttcatcccgagaggccagattccgttgatattgaacacatgtcttcaggcctcactgatctccttaaaactggatttagcatgttcatgaaggtaaagtaaccatggagaggtaatcctgagtgtagaaatgttctctttgctgggcatgaaaatgctggcaccctgttaaccctagcc

SEQ ID NO: 32001 - DNA, 2300 bp, Homo sapien
taactttgtgaatttcccttatccctaacaggaagggcaagagaaaaccaaccccctccatagagcccctttataagggcacttaatcctcattcataggggaggagctttgttggtctaatcacatcttaaagaccccaccccttaatactatcttattggcaacacttgaattttggaggggacacattcaaaccaaaccctagcatattaggctgacatgaggagagaccctgagctcaccatgcaatggctctgtatcacccatcttggcttccttcttcttctcccaacccttcaatgtgcctaaaatagaaccatgtgggagggctgaattcagacacatggtatagctttatttttagcccattgaaaacatttgtttatcaaacaatcacatgaaatgaaagcctaactacaagagctccaggatgtcaaaatgttaaaagtacaaacaattatttagcagataaacccttagaaactgacaaggataatgagcactaaaaatattcttaatgggccttattgaatgatagataacacttgtaattttaaacacattctgtctcttttagttgtatctggattaatataattatatcatatgacctctcaatatttattttatgtcattgtggactaagactgagaattctcttgtttctttattcatacaaattatgtattactgtttatctcatttgtcaaaagatttccatactgcagaaatgttattgagttctataccaaaatgtctctggttgtgggagaagacattgaaattatattgcttttataacaatcatgtcttagaaatgttaagttccttcttatgcccaaatatctgggacttaagagaagaaccatgacaagtagggttaaaaccactaaaggaagagaccataagacagaaaaagataatagctaactatattattcagttctttagggtccatgctagagaactatgcaacactgtaaagagatagatgtcatgactcttttatttaaaagattgaattacctatgtctgttgttctaatgacaaatttatcatctaaattttgctctcaaggacaaaactgcctggtctctcttttcacatgtttaacataatagatactctacttcaacttttgaatttagttttaaatatatttcactaaagtgcctggccactgttgcctaatgcttgatcagagacatccctctgaggagagctataggtaggtgaagtaacctccaggttaactggtggaaggagaaggtggcctccttctgaagtcccctccctggagtcattaaatgtctttgagctactcagagataatcaaaccttccatgtccacctagctgcagatatttcttgaccaactcctgtatcaataagtaaagactaaattaataatatggagtaatatgcagtcactaaaaaagctctatagagttatctgaaaataactaagacatattaagtggaagaagcaagctgtggaacaatatgcagaatattatgtcataatgctttaaaaagctctatatacttctaagcatttctttgcagataaatttgtatgtgaatacttacaaaagaatgtagaagactacatcaaaactgatgaaaggggttacatatggaaaggggtgaaattagaaaaagagatctcaagagggacttgtgcttttatctctattgtttaaatttcattcgagatcacattcgtatgctataagcattatgaatcttatttaattatatatttaaattatttttctttagagaactaaaggcacagcccagaaaatctggttggaatgccttgtttttatatccccagcccacacttaagattttctctccccaaatcctctccccctcaacacatatattttaacttagtctggtaaaataattccatatccttgtcatggcaatgagtatgaggatgttaacactgacctttttacagatgtttctttttacattaatacttagtgttcatccatggaaaaatgagttgtacttctgctaatgtcaagggcaagactcaaattcaaaaaacatcaccactaccaataaacaaaaccaaagggaaaggattccttatcagcagacagttacagctcccactaggacactgccttctcagcggcttcagttatcagatattcctggacatactttccaagccatgaaaaataacgtaagtttcaaatgggattattattttactgactttaaattcaattctctttttctttctctaacctttcagttacagaaagactcatgagaa

SEQ ID NO: 32002 - DNA, 2300 bp, Homo sapien
aaattatttccataccccaaaatacattaatacttccccactggctgctactacttagaatggaaaataaggctcttgctgatctagcccatttctttcttttctaattccttgctcttatttcttcttgcgccttttttcatacaatgcactccagctataggaaaccctttgtagttccagagaacatattgtactgttttatgcctctacgactttgtttatgctgcactctgtgcctggactgctaagaatcctcctccccatcctgtccacctggtgaacacctgggtttctttgaaggcaagtcaaaactcatgccctatatgaagctttttctgacttcttcctttttctcttagaatttatttttcctccttcttgactcctatacaaaaaattttaaaaagtatttgcttctgtaacattttattgcacttgttttacatgtgtgggtccctttatttcatcataattattttgaaatcagggctgtggtttagttttctttatatccttaaaacccagacagtgtttggaatactgtacgtatttattaaaaattggctggatatattattatgtggaattttttttttttttgagacagagtctcgctctgtcgcccaggctggagtgcagtggtgccatcttggctcactgcaacctctccctcctgggttcaagtgattctcctgcctcaacctcccgagtagctgggattacaggtacctgccaccatgtccagctattttttgtacttttagtagagacggagcttcaccatgttggccaagctggtcttgagcccctgacctcaggtgatctgcccacctcggcctcccaaagtgttgggattacaggcatgagccaccgcgcctggccatggatattaattgaacattcattcaacgaacatttattgaacacctgttataagtgttggggataccaagcatctagtgcataatttagcaaaacagatagtttaaagaaaatagtgttaatacttaccccatgatatggcaagtacttagcgaatgtatcaattgagtggtttgataggtgggggaagtgagaggtgatagggtgatagtggtggtgagttagaaaaagtctctcacaggcagtactgttggaatgattattttcggtaagtttaccaggtaaattctttgtggattaggtaatgaattttattaaccattgcatctttgaagcttagcacagagattatacttagtaatgtaagtatattggtggaacaaacagaacccataaaacattttgggttcagcctattgacttcattgtatcggtacaatttttctccatgttgggaatagctggagagaaattgagaaatcaagaaggatgttgatgctttttaaagagtgtggatgtatcctataggcaactgggctaggagaagcttttaagcaggaaagttgtaggaccaactttgtttattaggaagaaaatagaattggagggtaaagagatcaaaagtcagaaaatgttgggagatcattgcctgggtgagcgatgatgttgggtttttgtgacagcaaaaatggagaggaagggctgaattctgagagtttttaagcctataagatgtagtgacgatgagatgagggaggaaagatggagaaagtgaaaatgagaacaacagggtttgttatgaggcttgtgggcgataacgtatgtgacagcaatctataaacccaaaatattgcacacggttgtttttattatctttttctagttgctctgagtttagattgagaaggtggctgtacttttggagacgtgttcatatctaaggaagataccaaatttcggattaggtttttatttcggagacttttcaaggaacatgagaagattatctgagaagattatctgcgcagacaggccgagcgacggaaagaactcagttcagctccatctcaggaaacacctgatctccacgagcttttgaggaagcccggagccacagagccccacccacttctttcccgaccgcgccatccttcctcactcccggcctcctctctagccaatcaccgctcagtttaacgtcatcaccgagcgccatcagggagcgtgtcagaggccgaccacgtgtactgtggagactgtcaaagtctcccggagcccaatttccggaagcggtgagttctgaaagaagttcctgcaccgtagtttcccaagtctgcgaatccccaaccatgagcgcctcgggcgtactgtcctttacccagcaaggatgggagcaggtgctggccaaagtgaaa

SEQ ID NO: 32003 - DNA, 2300 bp, Homo sapien
ttgtgcttctattacaacacattcacctcttctcttgtaggagagttgtttactgcccctctgtctttctcaataacttcagagttctttaaggggtgggactgtttcactcatgtcttcattttccaagttcttaaacagagcagatattctgtaattgctaaataaataaatgataaaacaatatttattcatcaaggagcaagaaaactcatttagttgttcaatcaaaatggatttctctctgttgacaagcgaatgccctgtttgtaaactttataaatgaaagagacctcagagatcatctaacttggcctttccattttatagatgagaaaactgaagcatagaaaggttgattgcctgactatacaacctgctaggtataatgaagaactgaggccaggcctggtggctcatacatgtaatcccagcactttaggaggcctaggtggaaggattgctagagaccacgagttccagaccagcctaggcaacatggtgagacattgtctctacaaaaaataaaaaattagccaggtgtggtggcacctgcttgtctgtagtcccaggtactcaggaggctgaagtgggaggactgtttgagtctgggaggtagagactgcagtgaacagtgaccctgccactgcatttcagcctgggttacagagtaagactgttttttaaacaaaacaaaacaaaacaaaacaaaacaaaacaaaacaaaaaaacaggccgggcgtggtggctcatgcctgtaagcccagcactttgggacaccaaggtgggcagatcacctgaggtcaggagttcaaaaccagcctggccaaaatggtgaaaccccctctctactataaatacaaaaattggctgggcatggtggtgcgtgcctgtaatcccagctacttgggaggctgaggcagaagaatcgcttgagcccaggaggtggaggttgcagtgagcagagatcgcaccactgtactccagctgggcaacagagtgagactccgcctcaaataaataaacaaacaaacaaaaaacctagacaaacctagagctccagtttgaaccatggtatgtcatcttttcactggaagatgtgctttcagaagcggcctgaacatttggtttacctattaaaataaaaactgtacatactttatgatctatctttgagaaacagacaaatctgcaaggagccgtgtggatcttcattgtcattttttgttgtagttaaaagtgtaaagtcaaaagcaatctgggtgtacatcaatggagaaatagccatattcactctgtgatagccatactatgcaattttatgaagcacttaaaatagatatagtttgattcatactaaaatgaaaaagagctccaagacacggatgctaaaaaaaaagaaaaaaaaggaagtcgaaggatgatactatactgtactgtactatttaagacttgtcaatctcaggttctcccaccaaaacagcacaacacatgaagtaagtgtataggaaatttcggaatgatgaactccaaacaggatatgcatctgtagcaagggctacctccggagagaagggtaggggaatgaggcggtctttgaccttgacagtaatttatggtttttaacaaggagagtgcattcttcatctattagttttgcttttgttggctgtgaaaattaattttttgagaaatagtactgattgtgatttcttctctattcagtgaggaaagggagtgacaggtaatgattctgtatcaaggctgattaaagaataaaagaaggcctttctgaagattaaaaaacaaataaaaagttgagaagaaagagcacgaagagtagaagggaacaatggtgtactcgccagcaatggcaatacgggttattaaaaagaagggtgggggcggggaaccctggccgactcaggacgccacgggaggaagccacgcaaaatagcaaaccgggatcctagaggggcggggcccacctcagcgcgcaggcgcaaccaggcccaggtggccgccgcggaagcgaagccacctatacgcgccgcgccgcttgggtctcctgcgcatgcgcagacggacctgcgctggaggcttcatctttgccgccgctgccgtcgccttcctgggattggagtctcgagctttcttcgttcgttcgtcggcgggttcgcgcccttctcgcgcctcggggctgcgaggctggggaaggggttggagggggctgttgatcgccgcgtttaagttgcgctcggggcggccatgtcggccggcgaggtcgagcgcctagtgtc

SEQ ID NO: 32004 - DNA, 2300 bp, Homo sapien
gattgtgcttcagactggaatccttttgaattcatgttgttttccctgtaaagagaaaccaggaagaagaaaatccgatgacactaatacatcatcccagatgctttcaaaggattcctttttgtatgggaacttataagcaatcacactattgccataatgagattcttttgggtggttgagtagctttccttcattcctcttctggtagactcagtaaaattggctagagagatcagtgatcaccagagagtgagctgtgtggctagagcttgaatccaagtggtccaaaaacaccgtttttattcttatcccctctcaggagaatggtactcatgaatggagtggcatgcatcttctctgaaggcaggatgtctgtgctgttttcttctcatggctaaattaggtagtctctgtctgttgataaaaaggctcataataaaaataaaaaatgcaaaaaggaattgttgaaatctcatttctctgccacacataagtgataacctctcagtgtaaaccaaacaatctgtaaatagtctggaatatctgtgtgacaaatgacaaacctcagagtactgccagctgtgttttccaggagggttactgatcgcagattggaatttggcatatattgtaaagttgacatattgggtgttcatatgtattagataatttctatggttctttttttccttgagcagctcagtagatgatggtgccatttatttatatggggaagacttgtagaggatcagattaggggaaattagtagttttgttttggccatggtaactttgagatgtctgttagacatgaaagaagttacatagaaattactggtggtcaggggagcaattcggacaatagtgtcaactctgaatattccttgacatccccaggcagaacaatgcgtttctttttgtgttattataacatcttttatcctttagatttttttcataatatttattatattgctctgattgttggtgtgtttgttttttcctaaggtccaggatcctgttgtgtttctatcagcttctggtacataatagatattcaataaatgatgtttacattctctcaccagatcctgtcagttttacctgtcaggtatctgtcaagtccatttctttctgttcccattgccttagtgccgattctcatcatctcattagaatcagggcatttaaaaatttttttaagtggtagaactcattttcaaataaactaaatgtaagatcctcattatatgagagtatcaattagagattgggttggacactattaataagagagctatctgactataatggctcaagtgtaaaagagtttcttttcttcacataatgattagttgggaggtagatgattttggaattgaattggtggttcaaatatatcagtcaaaatgtcttgagattctcttggcctttgcctcatgggaaaggagagtgatgctgaatttaaatggagcagggaatttaaatagaatttaagtagaacataaaatatggtgtgatattatttaagtgtaaggaaacttgaatttgtttaaattgaatagtttgatgataattttaagataaaaaggtgagtataaaagcagaagagcataaagaagtcatttcaacagactagaggaatgtgactgggctacaatcaaaggatctaataagagcagaaaggttaggcaaatcttggagaaattatggagtaagtagatagatggttttaaaattaatattaagagggagaaggctgggcctggtggctcacacctgtaattccagcactttgggaggctgaggtgggcagatcacttgggacgggagtttgagaccagcctgggcaacatggtgaaatcctgtctttactaaaaatacaaaacttagccaggcatggtggtgcacacctgtaatcccagctactcggggggctgtgaggcaagagaatcactttaacccaggaggtggaggcttcagtgagccgtgattgcacgactgtactccagcctgggtgacagagtgagaagaggtattaagacagatgattaacttcaagcttttaagcctactgaactgtcaggatgatggtacttttaatggtgatgggaaaatgggagaaattgtatggatgtacagtagcagattattcacatttgtgttacaggaaatcacagtctgaatagaaaatggtcagaatggctaaaatggtcacctattgttttcttagaataagggtggtgaacacagaacgggaaaattcttcaaggtctttcttgaattcgaaacatgaa

SEQ ID NO: 32005 - DNA, 2300 bp, Homo sapien
agattggaatttggcatatattgtaaagttgacatattgggtgttcatatgtattagataatttctatggttctttttttccttgagcagctcagtagatgatggtgccatttatttatatggggaagacttgtagaggatcagattaggggaaattagtagttttgttttggccatggtaactttgagatgtctgttagacatgaaagaagttacatagaaattactggtggtcaggggagcaattcggacaatagtgtcaactctgaatattccttgacatccccaggcagaacaatgcgtttctttttgtgttattataacatcttttatcctttagatttttttcataatatttattatattgctctgattgttggtgtgtttgttttttcctaaggtccaggatcctgttgtgtttctatcagcttctggtacataatagatattcaataaatgatgtttacattctctcaccagatcctgtcagttttacctgtcaggtatctgtcaagtccatttctttctgttcccattgccttagtgccgattctcatcatctcattagaatcagggcatttaaaaatttttttaagtggtagaactcattttcaaataaactaaatgtaagatcctcattatatgagagtatcaattagagattgggttggacactattaataagagagctatctgactataatggctcaagtgtaaaagagtttcttttcttcacataatgattagttgggaggtagatgattttggaattgaattggtggttcaaatatatcagtcaaaatgtcttgagattctcttggcctttgcctcatgggaaaggagagtgatgctgaatttaaatggagcagggaatttaaatagaatttaagtagaacataaaatatggtgtgatattatttaagtgtaaggaaacttgaatttgtttaaattgaatagtttgatgataattttaagataaaaaggtgagtataaaagcagaagagcataaagaagtcatttcaacagactagaggaatgtgactgggctacaatcaaaggatctaataagagcagaaaggttaggcaaatcttggagaaattatggagtaagtagatagatggttttaaaattaatattaagagggagaaggctgggcctggtggctcacacctgtaattccagcactttgggaggctgaggtgggcagatcacttgggacgggagtttgagaccagcctgggcaacatggtgaaatcctgtctttactaaaaatacaaaacttagccaggcatggtggtgcacacctgtaatcccagctactcggggggctgtgaggcaagagaatcactttaacccaggaggtggaggcttcagtgagccgtgattgcacgactgtactccagcctgggtgacagagtgagaagaggtattaagacagatgattaacttcaagcttttaagcctactgaactgtcaggatgatggtacttttaatggtgatgggaaaatgggagaaattgtatggatgtacagtagcagattattcacatttgtgttacaggaaatcacagtctgaatagaaaatggtcagaatggctaaaatggtcacctattgttttcttagaataagggtggtgaacacagaacgggaaaattcttcaaggtctttcttgaattcgaaacatgaagtcataaccaagtatctgggacctatttgtagtgatctgcaggaatttatgaaagtgccaaagaattaacagtttattcggcttctaagtgttattaatgtgaactttttgatagttggaacattttgatcccatactctctttggtgcctttcacctaatactgttctaaaataggctaattttaataaatattcagcaaaggaacattcttagtgtttaacttcaaattaaatgttgtaaacttattttaacatctaaagtccattatgtttgagtgttctgttaaattcaacaagctaataaccttttttttttaaggtacagcagggaagaactggaaactcagagaaagaaactgcccttccatctacaaaagctgagtttacttctcctccttctttgttcaagactgggcttccaccgagcaggttagttacatagttataactcaattactgtacgacattggtatctttacattgtatttgtgctatattaagtataaaagctctgaatgttttaccaaaaaactggaacattttactttggtttagtacaaaatgaattcttcacaagaaacttcttgatgtttttccatctaaaaagcct

SEQ ID NO: 32006 - DNA, 2300 bp, Homo sapien
aaaaaaactaattagacttctgaccatatttaaggtacattttaagaggtgaatacttccatgtgtcccagactttttgaaaactagagatcctcagaaataaatggtaaaagacaggctatagaaaattttcccctcaacaggaaagttatatctagatctaatttttaccacttttaacaatttggagaatttgctatctgacttgcaagtccaaacaaatttggtagaatttgttcttgatgggaataaatttaaaaatgcaaaggagagagtccagtgattggcaagagaaaatagtagaaaaggaaatagagcgaaaataaaaattttgacaatggagggcagcaattaacagagaggaaattacagcctcagaatgcacacctgtatttagtaggatgttggaatatgaaatgtttgtatatcagagggctgatggcatgtgctttgataatgcagtcatggtaggcatagctttgcaatttaaattatagggaagaaatggaagcaatatttgttttattgtagagatatttggatttttgtaacatgtgaatattaagatctttccccagctgtattggaggatatgttaatcctccaatgaaatcattcatgatctttgggatcatgaggaaatctaggaagtcagtgactcaggcataaaattagaaaggcttgaacatttttaaattgtactaaagttatagagaagggaagtcttaagtgggcaagggatggtaagtgggaactgactatgtacttgaaaacatttcagatgtcatgatgtgctttttatagggctgtctttgttagcacaaaataatttgtggagtgtttcaaggtctacttgagataaactcttactaactcatgatttccagaaaagccttaaattcctcaaaggtcttgctggaaggaaacctagctcaaggggaggggaggtctatagtctttgggattagaaagactcaggtttgaaagttagttttgctatttaattcatgcttgtgtcagtgatttcactttggaccatggcttgtctctaacaagtatacagtaatttttcagtttttgtgaagtttagatataatgggtttggcatccaacctatggtagctgctgttatttgtcattttaggagcctaatctagtgactgtggaaggatctatggtattttaattgttttgcttctataaagttttaaaggcagtattgttcagaactgaaatatagatgaagagaaattcatctaatttgcatccacttttcattgcctatttctccaagtgacttctatatcatcttaggcatgcatacttttgtaaagtcctttatctgcataatagcttttaacattattttatttaaaatacaacttactaggtttttctcttaaatttatagcattgttttatgatagactatttttccatatccttataaactttaaaaagattgtagaggtgaggcgggtatttaaatatttgaatttttctatctaaatgcaagttatcagaaatggcaaactggttccttttttatgttttttaacacttggaatatatcacaaggaaaatatcttgtgtatgttaaaatgagcattattttcaggcctttttggggaatatttaaagtttctgtaatagagctgtagtatgtgttacaattgtagtggtcccaaaatttccatttgtctagcatttgctgtcttatttaatttcacaaagataaatttatttggagactactaaaactagtaagtgtagaagagctctacagagacttaaaacttaacattatgatcattgttgggtatgttggttctagcttgtttattaataaaaatttttatgacaatgcaaagtagtgagcttaaactcagggatatttttcaatgtgtattgtgatctggttttattttaaaatttattgcaaacacattttgtttttatttctcactgcttttattattttttaagcatctaattaggtgaaactgaattgattcaatttttatgttacaggagattacctggggcaattgatgttatcggtcagactataactatcagccgagtagaaggcaggcgacgggcaaatgagaacagcaacatacaggtttagtattttaaaataaataattttctttaactgaaggatgatatcaacattataatttaatttattcaatagatagtcatagtgctatgctgtgttttaggtgatacaaagagatttaaaatgtgaagccagtcatttattataaaggcatttccagttagaatttataatc

SEQ ID NO: 32007 - DNA, 2300 bp, Homo sapien
gtttagtattttaaaataaataattttctttaactgaaggatgatatcaacattataatttaatttattcaatagatagtcatagtgctatgctgtgttttaggtgatacaaagagatttaaaatgtgaagccagtcatttattataaaggcatttccagttagaatttataatctctgaatctttttttaatagggttttctttcttttccttggtagaaacatagtacaggttgagtatctcttatctgaaatgcttgggaccagaagtgtatcagattttgaaatgtttggattttgaaatgttcatacgtatgtaatcttagagatgagacccaagtctaaacatgaaatttatgtttcataaataagttatttaatttgttataatgatttgttaatttatgataatcttttttcctttggcaaccctgagtaaactgtgtagtgggcctgagttttgattgtgatccgtcacatgtgaggttgggtgtggaattttccacttgtgataaaatgttgatgctcaaaatgtttcggattttagagcatttcagatttcagatttttggattaggaatactcaacttgtatataggtttactgaatgaaaaataaaagaccaccagtgattttaccacctaaagataaccacatctggtacatctcttgatactaagcaaaattgggatactattataattatatttctgtgtatacttttttccccatctaaaattatcatttgtatgttttcatattcttaaaatatgattaaaatatcttcatgatagcttcattggataaatataccatgatttatttaatgtgacatttctggaggtggcgtagagctgctttgtttttaggtgaaaaattgaggggagataaattatcagtaagttggataattaatgttagaactttaataactgagacttccagctattcattttggccatactttttttcattatttattcctattttctgagtccttttaaaaatgtccagagcactttattcttacctttgataagttgatcatgtaaaatattccttttagcatctttaaaggcaaatcatttctatagtggaagatgttagtccatttttcctttccccttaccattaaaatgccacgatttctcaaaataaatactttaagaaatagcttatcagcataagccctacaaaaaacactgcacttaaatgtaggaagtgttaatggaaagagggattgtatgtttaaaagattgctttagtcagcaaggatctgagaagtataaattaaatatacaacattatgttggctgtctttcccaaatttatttacacatccttggggagcttatcaaaaatccagattttgaggtgccactttgcttgttttatttcagtaggtttggggtgcttcttatggtgcctgtcccttaacctgttcacacaaagaagcattttgcaaacattgctttatttttcaagaataaaccctggtcttaaagttacaaggctcacatgataaagttacttacatatcttgctgcctattgcttgcagtctgttgacacatgcctgacagtttcttactttgcaacctggtgatgacaggcccttgtacagtgaatgtctgacctgctgccatgttaatttcttaaggccagtgtctgtgattaatgattacattgccttaattgaatacttcaactttggttgggtgacaaagataatacttgttaaatgatctttatgaagtacttttttcttgtgtggagtgtttgtattaattactttttattaagaaatttttggtaatgatccagttgttttttcttaagatttgaatatgcacatttttaaaactgtatgtatgtgtatactcacacaggcgtatgtatacacatatcacacatgtagaactattactctccccccaaaaatacatatatgtgaattaaactaccttttactttgtttcttagattaaatgaaattaatttactaagattaatcttacataatatttatgcatctgtttaattaactgtgctctaattttaggtcctttctgaaagatctgctactgaagtagacaacaattttagcaaaccacctccgtttttccctccaggagctcctcccactcaccttccacctcctccatttcttccacctcctccgactgtcagcactgctccacctctgattccaccaccgggtaaatagtaaataagacatttgactttgaaagaaaaatagcttgcgagtgttttttaaaatttttgacaattaaaataata

SEQ ID NO: 32008 - DNA, 2300 bp, Homo sapien
ttaatgcctgtttctaatttgttactgtatattataatatgcatttcagaagctgtgtataggcactgggaatctgagataatatcagtgaagatggccctataaaataaatacaatccctgcataaaagtcacataaaactgattattcctcacattatatttatgagaaaatgcattagattattttaaacccagtgttatattgagaatttccttagagtgattggatttttgtcactgattgtgtatttaaacagaacacaccttttttttttttttttttttccagtaatagtagacgtcgccatgaaagtgaagaaggagatagtcacaggagacacaaacacaaaaaatctaaaagaagcaaagaaggaaaagaagcgggcagtgagcctgcccctgaacaggagagcaccgaagctacacctgcagaataggcatggttttggccttttgtgtatattagtaccagaagtagatactataaatcttgttatttttctggataatgtttaagaaatttaccttaaatcttgttctgtttgttagtatgaaaagttaactttttttccaaaataaaagagtgaatttttcatgttaagttaaaaatctttgtcttgtactatttcaaaaataaaaagacagcaatgactttatatccaagaaaggaatgtgaatgagtcacttaacagggaatctaaagagctgtgttagctgtgtacatacacagattatctgagaaaaggtcaagggttccacttgggccacagtttttttgttaatcaaacaccactctcttaagaggctgcatcacaaaaggcaacaaagggcccctctaaggcttgagattaaaactagtctttatcattactgctgtgacactcttgcttagtatattaagagactcatacatttttgatatcacaactttttgatggcttttcaatattctaaatttgggttcctggtgaaaccaaatggggtacactttcatatccaaattaataaaacctataaggcatctgggtggcctctatgaaataaattaattaattacccatagtgtagtttctaggaggcatgtgtacacacactcttcattgtggcacaaatttaaatcgcctcatgaccatgtctgtgagccagggtcaagctggtttggccttcttgatgcattttccaaggcccactggtggagcagcatgagtttttatacagttactaacgattgtggaaaaaaagagctttagccatttcttactaaaaacaaaacaagtttataattaattctctgagcgagcatttttagggataagcctaggaggtattcatcggtgatggtaacaaataacatggtatttgaaagaataaattactaggatcttttaaatagtgataatacaaaagtaatcttaattagtatcacatactaaaagacaactataacttctgaaaaatatttattcttgtttgatgaaagcaacgtttctcagcaatgcattttaaaaaatattttagctgtaaattaaaaatggccataatgtacccttggcagacttcagcatataccaaattttaaatttaaatcagcttgaattcagtggggtatacaaatcattttagttgttttagggctttttattgaatagaaaaaatataaacaatgttgtagagtaatgagaaatcctccacactgaaaaaaaactagtagttttaatttttttggaatcatattttctgaggtgtaactggctttcattagatgatcatacttttcctgacatttttacaatgtattctttctttaaatataaaaactgacaagataaatatagtgtttcaacttcttagcctatttgtgatttttctgttttcctctgacccatcattgattctataaaaaagtgccaggccaagaaacaatagttagagtaattcttcctttaagttctttcagcagtcttgccaagcaagcatgtatcattcctgatgtacttctaccattgacagcaagaagaatatcaccacatctaaaaaaaaaaacaaaacaagatatgattagtattttaattcgttgctgaagttaatgcaagtttatcttagtggtgctagattttgctacatctgaccattttaattatgttaacttctaattgagatatttcttgcctcttatttacattctccaaactcactatccattcagcttgtgttagaaggaatgctaaaagtatggggagttgtagtatgggaccaagaatatgtgtaattattttggatttctcagaagttgaatgc

SEQ ID NO: 32009 - DNA, 2300 bp, Homo sapien
catccttttttaataaaagatgtatcaaatgtcagaagcaatctgacatgtccaagatcgtcagaaatacaatccaataccaatatgaagtccacaacctttataatacatcatgctacttaagagttctgatctatataggaggtcgtggacatccaagaagagcatgtttcaggactttgtgaaactccatatttaggataagactataacatgtcacttctctaatagtataggaggaaagaagggataagaaaagaataacaaaacctcttggagatagctgttaagcttccaagtaggctcattcactatcgctaatagttattagtaacagtagacccaggtgcagtggcttgcacctgtaatcctagctacttgaaggttgaggcaggaatattgcttgaggccaaaagttcaagaccagcctgggcaacatagagggaccctcatctctgaaaaagattttaatttttttttttttttttagccaggcatggcggcacgcacctgtagtcccagctacttgggaggctgaggcaggaggattgcttgagcccaggagttcaccactgcagtgaggtataattgtgacacagcactacagcctgggtgacagagcaagacccccatctctgaaaaaaataaaatacaataacattaagctaatactcgttaagccctttgttgtttatgggcattgcctcatttcaccttcttactagcactctgagttaagcactattactattgtctttcttttacaggggaggacatgaaagttcagagaggttaaccaaacatgcctactgtcatacagctagtatgcagcagagctagaactctaacctcaagcttctctaaccccagcacctacatatcaaacctaacttctttctactgctttccatgagctctgactcactcttgcagagcagccttacagagaatagaattccaatttggacctcaacaaaatcatgaattattatatcccatgttttatcaaggttgttcatctgcactttaaactgtagaaattaaatctgcacattctaagagtcttctgtatttaaactctttagccctgcctctgatgccaaattcctaatgactacgcagttcattgcaactcgtctcatcctgtagacttttctctggtctacttcctgtggagtggagtttgctatcatggcttggctgtcattaatgtgatgaatgtaattatcccttcgagccatttctattaagattctggtcttgagttggcaaaatggaatttaatcttcttgaatatggggtaagcgagagtcctgggggcttctgtggcattccagagcttaggcctgcaaagaagtcttagtgttgaggccggtgatgcagtctcaaatcccagatcttaaagctggaagaggggatgtggcccagtccctgacagaccaggtaggtaaggcataattagctccatttcaaaggtaaggtgactgaggcttgagagcttaaatgaaacaagtgtcatacagctgatttcagagctcaattcattccccccagggagaaggaagaatggagtgactcatttcctcaccaaacaggaacctgtacattgtttggacagaactttatgtctatccaggctctttgttattctgacagagaatggcacagcctattcttctcgagagccagatttcaaaattagcgaggaagctgtcactgtcacatctctttcatatgtcagtgcagtcaagacagtgatgggtgctggaggaaggtggggttggttcatatttcagccactgaatatgtgaatgcttgctttaagctcagctctccaggctgctccaaagatgggaatttcttacagtgtcgctatagcaaactggagggcagcttttcattatttaattattcacaccgtggggtctgaatgtgtcatgctcatgtcctcttccaacacattttaactcccagcctgtctgctcccagccggtgatgtaaatgtaccagctgcttcccaagaaccagtccgcatcctgcaggaggggctggttcctttcctgggcatcagcttgcctgctctcagcctaagctctctcgccaaccgtggtggctccttgcgttcctacatcctctcatctgagaatcagagagcataatcttcttacgggcccgtgatttattaacgtggcttaatctgaaggttctcagtcaaattctttgtgatctactgattgtgggggcatggcaaggtttgcttaaaggagcttggctggtttgggcccttgtagctgacagaa

SEQ ID NO: 32010 - DNA, 2300 bp, Homo sapien
ttttaacccctgcatattattcgaaatccaggagtaccaagaaagatctcacctgagaaggctaattgtgtagttttttctcttcctttatacactatacctgggagttagctccactcctggattaactcttatttctctattttctttctgttttacaacaattcatcacaccacatatgtagatgactgtgtgtatgtgaacatggcaagtgaaacctcacgatctccaggctgttcggtgaagctttatgcgaattcatttcacctacacccttcccctgcccacccaaggccttgaaccgaagcctgtgatcccctcccaagttggatcctgcccttcgccaaaggcaagaccgctgaaggcgtggccttctagatgattcatcaggttggcgggctctccctcccctcccccttgcccaggggacaccctgtccgcgtgaagaggggggcctttgtgtgagtgatgtttctcaattatcaaactagtggcgtgaaaccttttcctgaaacacctgagtgtaaaaggttttgttacctccctttttttcttttaaataataaaggaatagccacacctaccttagtttctattggataaaaaggtgaatagttttgttgtggtggttgttgttgttttaagccttcaactctcaaaaggcacagagttcccaggtgcaaagaggtagcttagacctgtctggggcggatcggggacaggagccagctcccctgaggtcgagcaccagagccggcccccagaccccgccctcgactacaatttctcttccttctcctcccccttgctttgcgagctattgactgactgcagccagctgaggcccaggctgtgggaatccggacttccttttcttccctctcccatttttccttcttcctccaccctcccccaaaccaaaccccaaaacctctaggtagtccaatattaaaaccggtggaacaaaagcattcccaaaatcaggaggagggaaagaagaagacgagggaggcaaaagtaggaggaaaataggaatgtcaacatttattttcctgaaggggaaaaaaaattctctctgggcaggcaggccatcttccgggacggggaatccacagtttcctcaggtaatgagttccagggatgctggatgcaggtggtaaaaatacgcagcgtttcaatgggatgatgggagatgtttacagccctcctgggaagatgccagagagtttaacagtcctgggatacctcccagctgcctgctctggtgctggatgagtttacgcctcctttcctgctggaaaaggtgaagcaaccagtgacttgtccagggtcacacaccacgcttgggacagaaataactctgacgtctctttcctggctatatcagcagacaacatcgcctaatgacagtactaccattccaatctgaatcatttaaattgctcctaattgcaggcctgcagtgcactgtaactgccgtatgactctaactgccaagccagccgagataggaatgactgaagttttgcaaattcctgaatatggaattaaaaatgctgggcgggggagggggtagcgcaaaagtgtttgaaaaccactttgaaactgctgacaggtatcctatttcaaattgtttaaaagatgaattggaaatgtcaacttaaatttgtcattttattggaattagagaaacacttggtgttcaaatggatgcggttcgaaaaggcacctcagatatttctaagaagttcggcttcacactcttcctttttgtgtctgctaaattactgtctcattttggtgtttaaacttcccttttaactcctttgtgggcagatatggggaaaggggagggcctgggaaacaaccaggcatttgacttcagatctgaacacggggctggacacgtgctgtgctcaggaaagaaagtaaattccacctggcaaattgctctaactgatttatttgtccacaaagagacgccacctacctgcttgcaggtattcaggtaaatgacaggtgggcggggcctcctgactctttcaatccctaaggtctcagcaatgctttatctgtcggggcttccgtgatgtcacccatttcctggtctggagcgaccaatgccgtcctccttcctccaggcacctgttcaccgaagttgaggctggtcacaactccggcggcccaaggagctgctcggttcacccacaaggaatgagagctgcctgcctgctgctgcttggagagccccagacagtcgcttgaagaggtgagttgaaaccctccatttttctctctt

SEQ ID NO: 32011 - DNA, 2300 bp, Homo sapien
tgtttccagttttaaactgttagctgccttggttacatgaccatgcaaaaaagcaggtttgggaggtatgtgtgtgtgttggcaatctcggaatggactcaattcttggaaccaaatcaatcagtgctaatccggttgctcgcagatgagaaaggagaaataaaatccccacctaccttacctttctgaatggaaaaccccatgcttatgacagtccccaaatctgccatcattgtttcctgttggtgaaaagccacgaagcagatgaggagcttgaaagtctctattacatcagctcctttccaacattttggttttttatttcatgtgataaggttgaaaaggccaatttgactgttataaattacctttcctcatcaaagaactccaagaccagagtccataaacatatctaaaaactgcacttagttataaacctctgggagaaaaaatgaaatgataagtaaaagcctagacttttttctctttgttaccataactccagtaaataagtcttcagtctctgttaagaacaaaaagctgaccaacctcaagtgtaaaggctcatgcagccttagggcaaaatacccccaaagcgtcgccaaacaaatccaagggtgacaagaatgtgcaactgccctgatgtcacaactcttatgtttatgagaacagacaacttgggcccactggagggcatccttttgtctcctaattaactgttttacttttgtttgaccagatgccagctgccctgggtaaccgccatgacacaagagagctaactgctagcaattaaaaataaagattaggggtagaaccaaaaagagtcagaagtgtgaccttaggactgaaaatacatgtgctgacttcatctcaccaggcagaagtttccaggctgctaattttgcctcattcactcggtggattattgattaaaagaaacttgtagcagctggctctgaaagtcaaaaggacaaagtggcaatcaggccatgaccaaaatgcacacagaggccaagggatttgcagtgtacttccttgtttgtaaatcagagtcacagtggagagctgaaggcaccgcagccagcggcaccacctgtgattaggcagccacaagtacctggactctatgtgtctttcttgcatgttgcatatacataagataacatccagcacccgactcacatctctggaaagagactacttaattcactaattattcatgtttccacttagaatctgattcccagagctaatcgcttatttaagtaaaatctttggccattgctggagctgtcagcccacagaagtgcttaagcaaaccagtgggaaaagcaaaactcagaaaagcacacttccagaagtgcaacgtttacatttttaactagctgggtcactttgcaggaatgacttagtctctgtaatgctcagtttctttatctatataatgggagtgataattataggattctgtggagaattaaataaaataatgcaggtcaggtaattactacagaacctggtagacggtaagcacttaataaatgttagcaaagatgctgcagccactgacgatgatgatgatggtgatgctgaagaatgagcagaagaaatccttatttaaacaataattctatatctttagagttaagagtcttaaatagtatcagccacaaacttgctcattctttttcttcgtctacaaacattagccagtgttcagttatgagcaatactgccaatagaaaatctttgaaagttttggcaaggtattggaacaagtcagaagtacttatttgcctgatatagattttggtgcatgcccctttacatattcaaaaataaaagatgccaaggattataggacctgtccagtcagtagcccctgcctatttaggagctggtcccagcatgataatgttccagacctaatgatggcctgaaggtgtggtgaccctgtgtttatttccttgttgatttcccttctctggctccaagatcattttcccattgcctgcaggaaacaacatctaggggcgaggtaggcctgacttggcaaccctaaaggtgaacaaaaggaccttggcttttggcaagagcagaaggaagttcaggggcgtctcagccccatccaaaccagaagagatttgtcactgatgctaatgcatgctgctctgcaggggaccactctccctcgaagctccccatagctgctctcagttttatggatctgctctactcaaagccttgcagaaggggcaggggatgcccaggttaacccccgcacgtacaaaggtgga

SEQ ID NO: 32012 - DNA, 2300 bp, Homo sapien
gagaagcagacatgaggaagagggagaaacctgagggatgtcctggctttgtaacaacaccctcttgaggaactaatctatttctgggagaactaatccagtcttgagagagtgagaactcactcacaaacatgagaacagcaccaagccattcataagggatccacccccatggcacaaataccttccactagctcccaacccccgacgctgccacagtagggatcaaatctcaacatgagctttggtggcaacaaacgaaccatatccaaaccattgcaggagagattttgtgacattttgtttccagtaggcaagcttcatcttctgtgtttcctaattgaatggcccttaggccacattctgaggacagcgtgggtgtttgcatgagggccaacacaatcaaaacttgatgattgtgaaattgtttttctttaaattacctttggacatttgaaaaatgtgtttcaaaaaataagtaaaaaccacccattctccaaggcgggctgccttagctaattgagtgcctcaagaccccaggtgcatcctagaacgctgtccaaacctgtctgaaacccaaatcaagtctttgatggtcaatgtctgtctttctagttctaatttaaagataaaaaaatacctgtaatcccagcactttgggaggctgaggtgggcagatcacttgaggccaagagttcgagaccagcctagctaacatgaagaaaccctgtctctactaaaaatacagaaaatctagccaggcatggtggtgcacgactgtagtttcagctacttgggaggctgaggcaggagaatcgcttgaacccaagaggtggggctgcagtgagccaagatctcaagactccgtctcaaaaaaataaaaaaataaatcttcattaaaaaaaatccaaatcaacatttggataaggtaatttgagaaggatttattagcatgtgaatttatgtatttatttatttatttttaagaaagagaaatgtacagagagatggcgggagagcagtctggtagcagttctttaaactctctgtaaagctggatggttatatgatttctcagagttgctgcagggctttgatgagataatatcactaaaatgccttggaccaagcctaccatagagtgacactcaagaaatgttagtcccagcattttcccttaacaattgcctcttcccctaacaattctctcagctgtttgccagggatctgaatgtcctgggtccaccaggcttctcagtctgacaagatcacttttctcatctggtaacctcaaggctacaagatgagttttacgggccctttccttcataatgtgatatcaatttttacatgatttttgatataactttaaattcttcaacattgtatttaatttttattttagacaaagtctaaattttcttagaccttgaaaatttcatttttttagatgtgagcaataatgcaaaattttttaaccctaaagttttgttgttttccttcttgattttaaaataaactcacacatttttgtgggtccctaagagtaccatggaccctgggcactgcgtctaatgagaaataatggaaagagaaacaaaaatgtgaagaacaaagtccagcaactcaaagttgctcaaggaagggatattgcttctgtgggaagttttactcgtccctcaaatgggttttcctggctctttgactcttcaatcccttccagaggacaataataagatttgttctttgaaactgaaggaaaaccataaacggttggtgactgggttggtgaacattagctaatgtgaaacagagcacaggacttgtctaacaaggaatttgcatattctcatccacgtagcctggtgtaggttctgcctggggccatgggtaatgaatgcctgcacagcctctccagactgtcaagggagccacttgcacccaaaacctaacctcaggggcctccaggcagatcaggagagcaggtcattcaccactcacgaggacaaaacgaactgactcagccttcttttgggggtaggggattgattcctggaccattagggagtgtttaaaagagattaattggccactggtgggaccactccagtcactttccaggcaagacagggctaccttcagcatctctagtgaaagtggtgaattagcacttcagaagtgagatggcatggacagaagcttctggggctgagctcaccattggaagcttctttccagcttcctgaaggtctctggaggtctcttcttaccggggaggatgatccctggtggctccctgc

SEQ ID NO: 32013 - DNA, 2300 bp, Homo sapien
tttggatttggcctacccacttgattgttatctgtaaacgatgttgatatgatttggaatttgactatgcattcaaaacaatgtttttgtcaaatgggttgggtcattctagagaaagaaagaaaaaaaacagacattaacaattagtcatgaggctgagtataattccagcatgttggaaggctgacgtgggaggatcatttgaggccaggagtttgagaccagcctgggcaacataggaagaccctgtctctacaaaaaataatttaaaaaattagcctggcatggcggtgcatacctgtagttctagttattttagaggctgaagcgggaggattgcttgaacccaagagtttgaggctgcagtgagccatgatcacaccactgcactccatgcactccagcctcagtgacaaagtgagaccttgtctcaaattaataatacatgaaattttagttacaacaaagctgtttttttccaataacgatggaagattaacatgtttttcttcttttttcagttgtttgctcattaatgaattagaatataccaaaagtaaattaaaaataattctgagtgtcattgttacttcttactttagttaaagagtagtggaattaccgctgtgctgcagaccaagtcctacttgctaaataactacagatagttaaaggtgaaggctgagcacggtggctcacacctgtaatctcagcactttgggaggctgaggcaggcaaatcacttgagctcaggagttcgagaccagcctggaaaacatgacaaaaccctgtctctacagaaaatacaaaaattagccagccgtggtggcctgcttgtagtcccagctatttgggatgctgagtgggaggattgcttgagcccaggaagtcaaggctgcagtgagccaggatcataccactgcactccagcctgggagatagagaccctgtctcacaaaaaaacaaaaacaaaacaaaacaaaaaaacaaacaccaaaactatagtcaaagctggaagggacctgcttatcctgtggcctgggctttagccatctcttccaataccaattgcctagtgttattatgtaaagctaatttggccagctctggtccttattttgcactcattccagtaaacccaaccactatggcacttaatactgccattgtcagtcagtctgcagtattgattgactgcctttagagctctcttttgtgtgccttgtccactcttcagtcactgagagagagaccaaagaacagagaccaacaccctgtacttggcatggccattagtcactggagttagatgaatcacactgtatctaagagagaagactcagggagaagggcttagcacaacacagaaaagctttaaacactcttacctttgactggaattacacacacacacacacacacacacatacatacacacacacacatacacacacacacactaaggctttcccacaaagccatgatgcatccttaaaaataacacacagctctgaaaagtgaatgtcgggggtgaagagagccctcctacactccttttcctagtgatgacaaggttgtgggggcatggctgactgtgaggagcagaagatgagagggagatatcattttacttctttgtactgcaataataaaaagaacagatagaatggaaggaagaggccaggggcagtggctcatacctgtaatcccagcactttgggaggctgaggcaggtggatcacctgaggtcaggagttcgagaccagcctggccaacatggagaaactccgtctctattaagaatacaaaaattagccaggcgtggtggtgggcacctataatcacagctacccgggaggttgaggcaggagaatcacttgaacttgtggggcggaggtcgcagtgagccaagattgcgccacttcactccagcctgggcgagaaagtgaactctgtctcaaaaaaaaaaaaaaaaaaaaagaatggagcgaagaagccagattgagtcttcttgcaatgaggcggagtatacaatattatttttaaaaatcagtctagtgtttctgaaaacaaggacacactaggaggaaatggtggaggaaaggagaacacaaagtaaaagtgacactgcctatttcttcacgggtacaagggccacttaggctgggatgcttttcctgaaaatgcagaccatacagaacaaggccatgtgactaagaatccacaacagaaacaaacacaagacacatatgagttaggaaagttaaggaagcagtccttcctttcggccaaaactgcca

SEQ ID NO: 32014 - DNA, 2300 bp, Homo sapien
ggctgaggagggaggatcgcttgagctgaggagttcaaggctgcagtgagctatgatggtgccactgcacaccagcctaggtgagagagtgagactctgtcttaaaaaaaaaaaaaaaaaagacattcaggaaagcttggaccaccagtatactcaattagaccattaaatcttaaatcgtcacatggccttgagaaagccacatagcatctctgaaatatagcatatcatagcatctctgaaacatagcatatctgaaaataaatacaccctctttgcttacctcacaggttcttgggggaatattaaatgatatattatgtacgtgctttataagcagtaaaatattacataatgctgtggtaaccctcacagggttgataagctagggagccttaagcatcacctattaccccgtatttattgtgtactgggccttcttctaggcacttcaccgatcttaagcccttgaatctgctgagcatcccaatggggcaggtactgaacagggaagttaagtggcttgtctagggtcacacagtaagtggcagagctgacattcaaggccaggtagtcaggttccagaacacacattgttaaacaccagaccaagctgcctcctgtgtgccccactgacacttcctgtgtcctcctccatgagcccctggcagagatgacaattgcttgccttaacaatagataagctaccagaagtcagggcctgtgcctcattcacacacgtccacagtgcctgccacatagctagagttcagtagatatttgttgaatgaacaaataccctccagggagggatacaataagtctgatacaactactgtatttttccttcattttttcttggctaaccacactcatttccttcagttgtttccaaaaggaggttggcatctctcactgtcctcattgacctcctttgcactttctccacgtcaacagtgacccatctaaagccgactactgtgacatgaacactgcacttgaagagcctgaccagcgctgggctcagtagaactatcctttcttctcccatggtgtatcctcactgtccaggactctcttctcagaagcccactccttcccctgtgctgtttatatgcttaatgaaaccaagtacccaaagtgaccgttcaactgttactaggcagctaagtagactccattaaaccttttccttccttcctccccttctttctttctctcccattcttctttcattcttctcgtccttccttctatcctttcttccttcctgcctccttttcttcctctcctctgccctttctttcaggtcttttttgtggtaggaactggtaagaaaaggaaaggaattccctaagattttaaggaaacaacaacaaaaaccaggttatgtttggtgagagagttggggcaagaaactgcatcttctaatatggaatccaggtaatttatcagttttttttcatagcatgactacggtgagatttcttgtaagaaaaaaaaaaaaataccagcatcgctggcctcatatattggattatacttaaggggatcaagggataagatgtttgaatttggagatgtcttgaaaaatcctgtggtgagcacaaatgtttgcagtgtctctgctggactcctcaaattgggaaaaaagagactctggttctcatcatagactcaaaacctgaggaaaagcgagatgcgattattagataaactggcaatgacacgcacaaaaatgtgtctattccagccagggcttttcttttcagttgtttgttttggttagagatgactttggggaactgcatgtcccactggacattccaagctgcgttgtcggagtcgcgggtcgcggcctccagtcagcggagccgccgcccccagggtccgccacccagaagtcggcggaggggggcccgccggcgggagcgcgcgccccggtcgccgtctgcgggtagaagcagaggaaagacggtggcctgggagcgcgcgaggccgcacgtgcgcgcgcccgcccgcccgccagccagtccgctcgcccacgcgcccacgcacgcgcccgcccgcccgttggcccgggaagtctcgcgatgccgtagccggctgctcccgctgcgggtggctcgggctgttgctgtggtttcctgagttgctgctgctgcggcggcggcagcggcgtctgtgcttgtggaggtgtcggcctctgggcggatgttgacattgtgttgttgttattgctgatggtaatggcggcggcggtggcggcgacggtccagaccccatcccctctgtagccg

SEQ ID NO: 32015 - DNA, 2300 bp, Homo sapien
cttggcactgaaaaatgaaagtttccacagtcagacacaaattgaataagatgcacaagcctcttgcatagttaagattctctaaggtaaaatggtctgcacatgggtgcgatttctaggactttagcataggagctcttcctctgaacacatcccaaactgctgggaacattgtgactcaaaccatcagcccaaaacagactgtggataacctgggacctaacccagaggaggaaaagagagaaagctattattcttaaagagtatctgtatctatatctatatatgcttgtatagttgcaaagtgaatggggggaatcgagtcatctatttggacagtttaggactgtaaaaaatatcctgccattcagcagggtatgttttttattgccattctccatcagtggctccaagccttcttcttggggctgaaatgatttcggggattgcctagatcctccagtcatgaacaagggcgggctggggtgagcctgagcgtctgcagaccttgtggtacaaaagtagttacagctgagctgccccatgttaagccctgagactccttaattgttgtcacaagatgttggattagcacatttctggaatagctgtctgtttacactccagagacccaccgtccactaaccgctttctaattgaattctaatcacattcaaatagctcaataaccagcctcagctgcaattcataaaactttaattgccatccataaatcctgggctccccagagccgggcatccctacaacccaattacacttctctagcaggcaagagagactgtcacagagatggagaggggaagacagaggatggaaagatagagccgtgcctctagctagtgctctcctggatttgggcaccttgttctctcaggtggagggagtcctgtctctaagtttcttagcaccatcatgaactcaggattgaagttagctgctctggaaaaaggatcagacttctaactattgcccaaccacatggccccagcccgcttttctgcagggggaaatgaagagagaaaatggccacctctgctgccttgccttctccgaagataaatagtcccaatagtttggcagccaccctctctcgggcagtaaggggtgtgcaagacttccatggaccagagagagttcccttacaaagccacttctgccaatcagaggcaagattccctggatggctgaatcctcttcatcctttttaggttcttaagatgcagaggaaagagtgcttcctggttagccttgctaagctgcccatgattggtaaaaatgagggacaggaaatcctcagacccagagcgaaggtctatctaatccctgctgcgtctttaggagggcttggtgtttgaggtcctccctccaaaatcttcaggatggagtttgtaggattgccctggaatgccatggtgttactacttggagaaagaaaagggtgactcttcaacatctctctctctctgcggaagtgggaggtgccgatcagaaagggaaacaaggaagggtcgttggtctgagtggccccaggagggccccaagtacaaagacacttcagaccttgtcgaacatcagcatgaaaagcttgacggtttcttagctgggaggcctcacagttctgcgccggacagtcctgaactaaccacctgaatgacctctgccaagtccaaaagctgtggacaggggtaggtgtaaccgtggccagagctgcgctcagggactggacgactgccagtccgtcgcccgcacaatcctgctccaaaccgcaggcctcacacttcaccgcgccgcagccacccctaccacagaggagctggaaacactgagcattcctattaaataagcctccaagtccccacctggtacgctttgcggtggggcgtggggaagagttgggctgcggccagggtagcgagagggggtgggatggaggatgcagcgctgtgatttctcagtaaagcgtggagaaagagggggaggaggccggcctccccgggaaattaacaaaacctacactttgcaaagtctcccccatccccctcccccgagttcttccccgccgcgcgcccgcccctcctcgcggcttctgttgtgactcgggcagcctatcccgagggtgcggagctgccgaggagcctgagccgagcggtactccgcagcatcacgtgccagggtggggggctataaaatacccgagccggggcgccgggcgggggacgtgaggaccagccctctccggggacccctttgttcccagcccagacgccaacacctctgcg

SEQ ID NO: 32016 - DNA, 2300 bp, Homo sapien
gctttcttgcgccaccccccaccggggcactatccctggagtcagctcctcaggcctttaaaccttccagaatgtcacacatggaaacctttagcaaatgtttgttaatgatcataacaaaggcatcattcaaattaggcaggtaattactaccagaaggacaactgggtgctcgcttgctcatccattgctttctgctttaaactcccgaggagtcgctgcctggagacactcccgcccggactgcttctcgggccccattaaacggctctgaaatgaactgtgaagttaccatttgtgggcggagagcgctggggccctgcggacggaagaccctggcttgaccggactaacagtgtcgccgaagcaaagcagcccctctgggtaggctgtctgtctcgcctcctaccctctggggcaactagcctaaaaacccggttctcaacttaacagcatgtggcccagcacccgcttttgccttttattccgcactctgatttttggggggatcgtttgttcccgctcattttctacaaacattacggtatcctgttagcattccgaacaaggggctgttcatatatttgccttcaatgatttcctgaagggacatgtggaagtaatagcgagcggtgcagtcacccaagctgaagatgcacgagagcgggtcgcgtagaagaactgcggcaatgggacccccagcgcagccccaggcgccctgttttcgaggctgacatcccaagatcctgtcctggttaggcacagcaccgcgcccgttggagtacttctctgtgactctcccctgtccactgcactgtgtccaccctcctggtgaaggaggagacggctgttggacatgccagtcccaacctggccactttggccattttcagagtgcgtgtgttggggtggggttgagggagaaggatgaaggatgacccccaaccccaacaggagaattcaaaaatcagagagcgatgaaggtgaacgcgctcccctcccccgctgtcgctgggaagccccactctgcccaggtctggttcctggagcatcagcgccccctttccctcgccggcaggatcgtttcctcccgacactggcctctcgccttgggcgcagggtttggggctcagctgtcaattccaaggaattcgtagggttcgacccacgcggcgggagggaacggagggagaatcaaaaggcatcctcccccacgacgcggaggcggtggtacgattcctcaaacgcccaagcttgagctttttttgtatgcgagatagaagccagggcaacctcgcccagataaccccgaaaacaaaggcacgaccagataagtgacttcaagggagtaaaggtcgttctatcggagaacgttccaaacctacacagaccctcttttctttgtaccgtatttcagaccacccagtcttgtacacacacacacaccacacaaaacaaaaacccatcattgtcatattggactcaacagtttgcccaatcctattaaataactagcaactatatagcccttcccctaaaagacccctagttcaaaacggcgcaaccgcttggagatttctcccgagggccctatttctcgttgggccgagtttgtagaagggacatttcttgattctagatttatattctctctgggtattaaatgcaattttgtatgttccttttcttcttttcaaagagaatacaaaactatagcagtctaagaaaataaccccaaaatggggaggcaaactcattctggaaatgatgggctgtttgtagtttcacaaaacctctttcccggcagagcaccaacacctcccccttccaccaccccccatcccatctggtctgcttctccccgccccccagttgttgtcgaagtctgggggttgggactggaccccctgattgcgtaagagcaaaaagcgaaggcgcaatctggacactgggagattcggagcgcagggagtttgagagaaacttttattttgaagagaccaaggttgagggggggcttatttcctgacagctatttacttagagcaaatgattagttttagaaggatggactataacattgaatcaattacaaaacgcggtttttgagcccattactgttggagctacagggagagaaacagaggaggagactgcaagagatcattggaggccgtgggcacgctctttactccatgtgtgggacattcattgcggaataacatcggaggagaaggtaagggaaaagaaaaaatgattttttgtttataagggaagtccctgatcagactctgggactg

SEQ ID NO: 32017 - DNA, 2300 bp, Homo sapien
tagattgcagcctgtaaataccaacctccctttaaaaagagtcaaagatcactaaagaaatgactgatttcagatctgggggcagaaatgtacaagatgaaactaagctatctaattgtgcccaaagcaaggaagcaatcaaagattgataaagtcatgacaaaagagcactggattcatcttgaaggggcttacattggcctgaaatgagacatttgagcatcaaaaggaataatgactgccatggattgaaaactttaactatataaaaattataagctcatccgaagcaatcaaaaacaaatgtctttggtaactccctagggcaacaaatcattactttgaaaataaagggacagaatcaatttctttttttcctgcttttcctgtataaattttatttcagggtaaccagatagttgacaagaagaaattcttttttatagaagtattacagttaataaaattgaaataagtaattgaattagaaaatcaacattttggaatctctaatgaaaaacagatttgggcaatcattgtcaacaattgccaaaaccacaaaataaaaagttaacaggaaactgtgtagtggatggatcaggctaatatcacctgagcccactgatcaatcttttaaaaaaagtaaaacaatctcaaatatacagaaaagttgcaagtacaatacaatgccttttttggtccttaagagaaatttgtccacatgataccccaccaatcctaaacactttagtgtttatttcccacaaacaaggacctaatcccagtaaaccacagcacaaccatcaaaatcagaaaattaatattactatattagtgtcaagaactgagaagggtctgagtttgtcttctactttcaaactgatgttagtctattgtagttgcatggatgctggcagaagtcatgagattcctgggtcagagacaaagcactttattgctcattacacagcaagtggcatgaacagcctatctgtgtcaggtctccttgcctccaaattccatccaggcaatatgaaaagctccagatctttgtacttacacatagagaactgccttacaggagaaaaaccctgagcttagggaacccatcgtttatttatttattatttttaaacttttattttaggtttaggcatacacgtgcaggttggttatataggtaaactggcgtcacaggagttcgttgtacagattattttgtcacctgggtactaagcctagcactcaatagttattttttttctgatcctctccctcctcctaccctcaactgtcaagtaggccccagtgtctgttgttcttctctttgtgtccatgagttctcatcacttagctcccacttacaggtgagaacatgcagcttttggttttctgttcctgcattagtttgctaaggataatggcctccagctccatccaagggaacctatcttttataatgggcagtaagcatacctgccctttgatctggagagagggagacattgtttctatcttgtaagactgaaagccaacttgccctttgctccagagagagaccctatctctgtcttctaaggctgtttgctatccaaacattcttgcaaagctaatctggaacaaagagaagagagtacctctgtgagatgtgcacaaatgtgagagaaccacaggtaactgtctcctaatactgcagtactggtagcagttttcttaattttaggcttcctagaggaagttgtatctaatgggagtcatttttgaaaaagggttagctaacagatatttggggataggagatacaggaagcgagtattttagacagaggaaacagcatggaaaagaaaagcccaggaggctttggaggctggggaggaggaggaggcttcagctgaggtcaaagaagcaggtttattttgaagggtcttgtaagcctcgagctgctgttggtacttgatcctgagtccttgaaatggtttaagctggggagtggcatgatcaaatgtgtgctttaaaaaggccacttgggctgcagctgcaagtggactggattcagcccaaggttaattttttctgcttggtttcctgtaatcaggttcagggagatggggatgcatgtattgaaattctgccacatggtagatggggctgtctttgaagatgaacatatttgaggtcaatctcactgcccctcctccaatctcaccctccagcgttttgatccaagtgcccacagttctgatgaatgtcaaaggcaagcttgaggagggaagaggaaatgattagtcctttacactcca

SEQ ID NO: 32018 - DNA, 2300 bp, Homo sapien
tgtgaagtttgaagtcccttccaacattttagcattctcaatttcgttttattcccccccaccacactgcctggccttacaatacagcatcaagtttagcaaagagcaggtgcaggatttattacgcaagagcctttctgtgccttcagggggcctgagcttttctgctggagctcttcaaccctggttttcattggtaccagttgccactgcatcatagagttgaataaataccaattgaattaaaaccctgattcaaatgctttggataatccccttcattagtgtttctagaggcaacgcgtcatcaaaccccctggtctgactgactaatggtgagaacttgaggcacccagcaatgaagtcaggcaatatttctggacatcagaggtggttaggaacatagaaaactgcatgactctggcagggcatgagggtgaaggggaagatgaggacgcactggggcttgtgagagagggagaggagccagggaagatggtgttagagcagagaggagcacgagggcctgaacatgggatcctcctgttccagggttacaaatgtcccctgtcccagaatggcagcgtggtttaagaatccctaacctggcaggtgacagaacaggggttgtagattccaaagcttactaaggacagtggcatagttgtgtgagaccttgcttcttctcagtgttgggaagagaagagggagtaaaagggactgtggagagggcagtccaattgtggattttaatgcatagggactcagcattgcaagatctgtaatttaatgtgaaacttgcacatttgaaataatagcagctaaatctaattgagaacagcatgcattccaaacaaaatacctcagtgggccagatttggacctccagggggatttatgcaaaagaccaagtaaacagagacacttcacagtggcggaacccaagagtctagcctggggaaagcatgcaggggccctcagataatctgtgaaagaaagacaggtcataacactcaaaatgcctacaagcgatgaaggctaagactatttgaaatcatggaaaaaggttagcttcttcaggaaaattgtatggtcaaggtacagggacacatgtcatcctgggatatatatgactgtggtggagactggtataacatgagccactcagggaaaaaaacaaaacaaaacaaacaaaaaaactcccttcctagtaatacataaagctaaagagaaattgcatctgggttacaccagaagaaggaaatgaggtaagaaaaaggtgagaataaatcacctaatcaaaatactgggttataaaaataactagcccacctgcttcaggactgtaagaaactgagcaatgctttcaggaggccaggttgaaaaacacaaacctgtttagccacagcttgattccatgcaattcatgctccaagattctgtctcactgtggttaaaaactcatgttttttaaatggtgggctgacaaaattgcattattgtagatgtggaaggaataatataaatgaagtagcattggagaatcaatatttttggagcaccatcatgtgcctgaccctgtatgggtgactcatgtatgataaccgcttttactgctcacatcattcttatgagatagatacttcttttcattcctgttttgcaaatgaggaaattaaggcacatactggtaacatgacttacctaatgttagagctctaataataagttaaagaactgggatttaaaccagttaaatataataatgataataacagtaaacaattcgatcctcagaagtctttgtgtgagctctgagctctgatttccattattaacgccagcctgtctttcgagggttgtgaagattaaatgagatagtgcctgtaagaacttaacactgacttgcccaatcaacaagattaatagttgttattaataatagtaactggatccagtattcagaaggctctactgggaggaagtatagggacaaatagcaatggagaagtgactgggaggaagaaagaggtaaccggtatagacttccctttggaaaatttcaggtttgaagtttgtttttaagaaagcttatttaccggccgggcgcggtggctcacgcctgtaatcccagcactttgggaggccgaggcgggcggatcacaaggtcaggagatcgagaccatcccggctaaaacggtgaaaccccgtctctactaaaactacaaaaaatagccgggcgtagtggcgggcgcctgtagtcctagctacttgggaggctgaggcaggagaatggcgtg

SEQ ID NO: 32019 - DNA, 2300 bp, Homo sapien
tgttagcagatattatagtttcttacttgagtacctattttccctgctggactgtgaattcccctagacagagactttgtcttactcatttatgtgggtcttatgcctacctaggtgctcaaaagatatttgctgaatgaaaaacaggaatgacggtccaacatggtataactccctattcagtttttttttttcctgatagaagttccgtgcctagaattaaattgcaatatggtctcttttcacccactcttttgaagatgttatcctctccaatatcagctgattgaagaagaaaattgtaaattttctctctcaggcataatgttgatattttaactcatagtgattttttctcaatacaaaatgaattttagaaataaatcaagatcccagaaacttatgattgctttgagtggtatcttttatctgtcatcctaagaaaaacatgagatctgatggcccagagcacagagacctttggtatttcagttctcctacagccgcatgactcgaaccttttgctgggagattgggatgtaggtccccatacttgattataaggactgtgagggcaggggccacatctgcatatctgtctattaataatagtactcctggtacctagctcctccttgcttcacagcagacactaaacaaatgcttgctgagtgagtaaatacttacatttaaagagaggcaattatacacattgatcatttgatcaccctctagcactgataatttttaagtgattagctttaaaaatcatttttcttacatcaacctgggtcctcacactattaaacaacaggagagctttcaatattaaatgaagtggggcagctgggcaactgtaaattttggatgatacttcagagaagagtctaggtgtatctgttctatccctttttctgatgggcatctgccatttatttttccattcttaagctctcaggagggatgtcttattagtttatcagaatgcatagggaaagctcatctttcttggagtaggtcttccaataagtgttcaagccctgggtcttccctcactacaataataaacatacctgctctaccctcctcacaaagctgttatcgtgagcatgaaaagacgagtcgctgtggggaagaactattaacccctatacagatactgttgttgctttccgttcaaggatccaccatgagactgtgggtaaggcactttctgggcagtgaaatcgggcttaagagaatcattgtacttttattttgctcctgggaccggcaagggcagttaagagccctagccctaaaactgtcgtctgttacagaggcagagaaatcattactggggttggcagcgttggggggaggggggaaaacgtgtatgaaaacctgggctcccagagcaaacttcgccacgcgccctccatcgcccctgtctccacacaagtcccggcaggggcttcttgggcggaggccacgccgaccaataggaacccactgtgttcctacaggttacgaagcaggtggagaaattgagcagaaacaattagcgaaaccgggctcagcctttaccgcggtgccaggagctcctaacaggcctggaggggaatgtcggggctcaatttcctaacgctcccctccccatccccatgccacctccacgagcagcggcgtccagcctcctcccgcccgaacgtgctcgaggggcgggcagtcgacctttattgtctggggagcacctggcaggtggcgggcccgtgccctaacgtgtgcgtggtgcccagcttcacaaagcgagcgggcagcacctccttggtccgggaacggcctcagcctggccgtccacatcccaggggtggaaaggtggagagagaaaggggctccggagtcaagagcggggagagagggcgcgcgcgccctcctcctcccggcgggcacggccccccggcattaacacgtcgaaagagcaggggccagacgccgccgggaagaagcgagacccgggcgggcgcgagggaggggaggcgaggaggggcgtggccggcgcgcagagggagggcgctgggaggaggggctgctgctcgccgctcgcggctctgggggctcggctttgccgcgctcgctgcacttgggcgagagctggaacgtggaccagagctcggatcccatcgcagctaccgcgatgagaggcgctcgcggcgcctgggattttctctgcgttctgctcctactgcttcgcgtccagacaggtgggacaccgcggctggcaccccgaccgtgcgactactcggcgaagcctgtgcctg

SEQ ID NO: 32020 - DNA, 2300 bp, Homo sapien
attgaaaaacttgaaggaatccctttgcaaggttgcattactgtacccatcatttctaaaatggaagagggggtggctgggcacagtggccgacacctaaaaacccagcactttggggggccaaggtgggaggatcgcttgagcccaggagttcaagaccagtctggccaacatggtcagattccatctcaaagaaaaaaggtaaaaataaaataaaatggagaagaaggaatcagacataatttccatgtggttgttttacatttttactggttttcttactcttcttataagggatattttcataaactgattatatattttacaaaccaataaatgtatttgtagtacaaagtatgagggtataatatcaccacaactattttgaggataagtatgtctggtttaaagtttaactgcttcttccctcttcttcttcattacaaagaattcacacacacacacacacacacacacacacacacacacacgccacgcatacaccccccaacacccacacctcctcccagcccccccacacccacacatccaaccccccatactcacactcacaccccctcacagtcacacccacccccacacacctacacacccaccagcacacacatacccacacacagatccacccacacacccacacccacccacatacacacacccccccacatgcacacccccacacacacccaccccccacacacccatccacacacccacacatccaacacccccgcactcacccacaccccacacacacccacacacaacccaccccccacagtcacaacccccctcacattcccccatacacgtcctacacacccaccacacaccacccccacacatccacactcccacacacatccctccacacacaccccccaacactttttcatattatattctaagcactttagagatgttaaaacagagatatgtgattccttggccctccagtgaactccatatctgttagaatagccaatcatgaaactcagggggtgaaagaccctgagacaagtgatcagacccatggcagtgcagggaggcatggaccagatttacagtctctaataatattctactctatacttacagagtcagaacataagatccattattgccattttgaatgattaccatcacccaaattcagtaggtggagttatttaataaattattggcccaaataagtgaccttattttttgtgattttttaatacaagattttgaaatgtttatctagtcaaatatgcctctccctatttttaaaaaatggctcctaggttttaaaaaattttattagagaaggtctttccaattctaaacccccaattctaaattttcttcttttattgcatttaaatccatttgggattatttgcatatatggagcaaagtgaaataggagtctaactttattctttttttcaagcagattatcaatcatggcagcactgtttattaaatatccctgttttccctgtggttggcaacaaccctattgtatcattgttcaaaactagcacgtcactgagacgttctgcacagctttgtgatgaagggtggggctgttgctgttgtgtgttcttggggatggcacttccagattggggatgagaacattagggtctcctgaaagacactggtaaactgtgggtcaggctggccttgtagagagttcctcatctgttcctgttgttacagtctctttcagtaaatgaatggaagagtctaggttatttgggatggagaagaccttgtaggaaaacacaggattttcttcactttaagaaaaagagaagattttctttttcataagtggctctggcattgcttccaatgccagaaatttggattcagctgaaacttcacactttattaagaaatgctttcagcacctcaggcagaatgattaggaggtgaggtttggccttcttcctctcttttctgtcttccatgcctcttgttcttagcatttttttttctcctcatttgcccctgtattgaagaaaagtctgtggtttctaaaagtgcttcctgcagggtcttattttcaaagctttccttggaggcttttggtgtgttttaggtggggctactgtttctccctctggcttctgccctccctccttctctcccttgatccacttctgtccttctccctccctttaaaccctcgtctcctcatcttccatttctctctccactcaccttcttctctgcacccccgaccccagcaggagaggtgagagctgtggggaggggggggtttcagt

SEQ ID NO: 32021 - DNA, 2300 bp, Homo sapien
catcatttcctccaagacttctaaagggggctattaccacgggcctgcaggttctggtttgcattcagaggagacactatcttcttaaatgagacatggaagaggaagtgtcatgaactgtaaataaggctgatagggaattgtttggtgatggggatggagaaaaactgccctctccaaaccaggttccatctcccacccctttatccaactttgccagagtccatcctattttatttgctgagtttactagcaggaagagaggagtttctttaaagattctctcccctccccaaataaatacctcccagataaatatgagtacatctatatagtagagcactatgccaacattgaaaagatggaaggatggagctttgttcgcagccagcttaggcaacatagtgagaccctgcctctatataaaaataaataaataaataaataaataaataaataaataaaagatggagctttaaaggttgatgtagaacgaatctccagtgtatattataaagtgaaggctgggcagggtggctcgtgcttgtaatcccagcactttgggagactgaggcaggaggatggactgagtccaggcattggagaccagcctgggcaacatagtgagaccttgtctcaaataaataaatcaaatttaaagggaaaaaagccaaggctcaaatagcatttataccaagcaattgtgggaagagaagggtgacatgtctacatacttgtgtttaagaatctgcttggaaaaaaaaggaaacataaaaatgcctctgccaaaagaaaagtcttttcactctaagcctttttgtgtttttccaaaatttttttttgccatatacattcattatatttcagcattaaaatatttcacctgtcaacttggaaaagtaaaagcgtgaatacagtaaatatttaaaaacagatgaagataagtaacaggttacattaattgtatacaatcaatctagtttgaattaggtgtagatataataattctgtgtgtttatcttggtgaagaatggtcctttaggttgtcattaaaaagcacctctgggaggtaaaagacataggcatctggaagattcatatttaatgaagttaggggacatttgatgtcactccccaggtgtggggagatatggacagaaaaccagaaggaacgaatgtggtcaggaaggaattggagttcccctccaaacagctgccacaagaagtccacacacgtggagacagttgtgcaatttggtcacagagtgtcctaggtgcttttgcttcattgctcctccactgaagcacgctggcagctggcctccttcccctgggactaaggatatcttggctggaagctctgctctgaaaaggggcatggccaaactttcactagggctcttcgttggggagcacgatggacaaaagccttcttggggctaggcaggtcacttcaaacttggagccgccaaatattttgggaaatagcgggaatgttggcgaactgggcaagtgcgttttctgattaagagcaaccagattcagctttttaaactacaattatactggccaaacaaaatacccttatacaaaaaccaaaactactggcaggagtcgctgccagcttgcgacccggcatacttggctgagtatccgcttctcccttgtggctccaaactgctgcagattctcggccacttcagacgcgcgcgatggcgaagagggtcctgcactttgacgcgcctggtgagggagcgctgctcttcgcagcgctcctggtgatgctccccaaatttcggggaccggcaagcgattaaatcttggagttgctcagcgcccgttaccgagtactttttatttacaccagaaacaaagttgttgctctgggatgttctctcctgggcgacttggggcccagcgcagtccagttgtgtggggaaatggggagatgtaaatgggcttggggagctggagatcgccgccgggtacccgggtgaggggcggggctggccgcacgggagagcccctcctccgctccggccccgccccgcatggccccgcctccgcgctctagagtttcggcaccagctcccaccctgcactgagtcccgggaccccgggagagcggtcaatgtgtggtcgctgcgtttcctctgcctgcgccgggcatcacttgcgcgccgcagaaagtccgtctggcagcctggatatcctctcctaccggcacccgcagacgcccctgcagccgcggtcggcgcccgggctccctagccctgtgcgctcaactgtcctgcgctgcg

SEQ ID NO: 32022 - DNA, 2300 bp, Homo sapien
gcttctctgaatataaactgtgcatgctgattaaaatctaaaaaatagccaggcagggtggctcacgcctgtaatctcagcactttgggaggccgaggcaagcggatcacctgaggtcgggagtttgagaccagcctgaccaacatggagaaaccccgtctctactaataatacaaaattagcctggtgtggtgtcacatgcctgtaatcccagctactcgggaggctgaggcagaatagcttgaacccaggaggcagaggtcacggtgagccaagatcgtgccattgcactccagcccgggcaacaagagtgaaactcggtctcaaaaaaaaaaatctaaaaaatatatgggatgattttcccctccagcctcctcaacccttcctgtttccactacacacacactcacacatacacacacacttatcttgttttcaatcttgccccaggtcagacaactgtaagagaaactcctacccaggaaactgagtccctgcaatgcacttacaagtagcttctctgaaaagaaaaagatcatggacagaccagctgcatttacagagagttaacctaagaaaaataaagaaacagtgaaggggtgccaggagcattggctcatgcttgtaatcccagcactttgggaggccgaggcagatggatcacgaggtcaggagatcaagaccatcctggctaacacagtgaaaccccatctccactaaaaatacaaaaaaaaaaaaaaaaaaaaagccaggcgtggttgggggggcacctgtagtcccagctattcgggaggctgaggtaggagaatggtgtgaacctgggaggcagagcttgcagtgagcagagatcaggccactgcactccagcctgggcgacaaagcgagactccatctcaaaaaaaaaaaaaagaaaagaaagaaacagtgaaagggtgactcccgcaaaagagatccaggatcactcaataaggcctcattgtcctagctagaatgccaatttaaccatccttaatcacctggctgtcaaaggacgggtaaagccttaggtgtcttttgcacaaagaagaaaactttaaaagcttgctcatttaacagtccaaagtcccactaacctacccaccctgatgtttattcaacacacatatcgggtatctcattggggtaagggtgatgagttggctacctctcccctcttccacttctcacccaccacccaatctcaaaaatgtaagctccaaataagcagtgacaattatcttgtaaacccctctgtcctcagtatccaaaatgatgcctgtcatacagtaggcatacaatacttcagaattaacattttaaagacttttaaatacttaaaagagctagattttcacttatagtaaataaaatcagtgttgtttaaaatcagtgagtcaataaatagcattgtcactacctgagataaatgttacaggaaacagctgatggaatttaaaaactttgcttctaaggattggaaccctattggtaagcgactgctgttttttaaacacagtttttaccactatgatttttattattatgtgcaattacttgtctacatgtttacattatacacatatccaacacatttccagcatcctaacataattattcatttttgggtgtgatctgccttctttatccatatatacacacattcatattaatatagttgtttgcaatcatagctatgtatttttatggttggttttgtttttcacttcacatattgtttcctaaacagctttccctgtttctacactcgtcataataattctcaatgactgcatgatattctaacatgtcagtgtatcataatttagctaaataaactaaaatgcaacatgtaaggtttccattttttgctttggagataatgttgataagagtggcagacacgtggtctcgtctgttttgcgtctttgcttctgatgaatcatattctggagctccatctaagaatccccatgcccagattagggactgcgagcgaccacccagcgccagcgcgaccaggaccaaggacctccgcggctgagcggcgagtccgggaggggctctgcgcgtccccgccccgcgccgcgtcaccgacgtcccgctaggctgagaccggtgcgccgcgcgctagtggccgctcttccgcgggctagcgggcggtgggggcgccagcagcgcggaaggcgggcacgcgggccatggctccctgggcggaggccgagcactcggcgctgaacccgctgcgcgcggtgtggctcacgctgaccgccgccttcctgctg

SEQ ID NO: 32023 - DNA, 2300 bp, Homo sapien
gtggaatgctatctgataacacacttttctcactcctttctgactcataaaattattttcactgtaaaacccaaacctcagttgctaggtagtgcccccacaggagggggcagtgaggggagaaggcagggagctggggctaagaaaaagcctagggctttgtcagcctataatcaccaaccattccactcacccagtaccactcagacagaggaatgagactcttctatgctcgccccagacagttcttatctggtgttcctctttcaaagttgtcatgctgtaaagttgtgttttcactgatttgtaagagcggtttatatattgtgaatatttattttttctttcttacatgtattgcaattggtttttctaatttttaaaacattgtttatgatgtcttacactgtaattctgtacaggcttacagcttttctgagtctatttgaataatataagtactagaaatgtggctaaaatgggcccattaaaagcattgggccaggcacagtggctcatgcctgcaatcccggcactttgggaggctgaggtgggcagattgcttgagctcaggaatttgagatcagcctgggcaacatggtgaaattccatctccacaaaatattaaaaaaaaaatagctgagtatggtggcatgtgcctgtagtctctgctactcgggaggctgaggcaggaagatcacctaagcccaggagatagaggctgcagcgaggtataattgcaccactgccctccagcctaggtgacagagtgaagaaaaaataaaaataaaaagaaggaggaaaaaaaagcattgacacactttcatgcaggctggagggcagtggcgtgatcacagctcactcccagggtcaagtgatcctcctgcctcagcctcccgagtagctgagactacacacgtgcaccaccatgccccgctaatttttaaattccttgtagagacacagtctcaccctattgcccaggctggtgttgaactcctgggttcaagtgatcttcctgccttcacctcccaaagtgttaggattacgggtgtgagccactttgcccagccggcacacaaattatatcacctagaaatcgataatttcactaaaagccaggagatgaactaaaattatttagggtaaatatgtgtcttatgtttcttaattcagcaacaaattagttttatgcaacaatcatcatatgaaaataaaaacaattataattcagtggatcttttttcactttatgggaagcagatttggtttatctggcttcagtgcttttccctgctgtttatttttcacaagtaagtcatctttattgtcattttgtttttactgcaaagttcattggagtcatcatttttgaagaaaccaaaaatagatgaggtgggcccatattgtggtggccatttctctgatctttagaaaaatagttctccatatttgaaaacaaagaatgctcatagaaggacaatctaacaggcttgctatttataagatacctgaatttgactcccatttgaatggatgtttatccctgtcaaacttatgctctggacagcaaaacacataatttttaaattgttattattatttttgaaacagagtcccctcttgttgcccaggctggagtgcagcagcatgattacagctcacatcagcctcgacctcccgggctcaagctatcctcctacctcagcctcccaagtagctgggactataggtacgtgccaccatacccagctaatttttttctgttttttgtagagatgagggtctcactacattgccaaggctggtcttgaactcctggattcaagcaatcctcctgccttggcctccccacatgctgggattacagccatgagccactgtgtccagccaaaactcctaattttaatgagaatggcatcaattgaaggcattgtccccaattgctttgtgacatcagtcctggattaaatgcaaacagatttttccttatgacaaattctgcactatagcccacagtattatttactctttttttctttctttctttttttttttttgagacggagtctctctctgtcgcccagggtagagtgcagtggtgcaatcctggctcactgcaacctctgcctcccaggttcaagtgattctcctgcctcagcttcccaagtagctgggactacaggcgtgtgccaccacgaccaggtaatttttgtatttttagtagagacagggtttcatcatattggtcaggctggtcttgaactcctgacctcgtgatcctcctgccttggcctccc

SEQ ID NO: 32024 - DNA, 2300 bp, Homo sapien
gaggatctttaaaatgagaaaaagttgcagccatggagtagaagaccctctgattccctctttccaagtgttgatagtagagcttcaccgccatgaaaagtctgtggatgctgagacctgtgctccccttctctctgaggcaggcctacagaattgggcatgaaacagcaaaggatggcctctgcttccaccaccatcagaaatgttatattttcaccagtgcaccataatgtagcagtctctccataatgtagcaggtgaggtatcacctggagttcttcgtctcatgaccaagaaaattaaggagcgtggatgcaaaggatgaagttgcagcgaaagtttaataagcaaaagaagaaagctctccacagtggagaggggacctggaggagggttgctgcttttacaggtgactgcaaaggcttttataagaaccggtgagggctgggcatctcatttgcataaggcatgaatttctggtagctccacctcatccttctagtgtgcatgtgggcccttagcttaagttttattccatattgcttttttccccttactgcgcatgtgtcaggggatggaattttccactgcagaagtatctgggcaagtcatctgggtaggctttcatatctgtgtggctgtgggaatgtcttagtcaaggccacctgtgcagatccccttatctgtgcctgcagcttgatttttcaggctgttcttttgtttgaaagaatttaaccaaggacccaccctaactgatgcctgaaaggtttcttcctttctcctctctcagtatcttcccttgtggactacaccagtgtcgaaatgttcttgctaaaaatgatgcagggagaaagacaaagttacaaagttggcatccacaatttttccatcttgccccacttcccaattaaaatgaaggaaaaaaaattggtgaggtctccatccctgtctgaagcaggcatccattatcctgcccaggtcagttgctgcaatgggaagcatgacttcatgttttgtcagatgtaccaaattttcaagagaaaagccagagagctgaatatttgtgtgaaatttcctgatttttaaaagttggcaattgtatcaaattaggattatactccactaaatataacataaaatcgaaaagaacatgcagcataaatgagagaaatgttttccttcattagaggcagttcagtggctccacagagatcagggacccaggttccttccagctttctgctctatcattcctagggggtgacctttatcttcatggcccagtgtgactgcaagagctctagcatccaagttcccagcagaaggatggaggactggctggaaaaacaaggagacacagggtatgcatcaggtatgtttcaagggagctgccacaaaccacatctgcttacatcttattggctagaacttagctgcatggtgacagctaattgcaagggaagctgggaaatgtagtctctatttcagaggcacttactatagggaataaagggagaaaggctcttggggtcagcaattaatagtctgtgtcatagtaactatatcagtcagggttctccagagaaacagaaccagtaggaggcatacaacaagtctgaaatcttagaaaacaccagcaggctggaaactcaagccagatttttatgttacaatcctggggcagaagtccttctccaggaaatctccgattttgctcttaaggcttttaactaattagatgaggcctacccacattattgaaagtagactcctttacttaaagtcaactggttgtagatattaactatatctgcaaaatatcttcacagccacattgttattagtgttgtaacaaaaaactgagccccgtagcctaaccaagttgacacatataattaaccattacactaattcacaattttaaaaactgtgcatacaaaacagtagctgtctatgagcacggtatgacctgcagcctgccagtttgcaatcctttctttgcatgtcggagcaaggggcttggccctttatagacctacgatgtaataataccctaaccacatacccaccatacgactggaatcacacatacactgccacaagaggtctgcagtgaaggtcccaaagtcccagacagtatgtagagaaatagtcctgttttttgtttgttttgcttttaccactgtggaatgctatctgataacacacttttctcactcctttctgactcataaaattattttcactgtaaaacccaaacctcagttgctaggtagtgcccccacaggagggggcagtga

SEQ ID NO: 32025 - DNA, 2300 bp, Homo sapien
ctctatctccatttatgttacatcttctgccaaatagctttgctgccttgcccctgaaccactgcatgctcagcagctggtgcttcagcatcctgcagctgtagcccagaagtcctcactgcctcatatgttgagatgactgaatttggccaggagtccttcctgtgagaaagccctggagtgtgggcagcccatcctagaaaataaacaaagcagctttcagcaatgagggacacacagccagttttgctacattcacccttctggctctgtcttcagcctaagctgctcctttcaggtccctcccttgggacctcaagcctccctttcaggccccttttaagcacagcaaatcctgtatgcattaaggggaggtagttgaagtttgggcttctgggttttatgttattactggcttctgaaagctcaaacatttgcactccagggatgatagttgcatctgttaaatttagtgtaaagctgcctccttacatattttaagttaggcctaaaggtttccccatacatggtgaactgtagcctaattgggtatgtaaacagactgtaacctattcttgtaccaatcacagagttctggccaatcacaagtggccaactgttcaaaccgtgttcaaatagggcaaacctgagctacaaccaatccagctgtttctgtccctcaattatgttttctgtaagtcactttattttttccgaccactcggcaagactggagcctctctgaacttactttgatttggggtctttttgatttgcagatcattctttgggttctttgcttgattaaacgctgttaagtttaatttgtctaaggtttttcttttaacacaccccaaactgtaagtggaggcatcctacttacacagtaatagaagaatgcataaagcaataacatgaaggaacaagtgacaaattctgtaacgccatgtgttggggaaaagttctgagagtggaagcttgaataggttttggaagtatgagtaggagtttacaaggagagaatggaagaaggggaattacggacagaataacatggacggaggccggccgcggtggctcacacctgtaatcccagcactttgagaggacgaggccggcagatcacctgaggtctggagttcgagaccagcctgaccaacatggagaaaccccatctctactaaaattacaaagttagccgcgtatggtggagcatgcctgtaatcccagctactcgggaagctgaggcaggagaatctcttgtacccgggaggaggaggttgcagtgggccgagatctcaccattgcactccatcctgagcaacaagcgcgaaactccgtctcaaaaacaaaaacaaagaaaacaacaaaacaaaaaaacagacggaaattttattatcctgtgacaaacactgtatctttggtgaactcaaagtaggtttgcccactttcccacagattgttttggtggattaattttttgtttcagttagtgataaacttccttagctctttactgagtacaggtttactgtatgtaaatatgtataatattagattagtgcctggcacatggttagcactatcgatttttattagggactaggtctcaaacttatggtaattaagtagctcactttttcttttgggaagacgtaaaaatattctcaagcctaactcaagaccatcctttcctgtcttctagtcttgcccactcaaagctccatcctgcaaaagtcttaaacagtccatttcaaaagcccagcatttttaaagggtctaaggaatagcacaaaacaagatgcacccaaaacgtcaaggccatactggacaagggcaacgttagccatttttggtctggggtaattataggcagtatcttaaaacaaggcttgaaaaatgtcatgttatttccaaatcccatttcagaactttaaaaaaaaaatagcattttgagctcctaagaacgtttttggcggtaggtggccacatggagggtggcacagaggctcggcgggggagagcggaacagagctgggcgtggcagtgcctgcgagtcagcgccacgtaaccagaggcgctcgcactaatttgacctctaagagagactaagcgcagggaacagcgggtgcggacattacggcggaaggctctggaggaagcagaagtgaaggacctcgcagtcctgggacggtggggcacagagagagaaagggagccccgggcgcggcgcggtgaggatgcgagcagaggaaggacacgcggcgccgggtacctgccgggagcgccggatccaatgg

SEQ ID NO: 32026 - DNA, 2300 bp, Homo sapien
tattcttgtaccaatcacagagttctggccaatcacaagtggccaactgttcaaaccgtgttcaaatagggcaaacctgagctacaaccaatccagctgtttctgtccctcaattatgttttctgtaagtcactttattttttccgaccactcggcaagactggagcctctctgaacttactttgatttggggtctttttgatttgcagatcattctttgggttctttgcttgattaaacgctgttaagtttaatttgtctaaggtttttcttttaacacaccccaaactgtaagtggaggcatcctacttacacagtaatagaagaatgcataaagcaataacatgaaggaacaagtgacaaattctgtaacgccatgtgttggggaaaagttctgagagtggaagcttgaataggttttggaagtatgagtaggagtttacaaggagagaatggaagaaggggaattacggacagaataacatggacggaggccggccgcggtggctcacacctgtaatcccagcactttgagaggacgaggccggcagatcacctgaggtctggagttcgagaccagcctgaccaacatggagaaaccccatctctactaaaattacaaagttagccgcgtatggtggagcatgcctgtaatcccagctactcgggaagctgaggcaggagaatctcttgtacccgggaggaggaggttgcagtgggccgagatctcaccattgcactccatcctgagcaacaagcgcgaaactccgtctcaaaaacaaaaacaaagaaaacaacaaaacaaaaaaacagacggaaattttattatcctgtgacaaacactgtatctttggtgaactcaaagtaggtttgcccactttcccacagattgttttggtggattaattttttgtttcagttagtgataaacttccttagctctttactgagtacaggtttactgtatgtaaatatgtataatattagattagtgcctggcacatggttagcactatcgatttttattagggactaggtctcaaacttatggtaattaagtagctcactttttcttttgggaagacgtaaaaatattctcaagcctaactcaagaccatcctttcctgtcttctagtcttgcccactcaaagctccatcctgcaaaagtcttaaacagtccatttcaaaagcccagcatttttaaagggtctaaggaatagcacaaaacaagatgcacccaaaacgtcaaggccatactggacaagggcaacgttagccatttttggtctggggtaattataggcagtatcttaaaacaaggcttgaaaaatgtcatgttatttccaaatcccatttcagaactttaaaaaaaaaatagcattttgagctcctaagaacgtttttggcggtaggtggccacatggagggtggcacagaggctcggcgggggagagcggaacagagctgggcgtggcagtgcctgcgagtcagcgccacgtaaccagaggcgctcgcactaatttgacctctaagagagactaagcgcagggaacagcgggtgcggacattacggcggaaggctctggaggaagcagaagtgaaggacctcgcagtcctgggacggtggggcacagagagagaaagggagccccgggcgcggcgcggtgaggatgcgagcagaggaaggacacgcggcgccgggtacctgccgggagcgccggatccaatgggaggagggcccgcgccgcacctcaacctggcagaggacgtcacgacgccaaggcggtcgccgggccaatgggaggccgtcgcgggcagggacggggccgggaggagtcggggctgggccgcgccgaggcagctggctgactccagtttagccgccgccggagaggacgggcgccgagccggggctgcggacttcggcctgcccctcacctcactcccgctgcttgcacctcccggatggtgctgactgctccctaagcggcggcggcggcgagtcgtgaggacgcgccgcggaggctgttcggggtcgaggcttcccgtcgccggcacttcctcttgcggcgcccgtgcgcggccggcccggcaggcgggatggcggccgcggctccagggaacggccgcgcatcggcgccccggctgcttctgctctttctggttccgctgctgtgggccccggctgcggtccgggccggcccagatgaagaccttagccaccggaacaaagaaccgccggcgccggcccagcagctgcagccgcagcctgtggctgtgcagggccccgagccggcccg

SEQ ID NO: 32027 - DNA, 2300 bp, Homo sapien
tacccactagatgccagtagttcccctttgattgtaactaaaaatgtccgcaagcattgtcagatgtcccctgggagacaaaatcgccctggttgagaaccgcttgtctagcccatttcctgggagtggtggttcccttctctggaactcagacgttgagaagagaagggtatttaccacctcctctagcagtctgttccaactttgggtgcgtctttggagacagaaatctctcctctctgttaagctaaaacctgccatctctaactttttagttctgcctcttaggaccgtatggattggatagattcacttaaaaactttcccaattattggaacatgataccccgtccttcctggtccctcacgggattgttttagagccaagtcagcaaacttcttgtagttgccatgtatttgcaggctaccaatctctgatgcataatcttcctttccttccctccctcctccttgcctcccaccagccttccctccttttctctttcttcttatttcttgtaacttcttaaaaatgtaaaaaacctttttttgctcttataggctgggttttggttcagtaacttgccatccctggttttagagtctgacatctgctaatcttcagagggcagtgcagtgctttagaactgtatatagaactttggggaaggtctgagcagcatagaataacgttggacttgtcattaactccttcatgcgaagagcttactgcttttttgaagctttgtcacatttacagcgtaatgacagccaagacactggtttgtctttttcattaggccactttaccttctttttttttgagacagagtttcactcattgcccattgtgcaatgggcgcagtctcagctcactgcaacctccgcctcccaggttgaagcaattctcccgtctcagcctcccaagtaactgggattataggcttccgccaccatgccactttaccttctaagatatttttagacttcagcgtaggacgatctgtgttaacagctgtattaaacttgtcttagctggaaccaactctctataccctgctgaggtttgtgggtcttactctgtccttcagagtgttaatgaaatttttcttagcttcccgtcgttcaaatgttttttaaacatacctgggtctttcatgcaagttactaatacaaatttgaatgagatgtagctaagaactaaatctgaaatcacaaatgcctaacaaataaggtaattttggccaagcgtggtggctcacgcctgtaatctcagcactttgggaggctgaggtgggtggatcacttgaggtcaggagtttgagaccagcctggccaacatgatgagaaaccctgtcttgactaaaaatacaaaaattagctgggcttggtggtgcatacctataatcccagctacttgtgaggctgaggcaggagaatcgcttgaacctgggaggtggaggttgcagtgagccaagatcacaccactgcactccagcctgagtgacagagtgagattttgtctcaaaaaaaaaaaaaaaaagggaattttaatgcatggatatagcaggtctgtactctgttcttaaaattgttttggagaattatatgtaaatctgcattatacatgtttagtatcctcaatctaaaatccacagtgctccaaaatctgaaacttgagcactgacatacatgaaatgctcaatggaacattttggatttctggattaggggtactcagctatgatataaatattccaaaatctaaaaaaatccaaaattccaactacttctggtcccatacatttcaggtaagggatactcaaattgtagcaaccatcgtcagaggttaccgtcgttactgatggctttcagagtgattagacagtaaataagtgtaatgaccatgacaagaaaattttcaaaaaaactaaatcttatttacgtgcaaaataaaataattttgaataatgattttaagaagtaactgattttttttttccagaaaatatttacaccagcagctccagttcataccaataaagaagatcctgctacccaaactaatttgggatttatccatgcatttgtcgctgccatatcagttattattgtatctgaattgggtgataagacattttttatagcagccatcatggcaatgcgctataaccgcctgaccgtgctggctggtgcaatgcttgccttgggactaatgacatgcttgtcaggtgagtgtgcttttccctctcatgagttcgctgaattaaagggaaagcgtgttgtgtgacatggagtca

SEQ ID NO: 32028 - DNA, 2300 bp, Homo sapien
ggtctggttgtgttgcccaggctgatcttgaactcctgggctcaagctatctttccaccttagcctcccagtgtactgatattataggtatgtgtgcctgcccatccttttaccttgtatttattttttaaatttttatttatttatctttttatttattttgagacagactcttgctctgtcacccaggccggagtgcagtggcatgatcccgactcacttaaacctccatctcccaggctcaggcgattttcctgcctcagcctcccaagtagctgagactacaggcacatgccatcacgcctggatacttattgtatgttttggtagagatagagttttaccatgttggccaggctggtctcaaactcctgacctcaaatgatcgcccgccttggcctcccaaagtgctgcgattacaggcgtgagctaccacgcctggcccctggcccatcattttacaatttttaaacattttatagaaataattttaagtttacaaagcagcaaaaataaaatagtatgaagaacacttatataacttttgcctagattcacctgttgttaacattttatcccatttgttttagcatttgtactcttatctaaataaaattgtaaatgtgtatatatacacgttgtttacatacctgtctatagtgtgtacatatacatacattatttataagctatataatgcacacatataatcacaacatttaatatatattatgtattgatacagtacttgaatctgtcatccatattttaattttggatgacctaatgtcctttcttgttttttgaaaggacataggctgggcgcggtggctcacgcctgtgatcccagcactttgggaggctgaggcaggcggatcacgaggtcaggagatcgaggccatcctggctaacacggtgaaaccccgtctctactaaaaaaatccaaaaaactagccaggcttggtggcgggcatctgtagtcctagctacttgggagactgaggcaggagaatggcgtcaacccgggaggcagagcttgtagtgagccgagattgtgccactgcactccagcctgggcgacagagtgagactccgtctcaaaaaaaaaaaaaaggacatgaaatttttaaatatttcacttgtgttatcagttttatgtaatttaagtgggtttaacagtctttatattattttgcctcaactgttaaatcatatgtgtttatttctacatcttctcttttatagctttatttagttttatagatttaaccactttttttttatactttatgttctgggatacatgtgcagaacgtgcaggtttgttacacaggtatacatgtgccatggtgatttgttgcactcatcaacccgtcatctaggttttaagccctgcatgcactaggtattggtcctaatgctctccctccccttgcccctgacccctcaataatgtcctttatatcagtgtttttcccttcggtctaggtcagatattgcatttagttatttattatctttttagtcttttaatctgaaatatatccatagcctttttttaaaatgttttctgacatcaacctttttgggagaattacagtgtatccctcctccctccaccccaggaatgggctgttccccattttttgtttgtctgatgtttcctgatggttagattgaggtaggcattcctgactagaaaactgcataggtgatactttgtctctccaagaatgtctcatctggaagcacatggtgtccatttattcctcattggtgacattaattttggtgacccagtcaatatttcttttctgtgttgtcttcccttgcaactactatctaatctgtagggatatacttaaagacagtacaaataccctcttcctcatcaaaatttctccaaagattttgcatcaattgatgattcttgcataattagatctttcattgatgcttgcaaaatgatgcttttaattctaatacttcttgcatattcaccagtgagccttggtattctactgccagcaagagctctccttcctttcccatttgtttgtctttttactagcagtacaaacttatggattccttttttcaatggtttataattaattatttaactattttgctgcttaaattatccgatgttaggccagtgagagcctctccaaactgtgtcctgtgtctttgtggcatgctcccatttgattttgctcctcactttctagtacaacaagatattacaggttcatcatgcacctgctctgcccagtcctggaactggccatttctcggcg

SEQ ID NO: 32029 - DNA, 2300 bp, Homo sapien
atggtgaaaaatacaaaaattatccaggcatggtggcccacgcctgtagtcccagctactcgggaggctgagacaggagaatctcttgaacccgggtgagccgagatcgcgccactgcactccactctggtcgacagagctagattccatctcaaaaaaaaaaaaaaaaaaaaaagacgactcagtatacaaataaagactggaaagtcctatattaaaggaactagttaaatactagtttattttacttaatctagtgaatttttaaatattttctttctttctttttttttttttttttttttgagacagggtctggctctgtcaaccaggctggagtgcagtggcacaatctcagctcacctcaacctccacctcctgggctcaagccatcctcccacctcagccttctgagtctgggactacaggttcccaccaccatgcctggctaattttgtattttttgtagagacagggttttgccatgttgcagaggctggtctcgaactcctgagttcatgcaatctgaccaccttggcctcccaaagtgctgagattacgcccggcctaaatattactttcaaatagaaccatcttcatgggtagcagtttataatacacaagtagaatttgggaaatgtagtcccagtcttccattcttcacagtggatgcttcagccagtttcctgtctctgcacacacactgcccgacagcgggctttcccttctccttcagagcagtagcagttccctttcttcattcccacccatcacagtggcagccccctctgccctcctgtattctgaatcccacccttataatatgcttagattttgcctttctcccagccgttttgtgagcattgttcgtgtgtaccaattttttctcatcctttaaaaagaaaaaaaaaaagccccttttctcaattgtacatcgcaaatccaactcttgccctcctgcagtgtcagaggacttggctgtgatgggaataagccttggctctgttctccttgcatacttagcccatgggaacccagtttctggcctcaccaggaatgttgttgtgctttgagctccctgtggccttgcatgatgcctccgttggtccttacaggaggtgattggctggccacctcacttgctttctcctgtggacccttctttctctgtccttccttgaatgctgcctttgtccctcatgattatgctatcaacattcttctctttctgctttctctgtaacaggtttattgactcttttttttgagagtcttgctctgtcacccaggctggagtacagtggcacaatcttggcttgctgcaacctctgcttcctgggtccaagcgattcttctgcctcagcctcccgagtagctaggattagagacatgtgccaccaagtctggctagtttttgtatttttagtaaagatggggtttcaccatgttgtccaggttggtctcaaactcccaacctcaggtgatctgcctgcctcggcctcccaaagtggtgagattacatgtgtgaaccatccacccaccctgattcaactgactcttaactttaaaaatcacattggtcttaccatacatagttcatcaattgtgggagagaaacttgggtgtcatgctttatttatttattttttttttgagatggagtctcactctgtcacccagggtggagtgcagtggcacgatctcagctcactgcaacctcagcctcctggattcaagccaattctcctgcctcagcctgcccagtagttgggactacaggtgcctgccaccacacccggctaattttttgtatttttagtagagacagcatttcaccatgtttcagtctcctgacctcgtgatccaccctcctcggcctcccaaagtgctggcattacaggcgtgagccactgcacccagcctatttttctttttttaataagagatggagtcttgctttgtcacccaggatggaatttgtagcatagtagtgtgatcataactcactgtagcttcaaactcaggctcaagtgatcctctcacctcagcctcctgaatagctggaactacatgcatgaaccactgcaccattattttatttttaagagacgggatctcgctgtactgctcaggctagccttgaactcctggcctcaagtgatccttctgccttagcctcctgagtggctggctccactctgcttggctctgatatttttccataaagcctatcattcatttatcatggaggtatgttaattttgccttcttaatttctctcaaattcacctgctctttgc

SEQ ID NO: 32030 - DNA, 2300 bp, Homo sapien
atgcagaattgctaggtaaagaggtcaggggaatgctaagccagttcttaagacttctctgtcctctgctttgctgttatccttaaggcatatactttgtctttctgcagaaaattctacctggctacaattactttgaacattaatgttgaaaaagaaaacaaccaaagaaaattggtacttacccttctacaaaagaagtgtgactagatatcaatcagtaattaacatatcaaggagctcttctagctaaatgaccatccagtagagatttcccacattcccatgaatatcaagaatagttgtcagaatatgtatgtacctgagcatatgtacacagacaagggggatgttgtggaatatggcaatagcattgttcttctcccctttcaaattgcctttcttgaccttatgccattccatatatatctgagttgtgcctcatttatttattggcaatacctagtgatacggatttagctaacaaaagatatgaagaactattatattgaggcctgtcctctacataccacacttaaaagatggtgaactgtgagtactacttaggttgacagcaacaaagcataagacaagccccaggtaaacgtctaaactgtttactcacattgtcctactccagccccttcaattatttcccatctccacaaatagtcgggggaaaaaattaaaattttcctttatgattcttactgttcttcgcagctcatcttttcctgcttagaattaaccattgctaatttaaaggagcagctagctgcttttctgtcagtctgaagcgtagtagtggaagaggtagtaagcaccagctgcctctttgctgctttgttttcctcctgattctcttaaatttgggttgcaaagctatcccgccccccaccctgccccatgaaacttgagcattcaaatgaagattcagcagtgtctgttcttcatttctatagccaaagctgttagttaaaatcccaaatctatagcatttaaagataccaaatagaaacaccttccagctttaaaaaaaaaaaaaaaaaagtcttccctctgctttattctcactttcttaaaaacacttattctgggtggtactttttaggtaagaaactactgagtttcaggaaaaatgctagctactctgcagttaccgtgctttggacttgcagttatcatagttttgggagagtcagtattgtttaacaaatgcaagtgagaactagaagggttaataaagttgctccttagagtggtgtcaaaccagaaccgagacacttaaaaagtacttcattttttgaatggaaaatattggagaaaagtatgggagatgcaggtagcatgtgagtaaatactacggtctagccttcgagcatcccaaattccgggggtaacttgacagtgctgtgctctcctttgtcatttatatctggcttaggaatggaatagtaataacaagatgccagtgatttggaatagtttgttatagaacattcagtgcaaaatagtgaaaatgtttggtcttcagaagtgctgtagttgttggtcattgccttaaagcagtctgcttgacgctaggagcactgaagcagtccagctccatcaagagcactgttgaagggagaagaacccttgttcaggaagccttagaaagggatccttaaaatagtactctacgcagacaagtgaaaattcttttaaactggatattactcaacatgttttcagatgtttccactacattgaggcaaactttttaaaagtggaatgcaaatagcattttactttagtatttctgcttttttctttctgtttctttggtaattgaaagtttgttgatgaatatttgtgtaaaacgcattcaagtctataacctttccaattacctgtggcccttagtcccacaggagtccctgttggaagggggtaaacactggatattaatgttgctgagtgagtctttctagccaggacaagctgattggaatttttgaatggtagagaagaaacagcacaaaggcacttgccattttaagtgtttggagaaagagaaccttttaagtttggattgggtgagctttcttctaaaaggagcttctgaagtaattgcaaaggaatagaatcgactatttttatagtatatttaatatatttgtatataactataataggaaccctctacatgcctcccacttttctaatttacttccccttttgccatagcactagtatagcctcatccgcatgggtaatgtgcctattgtcagcctaccaaaagatagtgctgctgcttt

SEQ ID NO: 32031 - DNA, 2300 bp, Homo sapien
aaaaatccttaggtgcaggatcaaggatctgaataagtgcttcagtttgatgttcttttgcccagagcatacagcaagaattgaaaatgtttactgaggtgactgttactttaaagggaggattttacggccagaaaagtgcattttttgaaagaaaaagatggcttttatttcaaatccaaaagatattcattaaaacataggaattactaggaattaagactgtaaagatctcttttccagtagaagcactgaaatgtgctttctcatgtggaccaaatgtgccttaacgcatcaagataagtaatttcccgaagataagtagtagtcacacgttgttccaacgaggaaatccatgcaaattagggtcctggtttatttctgatgcttcattctccatcttccattacactgtcacttgatttttaataaaagggcaagggaaaaatctccaaatgagcaaataaatcccgacctcctttcgcttccctcctctggccgagggcgcatgccctgtctccccaggcccacccaccaagaagaagcaacccaagccgcgctccctcaggagatgggagaagatgttactggcggtccaggcgcctttgcaactcttctctcccagcaccaggagaggaaacacgaatgatgccactgggggaaaaagtctcctgccaacacccgaaaaatctaagctggcgtcggcagtgttttgctttggaagggagagcgggttccttttctggcctctggatccctcatccggcaggaagctcttcttcctcctcctagcccccggcatacggggggaaagccaaagagcctccaggacctaaggctagcgctctgccggccggccgcgccctccacccgaccaggccccgcctccccggctttctagtaaccggcgccgttcccggccggggcagggaacggtgcgcctgcagagccagatttcggcccaaggggcgcgggagtctcttcgggcgtccgggatcccctggcgcggctccgtgctgcctaacggggcaagtcgcatgcgcaccgagccgcgctggggaaagggagagtgaggggaggggcgagcgcagagcctccgccggccgtctgagcccgcggggtcgctgacgacgcatgcgccgggagggggcgcaatcacggactcggcttgcggctgccggtttaaaaaaggaaaccccggagagcgagagcgcgaaggaaatctggccgccgccgccgcgagcgctcccggtgagaggcgcccgcccggtgggcccagggcctgccgagtgccggttggcttccttggcggcgcatgcgcgctcctgggctggtggaggaggggaagggaagggagggggaggaggagctggccacaggagcggcgaatttttgggggggtgggtggggggcgccactcacagccccaggtgctgctggaggtgggagccgcggcgcctcctggacacaggcggggtagtggttccgagtcaccgcagcgggagacctgggtgggggagggaagaagccggagccgccgcaagccacacggtgagggcgcggggaaggggagggagcggggggcggcgtgtgtggggccggggggcggcggccaagggtggggaaggcgggagctgaagcccaagtttggcgtgtcgttctagtgtgtcttttcccgggacttcgggccgaggcccgccctgcctgagaggccctctggggcagctggggttacctgcggggcaggggcgggagtggggtgcacggcggggccgggcggcttgagggcgcccggagctgcggccgattccagcagctgggaggcggggaaagacggggaccgggtgccgagagagctttcgctggggacccgctaggccttgtgacccactttattcctgtcaccactcgggcacgtttggagcagcgcccaatggggcgccggggcggccagctcctccggggaacccccgccctcccggcgcccggcccgcgtgccgcagtccgcagtccgaacggccgccgttgccggccgcgggctggttccgttagtggtggtggttccggggttccgttcctaggcagcgcgcggctattagcgtctgactccagcgaccgcgcgcgggttcgagggttggcggcgaggcgctcggtttctcttcttccgtccacccgcgcttcccgttccccgtcaccgccgctggcgtttgtagatttctttccgccagtgaagctgggttttctggagttggctctggcgctctggcccctggagtgtaatttcctacacgcagcgccgc

SEQ ID NO: 32032 - DNA, 2300 bp, Homo sapien
aaaaaatctgtctcaaaaaaaagacatatccagtacattttttcttttcttggagagaatgtgggagaaaggagaagctgtgaactgaaccatgggaaatgttcaagcagtgagagaggactgagcagaaaaacgggggattatcaacaggtcttggtaaataattaaatacagtgaaagagggaggagtcaaagatggacatggtttgatcttggtgactgagaggacaatgaaatcattaaaaagggcaaaggtattttgaagataatatgttctagatgatggggaatataaggagggatcagtgtctctagaataaaattcaaaaatccatcctagggaaagcattcaagccctctcttgtctggctgcaacctaccttatcagtattaataactttgcctccgtcttgctacctacctcttgtcagtcgggactcttgattacatgtgaaagaaaacctctcactggtttaagcaataaaacagatgcaagaatttactgactggtttaacgaaatttccagaggaatctaatctacatttgtttccaggcctcaaacatgtctttaggccaaacctgtcttcaaatctgctttttttccgtgttgccttctttctcagaattcacgtgtggaaagatggctccaggtctccattctcccagatttaaacccattggtaaagacgtaacacccttcttaggaaccgtagtttgcaaccgaggattaaactcaaatatgccttccccttgtgtcctgctcagaccatatggactgagagtggataaatgatagttcttcaaaagaaattatcagaatagggaatgaatgctgaacaggcaaaaatgtcgaccaaaatatcttctgctatatgatggggtaaattaacaaatcatgttttcccactcctgaaagaaaaatccttaggtgcaggatcaaggatctgaataagtgcttcagtttgatgttcttttgcccagagcatacagcaagaattgaaaatgtttactgaggtgactgttactttaaagggaggattttacggccagaaaagtgcattttttgaaagaaaaagatggcttttatttcaaatccaaaagatattcattaaaacataggaattactaggaattaagactgtaaagatctcttttccagtagaagcactgaaatgtgctttctcatgtggaccaaatgtgccttaacgcatcaagataagtaatttcccgaagataagtagtagtcacacgttgttccaacgaggaaatccatgcaaattagggtcctggtttatttctgatgcttcattctccatcttccattacactgtcacttgatttttaataaaagggcaagggaaaaatctccaaatgagcaaataaatcccgacctcctttcgcttccctcctctggccgagggcgcatgccctgtctccccaggcccacccaccaagaagaagcaacccaagccgcgctccctcaggagatgggagaagatgttactggcggtccaggcgcctttgcaactcttctctcccagcaccaggagaggaaacacgaatgatgccactgggggaaaaagtctcctgccaacacccgaaaaatctaagctggcgtcggcagtgttttgctttggaagggagagcgggttccttttctggcctctggatccctcatccggcaggaagctcttcttcctcctcctagcccccggcatacggggggaaagccaaagagcctccaggacctaaggctagcgctctgccggccggccgcgccctccacccgaccaggccccgcctccccggctttctagtaaccggcgccgttcccggccggggcagggaacggtgcgcctgcagagccagatttcggcccaaggggcgcgggagtctcttcgggcgtccgggatcccctggcgcggctccgtgctgcctaacggggcaagtcgcatgcgcaccgagccgcgctggggaaagggagagtgaggggaggggcgagcgcagagcctccgccggccgtctgagcccgcggggtcgctgacgacgcatgcgccgggagggggcgcaatcacggactcggcttgcggctgccggtttaaaaaaggaaaccccggagagcgagagcgcgaaggaaatctggccgccgccgccgcgagcgctcccggtgagaggcgcccgcccggtgggcccagggcctgccgagtgccggttggcttccttggcggcgcatgcgcgctcctgggctggtggaggaggggaagggaagggagggggaggaggagctggccacaggagc

SEQ ID NO: 32033 - DNA, 2300 bp, Homo sapien
tcttttttccttctgacctctgtcttagattcccacctcctccatcaggaaggttgctggccgattggaaaggagtggctcttttgagtaggtagaattgggtctatacagacattcttcagagcagagtatctaacaaatctttgtctttctaatgttgaccaattattatagcttaagttacaccttttactaacaaagttcctgaatttcacttcttgttaacctgagtgaagaactcaggttaataagaagaagcagaagagaaaaaaatacattatttttagaaaaataaattgccttgataagatggggacttgagagcaaggagagcatgctgccctaaaaccacaaatgcatggggcagcattagctagttctgtgcacagtacttccactagcctggactttggattgtcaaaataagaaaagaatattaatttaatcagcagttcccagggcctctcagaaatccagagagacataggtaacatttttagggctcctgggatgaataagaagaagaaagaggaagaagaagaagatgagaaaaataccaagacatgattacaaaaattgtgatatgttcttaattatttatatttaacagattcatgtctcatacacaaacacaacagaatatatgggctactaggagtataagatttgtattaagtatcagctaggcactagagatggactggccccatgttgaacccaagtttaaagttatgtcattaaaaacattttttttctttccaagtcctgtgagtatatctctggaactgtgtaaaacaacttgtataaaacaccaagtgttttcctcaagttcctggcatctcccagtaaacatcctttccttaatttaaacacagaggaacccctacctgtctaggcatcctacctaaaaccagagcttttttttttttttttttttttttttttttttttttatttagacagatctcactctgtcgcccaggctggagtgcagtggcgtgatcttgactcactgcaaactctgcctcctgggttcaagtgattctcctgcctcagcctcctgagtagctgggattacaggcacctgccacatcctgttagtttttgtatttttagtagagatgaggtttcaccatgttggccaggctggtcttgaactcctgacctcaagtgatccacctgcctcagcctcccaaagagctgggactgcaggcttgtgccaccgtgcctggcctaaagccagagcttctgtcacttaaggcagtggattttttaagatggagttggggagcctacagtcccatttaagcatctaatgaaagctctggctcttaatttcagaaaaaaatgtacacatacaacaaaattacgtgtagtacacttgggggctggggggcaagatattccctaaaatctatccaaatacattgtatgggctaagtgtagtggctcatgcctgtaatcccagcactttgggaggctgaggtgggaggatcacttgagctcaggagttcaaaaccagcctaggcaacatgtgagacccctgtctgtacaaaaaaatttaagaagttatctgggtatgatggcacatgcatctgtgatcccagctacatgggatgcttagacaggaggactgcttgagccgtggaggtggaggctgctgtgagcagtgtttgcaccacttcactccagccggtgagacagagcaagactctgtctctaaacaaaaaaatatatagtctatggattccaggttaagaacgcctcctctgaagggttctccaccccaggagtttgttatttctccatgaagacaggactcagggtttgaagggtgccagagtctctgaaacaatcggttgattcaatggtggtgatggagggaaaagttgacaagaatgtcagcaccagcaccacaaagggaacaggaaaggcagtgcttgggatagatgctccaggacctggcgcgtcagtacccacaaccatcccctgtgttgggcctctgcattgcctggcaaccaagctgccacgcccgcccatgcgtaacaagtccttgttcgcctctccctcttctggcggtcactcgaaaccgccgggcctgaagcgggcgctcttccagcctggagaaggctgcgggtctccatccgtggcgcctcgccagctgcaggacgacgcgggctcttgaggggcagagcagcgcatcatgcaggtgagggtcgggacctgccgagccaccctggaacacccagtgggtctccagctgggcccgaagccaagggacacaaatggggagggcggac

SEQ ID NO: 32034 - DNA, 2300 bp, Homo sapien
aaaacagagtttagctagatcatcccctgtgacctaataactccactcctgggaatattcctcagaaaactcttgcacatgtacactagggggcatgtacaagaacattccaagcagcctggttcatgcaggaaaagaaaaaaaaaaacctttaatacacaagttgcttattttgctgagctgctggggatataaaaaacattgagcccactgtttgaggcttctctgctctggctgacatttcactctcacactggctgctgggactggtgatctttcagagcacctctgggagacaccaggaagaaggtcacggggaagcagagccatgttcacttgcttgcatctgtaggtcatttacatcctttgtgctttctttttttttttttttttttttttttactactttggtaataaatcaaagtacaagaaccttgaatccagtattttctcacccatccttgaacttggaccagacgctaaaatccagcctttcttacatgcttcctgtgtataaagaacttaaagaaggtggccattattttttttttacctaatctatcaggttttctcctgcctctcttcgtatttctgacagagcactatcccaatctgccttgtaattcagctatttgagtaagggtttagggtcctttaccaaattgtaactgtcactaaatcttgtatccccaaagctcgggtcttgtttacagtaggttgaactgtatgtgcctgatacattaaaactcttgattgagggagaagtatcttggtggagtagaatagccagtggcttccttacatgctgacagccttgagcagattgtttaatctctcctggcatcataatgagaatttcagtacttttacatcccagagatgccatgaatattaaataaaatagcatgagaaaatgcctgacgcaaaaatgccccttcaaaaatgttaatgtacttcctgccctttcctcagcgttcctcacctttcaaagggaggtcaaataagaccggttttcgccggttttcacacactggggcctatggcgcgggggagagggggcggggaggggcggtgcgggggcaggaggagcatcaggaaaaatagctaatgcatgctgggcttaattcctagctgacgggttgataggtgtagcaaaccaccatggaacacgtttagctatggaacaaacctgcacatcctgcgcatgtaaccccgtaacttgaaataataataataataataataaagaccagttttccctctttctatagaaggaaattaggatgtattagctggtgtcctggaagaggctgcttcctgaacgtttccaatcaaggaaataaaggaaagtatagagatggaaagagggagtcaggtcacggtagaaatcaggatgcaatagcagcagaaatgcatagaaaaaggagtttccttaggcttggaaatccgtaggataaccagcgctccagaccagttagaaatgtgtgtgtgtggtcaagccccagcagtcctttcttctttgtcctttattaacaggcaactgcatttccctaaggggtctgtgattttgcaggaatttgggggagggtcgatagcatcaacatcacagttgaaccaacactgccctgatatgcaccaggcattgcgcttggaactggggataaaccggggaacaaaacagaggtgcttccacagaggtgcgtactagtgactgccggagctctggaagaggtgaaggagaaagggtgtcccacgtagacccaggacaccagagagcgtcgccactaccaagtttaaaaactcagacggcctggtttgccatccacaccctgttcccagtccagtccttccaaaggtgggaatggtgcattatttaaattccattctctttatcccagagcgaaaatgcgtggtactcgggtcagaaactcaggctagggggctcgggtcctgctgcagggtggggcgcgggcaggcagcggggcggggtgaggcgaggtaggccgggggcggcaggcggcgaggtgacgcgcggcggggaccgcgcagcccagcccacttgtgcgcgagatttaaaagttggcggctcgccgggcgctcagtcctgtgtccgggccccgaggcacagccagggcaccaggtggagcaccagctacgcgtggcgcagcgcagcgtccctagcaccgagcctcccgcagccgccgagatgctgcgaacagagagctgccgccccaggtcgcccgccggacaggtggccgcggcgtccccgctcctgctgctgctgctgctgctcgcctggt

SEQ ID NO: 32035 - DNA, 2300 bp, Homo sapien
ctccacaatagcactagggaggaatttggaatccaaataattcgctggggcttactaggtgtttctgtacccagggataatttgaacaggtaattacagcaatcatggcttaaccagagaaaggaaaataaaggctgaaggtgggggctatttcaccagagaaacaacttagaccagctgatgtgctggtcaatggtgagggaaaattagaatgggtagtggaagagggagttaatacaagtatggtcctgacattgatgcagcagtaaaaactgaagcttattctattaactctcttatattaaggctttgctgagattgtggctggccatcaccttgaagagacctctgtgaaggactgaacataacagagcacacaggcagatcagagtgctgcaagatatggacaccttctatgtccttctgtgcaacttaggccatgacttcaaatcccttcagcctattattctaaccactgctgcagcaacctgctcggagcaggtttgatgacctttgaacaagtgcgaaataccagcacctctcctctcacttcctgccccagcatgtctctgatgtgggagtcagcttggcattcacaactgtgcgatttgtaagtgtgaagtagttaatgcccaagggcattaaccttcgatcaaagaggacaggagccgacatacaaatgcttcctccgttctttcctttaatggacagttctgagactcatttcataaagcttcttagaaggtcctaagggactaagaaaacattcaaatatggtgatgaccaactcagtaacacattcttatactgcatctccctttttgttttgtcttcttcctcttccctcattttgctccctgggatcaaatttccaaataaactattgcatataagtgtcactttgcagggaatccaagaggagagaggataatttaatttttggacacacaagtttgaggtgtctataagacatccaagtggaaatgtcaggcgatgggcagtatatacacaaatcttgaggttcaagaaagagatctaggcttctgaaatgcaattcatttcccaactttgaggagggctataaacatacaggtaaataaaagaaagataataggaccaaaaaacacatgcaattgtcatagagtgtccacagtaagcattccggtgccaagcaggaaagggtctttgtaaagatataaccagatcctgctcttaaaagggaagtcatttgatgaaagtgaaaagtattctaactactgtttgctcatttaaatttctagcacatttatctgatctgtacctctctttggtcacttattttgtgtcctattttatatatatttgtacctacaccttgtctagtcctaccacactgtgaactcctttaggttaagattcatgcctgaatcacctctgtacctggaatcaaagtgcctagcattaaaaaaaaaaggtgccaggaatattgaataaataaaacacctacctgcaaccagcaacattggcatcatttatgcatcccaaacttaaatatgcataagcatcatcttgctaagatgcagattctgattcagtagatctgaagtgagccagagaggctgcatttcctaaaaagcccccagatgatacccaagcagctgatccacggaccacactttgagtatcaaggtcatgaggacaatggttcttgaccttagctgcatatgagaatcatctgggaagatattaaaagtactgatgtctgggtcccacccgcagggattctgatttaactcatttaagctctccaaagtttaagtagcaaagatctagagttaatagagctttacgtatgaaaaaagaaaacatttaatcgaatttcttcttaaatgaattgctgcaaatatctgaataaataactcttaatccccaactcccaagtcagtttctgtgccacaaaggccccgcccctgcccttccctgacacgcccctccaatgaggccttgttccgcctggccacgcccgtcggttggcgccccgcccctccgcgtctattggccgctccctttttctcccatcgctgcttcttccttctctacgcggtcaacttccggcgcggagtttgtcacgtgcccggatataggaagtgttgggggaacggccgcttcccgttcaacgctttattgaggggcgtatcctagtggcccccatccggtctccgttttggaagacccgcctcggcacagccaggctcagtccggccttgcggtaagccttcggccgcggctgcccggtagtcccggcggcggcggacagacga

SEQ ID NO: 32036 - DNA, 2300 bp, Homo sapien
aatgaagacagttggctgagattctggatttggggaggttcttgatatgaagtgactggagtaaaaactaggccagagaacatcttgggagttgattcgctcagcctctgaaacatgtctgaatagttcagtgccaaagaatagcatttgtgtgtatgtgtgtggtttgaaaaaaataaaaatagggatgaagtataaagagagaaatgtggctgaaatatgtgaatcatttaccaaagaagagtggagtgagtgtggtgaaaacaggagagccagagaaaaagatctgtgacttctttgctaaaatgttttagaatagacctttttgttttgtgtgcagtttttgagtgtaattcaaatgcacagcacctgctggggcagtggcttacacctgtaatctcaacactttcggagactgaggcgagcagatcacctgaggtcaggaattcgagacgagcctggccaacatggcaaaaccacatctctactaaaaaaaaaaaaattagccagacatggtggcatgctcctgtggtcccagctacttgggaggctgaggcacaagaatcgcttgaacctggaagacagaggttgccgtgaactgagatcgtgccactgcactccagcttgggtgacagagtgacactctgtctcaaaacaaaacagaacaaaacaaaaaaatcaaacacaccgcatctcttatgctagagtaatctaaaatcatttgggtttgttctggttttaagaaaaggtaagcatttaagaaatccctcagaggataaggaacattttaaagacttaaattttagtgttgtatacatgaaaggtacagaagttatggggtctgactcaggcccagagagattatatgaatagtccaggcttacaagtttacagagttcactgaaagcaaagcctagaaatgattttaagatgttaaggaagaaatcctgggcagattcaaaccccagctctgttacttaagagatgtcagtggcttctgaacccttctgactcttaaagtcgtattgcacttacattttatttactgtggatagtatgtaaataacgtgtgaaaccacagcgtcagctgtacaatgatatcctttaaatttctggtccaggtttttcatcgtaccatgttacttgccttcttaatatggcttagtgatttatattttttgttctaattaatatggtatatatgttccaagtcagcatattgctttgcagtttaattttggatttggcagtttccttatttcagggaattcagaatcaatagtcagaatcatttagaaaatagtgataaggggatggtggtttgttactgctttgcctggggaagaaaaaaaaaacagttgaaagagaaaagaaaaaagatgatagaaggagctatcggccgtatgctcttctacatcctgttactagttcccatcatactacagttataaattagtttcatatatccttcagagtctggtataccactgctgctttctcaactaagatatcacataggtgattatgcttttatttagggtttcacataggtgttaagaaaatttctagctggtagaattggaggaaatgttagagataacatggcctaatgcctcctaaatgtatagaaatgagaatgtgccattaccagtgatactttctggcaccttacttgtgcattctggaaccttacttgtgcagtctgtggaaatataaaatcctaaggcatggtccctaacattgatttagaggcaagtgtacctgcatgaaatactgtgtaaaacatggaagaacataaagtgataaactgaagtagatgtgtaggtatatatcaatttttgttatgctactttcaaggaaatttagcaacatttcacctttattcttttacacatctaaataacaagtatgttttttgtttgtttgtttgtttgtttgtttgttttggtctttaactttgtaggctaacatccagtcaatcatggcatctgaaaaacaagtcaacatcctgatgaaattgctagatgaggctctaaaggaggtagatcagattgaattgaaactgagcagttatgaggaaatgctccaaagtgtaaaagaacaaatggatcagatctctgaaagcaaccacctaattcatcttagtaacactaataatgtaaaactcctatctgagatagagttccttgtggtaagtatgatcataaattaccaacaaaaaaaaactagtgatgatatataaaacccatttgtaaacattttttaatttccttgtgagaacaggatttaaaataattcca

SEQ ID NO: 32037 - DNA, 2300 bp, Homo sapien
ttttaaaaaataaaacacaatttggagacatttatagacctaaaactataatatctatatctggctagtatctaatacatgtgatgctgtagaatcctgattatccttctggcatcttggttagaaaacatttctgtaatagaatgtttatattgacctttggcaacatagaaatagataatagtccaatggtaatgcctgtgtattttacttaatattattgattttgttcatctttattgttagcccttacagaaaagatatggtagcccaggcattctaaaaatacagaattgttccattcttcaacactttagctcttagtcctcattgattcttttggaagatgtgattgttttatattcaggtagccacccagaaaagaatatccacataggtctacgctccgttatccagaattctgggggtcaggagtgtttttagaatgtttcagattttagaaaagcaatacagtatatatactgtatattatataatcactccaagcacatgtttttgcaacaaaaaatatgaatagtcactctaagcactataaataggcccatgtcagttcaggtcacattttaccatcaaaattgttttggtgccaagcttagtctgagttttcagagctttttggctgtcagaattacagaaagggattatggacctattaatataccttgtgtataacatctgtggtagctgtgaacttctgttgcccctgtgttctagttcttgttattttgaactggtcagtttcattttgtgatatttttctgccatctctagttcagtttcccaagttaacctaagtagatatcagtaagatgaatctgagaagtgtattggttgttttctaccattttatatgtaatttctgtataatgggtccttttttctttttaatttccattttaaattgggatatattctcacatgaagaaaattttccaacagactgatttgaaaacatttatgaagaagggacatggataatgatgtgggtttttgtacttggcatgtcttatactcccatctttctttctcagttaccaaggaactcctcatttcctctaggccagaaatgtttccttctgaatagtctgtatttaaaagaaaattttttaaaattcataaccactaggttattttgtgtatatagtacagtatataaattaggtgaaagaaatcccttttaacttaaaagaatttaaattcaggacgcttatttagctaatgtgtaccaactagtatgatacacattcataattagctttaggtaaccttatcaggaaatgagttaactagctccaaaactctagcagtctgtgtaattttaatacagttttcacaaaatgctgacaaataacttctggctatctaggcaaattagattgagtgaaaattacatcaaataaatctgtcttggtttgccttttgcttgttgttgggaaattgtattttcaatttgaatctgctccaagacagaagtaagactcagatgaccaaggttccaattccaagctctaagactttatattctacttttttttatctgttgttttaaatattacaaactctaatgggaataccataaatgtagactgttttgaatgatttctctatttgtgtttcttaattcaagctatatcaagaaggtcatttgcttggtaaattgtgaaatatggtatgagagagacaagcttcattaaaacgttccatcttcattcctttaaaagacggaatgggtagttgatttatcagagtgccattcttgcgtatttatgattatcttatggtggtaatgttcatttgatatacacaggatataaaagttgtgtaagtatttggtttttatttttctgtgttctattcttaattatttttctatgtcttattggtttggcttggccacattttggtcattgtttagactttttattgtaacgtttctttgtactgttgattacatttatttacttattttactcactttagggtcatgatcagagttcgactcttgcccaacactctgttgaactgactttacccaatcatcatccatttcatagagatttgctccgatatgccaagctgatggagtggctaaagagtacagattatggaaaatatgaaggactaacaaaggtatggatttgacgtcatttactcactgagaatagagcattatcttttagaattaagaggtcatgtgttcagttccccaagtttaaaatactgtagtacattcttagcaaagcagaaaatgagtcagtgctctttaccagtgataacat

SEQ ID NO: 32038 - DNA, 2300 bp, Homo sapien
aatcaataagctttttgcctaattgtgttcccagtgagtattattgccctatctttatatataatgcagtattcatgaatgtaatttaaagtgaagaaacaagattagagccaacctagtaatgatttatggaatcattctctgctcagagtatatttttgattgacaatattaatgagctttttaaatgaaattgactttttcccaggaatgttgcgtcatcctgtgatttgagcttttcacagattatgtatttttacctcatcatctaatttggttgctgaagagttgtcaaaaacaggaattttaaggaagaagaaaggaatgaagaaaaaagaaggaaacagaccaatcagtgtttctttagtaagaaatcataattcagaaagctatttgcacttggttaggtttacacagctcacactttttggcaggaacaggaaaaacttgttcaaaattctttgggaataagaatcactagccactgcctctagctgtactgaggctgaatctaagcaaagccccattttttggtatacagaaaatagttgtagcttggactgcccagattccctcctcccgggactgctaccttcgtctgcaactctgggtcatacatgtagggtagttagtagagatggtccatccatgcttgggtaggaaaggagttttcctctcctaatagcctcctgagattggcagtctgacttgaagatgactcacatgtcttctctccacctcagttttacatttgtagaatttgtcttattgttgtgaaccccaaatgtctgagacaagatctcagtcaatttaggaagtttattttgccaaagttaaggatgcgcacccatgatacagcctcaggaggtcctgacgacatgtgcccaaggtggtccgagcacaccttggttttatacattttagggagacatgggacgtcaatcagtatatgtaaggtgaacactggtttggtctggaaaggccaaacaacttgaagcaaaggtgggacaacaaagtggggagggggcttccagatcataggtagacaagcaacaaatggttgcattcctttgagtttctgattagcctttccaaaggagccaatcagatacgcatttatctcagtgagcagaagaatgactttgaatagaaagggaggcagatttgcccaagcagttcccagcttgacttttccctataacttagtgattttggggccccaagatttattttcctttcacattgtataaagaaaaagtaaaccatggagaccctacagcggacccaggttccactgcttgctactcgaaagccaaacactagaggcaagggttgctgtgaggaaaggcagatttaatcagccagagaagctgaggtgagtggaaggaaaaaaaaatcagagagccagtagagaagatggtgaactagcattctaaagtaccatcttaaaatttaaaacttaccatagggtttttgttgttgttgttgttgtattgtgttttgttttgtttttgttttcgtttttgtttttttaggcagggtctcactctgacacccaggctggaatgcagtgatgtgatcacagctcactgcagcctcaacttcctgggctcaagcagtccttctgcctcagcctcctgagtagctgggactacaggcatgtgccaccgctcccggctaattttgcattttctgtagatacagggtttcaccatgttgcccaggctggcatcatagagttttggagagacactgatacagtaaaaccttcctgtggtctttcctatcagtcagttctgttgagtgccaggaaaaaaggtatctaagtcatttgagtcccactgaaaaagtaatacatcccaatgaaataggaattttaatttatatttgcttttaaagttatacaaagatcatgggaaataattgcccatttgactaactgttcttacattagatacagagatatgtgaaaaatgtatatggcatacaaattgaaaaaggacaggatctatatatattatgtttggtccaaatgctattttataagaatacagctataaaatattttaagacaatcaatggtaaactgtgaatcaatatacaaatatttacacaacatgtaccttttggaaggtatacctgatctttaaagcaggtaaacatgttctaaaaattgacacattaatttgaaataatataggaaattgaagcttagattttatgataaacttaaaagaataggtacaacttttctgctttatttaaattttattttctggtttatttaaatttagtcaaat

SEQ ID NO: 32039 - DNA, 2300 bp, Homo sapien
atataattagcttaattaatatgtggtcacaattttatgatcagaagagaaaaggaaagaatttatcatgtaaggatttttttatgatgtaaggatttaggatgtaaggaatttttgtaataccacaagatgataaaaacagtgacagatgaagtttgggcatctaatttaatatttcagaatattacaagcctaaatattctctaaattagtggggggaggaatgtctgagtttactttgcaaagaacattatttaaaaggctagtttaacattttagtagtcatcaagataaatataatgttttaaaatgatgttagagtgtatacactttggtataccaaataacaataatgataaataaaagaaaatgaggcctcagatttgccttccttgtggctttgttactaactagccatgagatcttaagccagttattcgatccccagctttcctcttctgtaaagtagatatcatagtgcctattcagcatgcctttctggtagcatacatataagagaataagatgagagagtttcttgagtattttgaagaacttaaaaacagtgcaaataaagtgttttttaaattatcatctcaaaattgtatgccacagacaaccaacttataaaagcagtcataaaataaatgagaaatggattatgataaatggtttagagtgttcattgttatggtagtaatggtggcaaatttgtttatttgttggcctctgtaagaattttttatagcatttttttaatgctgaagttctattagaataattgatgagatttccttaattttttaaattctcttttgaaagttgtgtttggacgttttctatttttgtggtggttgttgtcaagctgcccccactcccacaccttgcgttcagcttcctgtacctccctacttcccctcaggtgcacacacaaatacaacttctcaccccacaaaagttcttggataaaacctaagaagagtatctcatgaacattcttaaatagcatactaaattatatagctagctttatcataatgctacctttaaaaatatttttcataatgtattctttcctaggaattttaagactgagcaggcttttgctatatcaatactagtcaaattgttggtcttttattatgtaaagtgcctgaataatttttgcaggctgaagcagaggacctggatggaggaacattatcacggcaacataattgtggcacaccactgcctgtttcatctgagtatgtctttgttactatcattgtttattttggaaaaaataaactttaaaatgtggagtgctgctcattgaggggtctagatgtttctcagtagcctgacagcactcacagtaccagcatgtgtgtccattgtcttatcaaacgttttactgatttaaaatagggcctattttatggctcttcaactcttccttgctccaggacttacagaagatgaagtcagtctgttgtttgctggtagggggaagcctttgaattgtagtgtatttcttagaaatcacaaagcacatttcatgacccagctttacaaattaaaactaattcaaatgataaaacccaacatcagtaaaatatttttatatcaaaaactactataatcatatttagacatttttatttgttttttgttgttgttgttttctgagatggagtctccctctgctgcccaggctggaatgcaatggcgccatctcagctcactgcaactgcacttcacctcccgggttcaagcgattctcctgactcagcctcccaagtagctgggattacagacatgcaccaccacgtctggctaatttttgtacttttggtagagacagggttttaccatgttggccaagctggtcttgaactcctgacctcaggtgacctgcacaccttggcctctcaaagtgctgggattacaggcgtgagccaccacgcctggctatttagacatttttaattgaaatttaattatggtatttttgtccttttgtatatacccagtggattaaagttaacggtgaattcacctgaagcttgttataactttatacttcttgtctgttttctgaacaggaaagatatgatccgccaaatgatgattaaaatatttcgctgcattgagccagagctgaacaacctaattgcattaggagacaaaattgatagctttaactctctttatatgttagtcaaaatgagtcatcatgtgtggactgcacaaaatgtggaccctgcttctttcctaagtactacattgggaaatgttttggtgactgtcaaaaggaa

SEQ ID NO: 32040 - DNA, 2300 bp, Homo sapien
tggtggctcatgcctgtaataccaggacttcgggaggccgaggtgggcggatcacctgaggtcaggagttcgagaccaccctggccaacatggtgaaactctgtctctactaaaaatacaaaaattagccgggcatggtggtgggtgcctgtaatcccagctactcaggaggctgaggcaggagaattgcttgatcccgggaggtgaaggttgcagtgagccgagatcatgccactgcactccagcctgggtgacagagcaagactccatctcaaaacaaaaacaaaaacaaaaacaaaaacaaaaacaaaaaaacaagcagcaaataatgtaataattatagccacacaaacatgcacctcactgttgcagggattgatcttgtaccccgtgggacccatctgttccattccccaatcaggttatcctgtcacgttgaggcaggaatttaaagaaagttttgtactgcatttactcactctaaggatagtaacaagcaaggctataggaaggtcatggtgacctagtctaagaagccaggaatgagctccaaacacccctgagcaatggttaagaaaaacaaattcctttactgtttctctttccttagaccattaattatgattatttttgcctatgtttagaaagatttgtaggttcctgtttttcttttgacgcagctgcaaggccaccagctaagcaaagccaaaagttatgcaaatttcagcagttatgctatagattacaaaacctgtcactgtgtgatttactgccttggttctgcttttttaatttagcctatataagccaagctctgtctttgttcagggctcagctttttggatgcaaatccacggagccagtgcacaccttaataaaatcctcctgctccacccattggtctttctggtcctctgctttcccgcaacaatgggagtcttcaagcggccagtgcctttttcgttcttaactgcccaatccgtgccagcagaaggcagctttaaaccaaagtgaaagagctgaagcaaaaaagaaagaaaataaaaagtcccagttcttctgggcttacctcctggctggctcaccaaaatatgttaccagattggaagttgggagttccaggttcttggtgttatgaacaaagaattggatgagacacacaaataaccaccccacaagatttattaagcaaagaatataccagagagaggaacgggcttatcttcaagtggtgtcagccctggattaatatagcctttgttcttttatacccacttcctacacttctttaactctagggaggggatttcctataattgtcatatctgttttcttgttttttctctcttagtgcgcctgcgtgagcttgccataattttaagtgtatgtatgataggcattccataggtatgagctggtcagtcttctgacttccttccctattctgctgcctcagaaggcctatttgggagaaaagtaaacaggaaagaatgaaactccctctgactgtctgggaaattttcaggggagaaatggaattctaggattttactatgtgttttccatctgtgagtggactataacggtttatttcaatttaattccactcacaaatgttttgctgagtagaatagtctctgactcaaggaattcacatttgggggcggcagagagagacggatcaacaaatgattgtattttgatggatgaattctatggttctacagagagcctgcgggagatactattgtgggataattaattgcattgggtggttgtcagggaaagttgcagagacaacgtgatatctgcgtttggggattacgtggtgagcaggcgttcaccttgcaggtgaaggctactccgctgcagggaccggtactggggcggcgtttgttccccgcacgcagtaggtgatccacacctcccgccgacaggaggaagaggatgccagctcaggcaccagctgaggtttggcatttgctggccgcgggcgccgacctccagggggcgccgtggcctcgcgctgtccgggccgttgcatttccgggcactggggctccgccatcgtcgccaagcgcgtccccgccgcgagccgctaatcgtccgccgctcccgttaccggggcaaccgcggcgcctcctccgtgtcggccccgatcgtccctccgcgccattttcaaactgctctagcgccggagcccgtgcctggacggaaggagctagtgggggactcgaggcctgagggcaatgcggctggaggcggaggcaacggcggctggagctgccggtgagtccgga

SEQ ID NO: 32041 - DNA, 2300 bp, Homo sapien
tggcttaaaaattattgccatcaagaacctgtttaagtagagctgctttgacattttgtgttgtctccaaataagaggtatcttttgcaagaatctttattgcttcagatttgtgtcaaatgtcagttaaatatgaagagatgtgtaactggatttgaaattccttttttaatggtttctctagctctgtgtttatatttccttacatttgaatcatatataaattccatttgattgaaatgttattaaacctcctgggcaaggcactgtgtaagtgttctgaggatataaagatgaagaagatggtgtttctgtttttgagaagcttgtagtccagtactagagatgagatgagaaattcacaaaacaccattaagaaaattataagaggctcaaaggaatggatgagcactagtctccacggtgatagctggagaagcatttcaaactgtagaatacactaatggaaatagttcatgcaggtagctttttattttgtagattatacagagaatgtggggggttttattaatctcaatagataaagctaaaaaagagcactgggaccaggtgcagtggatcacgcctgttaatcccagcactttgggaggccaaggcaggaggatcgcttgaacccatgaattcaagaccagcctggtcaatatagtgagaccttttctctacaaaaaatttaaaaattagccgagcatggtggcatgcacctgtagtcccagctacttaggaggctgaggtaggcagatcgcttgaacctgggaggcagaggttgcaatgagctgagattgaaccactgcacttcagcctgggacacagagcaagaccctttgagctactgattaggatctcttcactcagttgtcacataatatttttatatagttgtttgaccttaactgggaagtgttttgttcttattatctagggcttttcagataatgtgtttgtattatttagggaattatttgggctgcataagtgacattagtcttttttaattgtcctgtttaatttatatatgcacattttgtttgtattcagagtcattcatgcatttatatgagtgcagttgcatacatactcttctcctaaacctagattagtagaaaatgttggttccagttaacatcaggtacaagccgtatccagcctcatttactccaccccatggaaaatctcttttaaaaacaaacctggggctggaagcactgtggttcacgcctgtaatcccagcactttggtaggccgaggcaggaggattgcttaaagcccaggagttcaagaccagcttcgacaatgtggaaaaactctctctctacaaaaaatttaaaaattacccaagtgtggtggcatgtgcctgtggtcccaggtacttgggaggctgaggtgagaggattgatggagctgtggaggttgaggcagcagtgagctgtgatcgggccacaggattctagcccgggtaacataggaaggccctgtctcaaaaaagaaaaaaaagcagacctggcttcaggctttgtctttccaatatgaaaatggattaattatgtcataatgtacctgaacaattcaggtaatttggacaaaatcttgattctgttggaattaacaagttccagaaggaataggttttttgctgtagttacatatgatcttttttccagggtttcaaagtagtagtagacaatacagggttagggtcagaaaacacattttagtttcttatttcacttactaagtctgtgaattgtggagtaaacctcagttttctaaacctaagaattggcagcagtacctcaaagaattttcctggggatcaaaatgcaatagtgaggtgtttcttgcacagtgtatctgagtttcaaattatttactactcagttttaaatcttgttacaaaccaactctccatgatgttgtactatattttatattgatttggggaccctttggcacagtacgtcctacctgtttgagaagctgaaagtatagaatttatgaaataacacatctagcttcgtttcttattttgtatttcttaacaaaagtgtattggcattaatttaaagtgcttttcaggattcaagaacttcaacaggaagtccaccagctacaagaaaagttagcaatgatggaaagtggggtgagagactatagcaagcaggtaggatttttatttacttgcatagtagggattgagataggtatgctgtgattgtaaatagaattgggttatatttgaaattgctgatactgagtttttatacagctttcctctttttcat

SEQ ID NO: 32042 - DNA, 2300 bp, Homo sapien
tacaatgttaaagagaagtagagagtatagacaattttgccatgttgccaatcttgggaggagatcattcagccttttatcaagtaggatgttagctgtaagtttttcatagatgctctttatcagggtgaggaaactgtcttgtattcccagtttttaaatcatttttattagaaaaggatgttgttttttgttaaatgttttttctgaaactctttaagatttttcttctttttgtctgttaatattgtaaattacactgattgtgaaccgaccttgcattcctgggataagcatcacttggacataatatattatccttttaccatattgcagaattcaaattaccaatttttaacttaatgcttgcatttatgtccataaggaatattgctctctagctttcttaccatgtatttgtttttggtattaggattatgctggtctcataaaatgagtctcattgaaaaaaataagaataaaggcttaacagtattcacatatatatgtcattttatttatctttttgtccactgatggatatatataatattatctgcatattcaactatatatataattatatataactatgtaactacatatataatataaatttatatatataaaactatagttgtatatgcaaaggatccctagaaagacacaaagacacaaagaaattggaaccattcattcctttcctacctttaggtcaaggggattcaggaatgcagaaagattttcccccatcatactactgctgtgatactatggatgagtaggtgaatgggcatgagagctagcctgagaacctaatgaccgtttatcacatggcttccatagaaaaacgtcatcagtagttcagcaacaaacttcacaagccaatatattaaacaagtcaaattatttaaggttacagactacctttgttgatggggctcactacaaaggcattcctgaagtgggtaagattcattaggggctgaggtgtggagggatcagtggaaatctgttcccactgccagagaacaaacaaatagggagtaagttgtttcttcgtagctaaatcaggaagaatctctactatattctgaaatcccaacaaaggagcctagggatgagctgatttagaggaaatgaaaatatgagaatggaaattcaagacagttccatatggaaggccatatggttacagttttgggaacaagcatcatatctaaagtataaataatttttatcatctaatcaggagctttgagtttctagcattagctcagggaatagtactctcaaaaggaaaggctccttggtggtccgtttacctcccatgcccagagaacaggttcatgaacccttgccaggcctatcttttcatgcctgaactttagagtttcctttaagtgtattggttttgttttgagacaggatctggctctgtcacccaggctggagtgcagtggtgctatcttcgctgatggcacctctacctcctaggctcaagcaatcttcccaccgcagcctcccaagtagctgggactacaggtgcacaccaccacacccagctaatttttgtatttttttgtagagacggggttttgccatgttgctcaggctcgtctcgaactcctgagctcaagccattcacctgccttggcgtcccaaagtgctgagattacaggcaccacgactggcccgttaagagtattgttaatctttaaccatttgttctgcagccaagtatcagggagatgagtttgtttcctaagatgtgcttgtgaacagttgcctttgagaagttgaaaataaagaagcagatcagtttactcatatgtaattcaaacaaccagcaggggtatttatctggtgagctactttactgaaaagaattgaatgagttcagtttatgatacttaggttctgtttgtactttcactgagtagcagaacaacaacaacaacaacaacaaccacaacaaaaaaccctcctttttccttcctcctcttcctcctccatcccctgtaatggaataacattcgaatgccgacatcacaaacacagaggacccttcacttcttggcttgccactccctgcctgtcacatgccttctggtttgactggagtaatcctggtagaatccacgtagctctgaagagtgggtattctgaagagcgcaggttctttgaggggatgatacatgttcagttgctctgttgggagtgggaaccatgaatcacagtggtagtggcaatgttaagtggaaggtccagggaaaaaccaagagttctctgtgctgctc

SEQ ID NO: 32043 - DNA, 2300 bp, Homo sapien
aaaatgtgcattcaaaaaaaaaaataatgcattgagccttgatggcatcttaatttttaaaaatatatgcctatgacctacctaattatgatgggagcaaaataggcacttaataaatacttagctggctgagttctagttctagctcaccaaaagtgagcagattaattactaaaagtttaaaacacagagtcttccaggtatgagcggcaccaggtccctcaaatgcgcatttttccatagtaagatgtcagctctgactcaggacaaattattttgagaaatattttctaaccacttgaatgaaggaaactctctgaagacaaattgcactgtgctgttctctgtaacactcctgattcttcagtgggaaacaaataatgctgctagtttgtaagaagagcctgtattggaatgataagctgagtattctctagtgggatcccacagtcccaccactggaaagattcattccacattctggtgctgctgtgatgttttattcatttccttgggtataccatacagaatcttcagcctcgtagaattcactctcccatgttatttatcgtgataaaatactgtggagtactgtaagtatgacgcatcccatgcaaagtccactcccaggcttcacaataggattctctctctctctctttttttttttttctgtaagatggagtctcactctgttgcccaggctagagtgcagtggtgcaatcctggctcgctgcaacgtccccctcctggattcatgtgattctcctgcctcagcctcctgagtagctgggattataggcatacatgaacacgcctagctaatttttgtattttttgtagagacggggttttgccctgctggccaggctggtcttgaactcctgacctcaggtgatccacctgcctcaatctcccaaagtgctgggattacaggcatgagccaccgtgcccagctcacaacaggattctctaggtgagttttctctcctatttattaattggaaggctgccaactactggaagagaggaaggcagagatcctttatgtaactctgaaagccaaagtggacttttctttagattcctgagttactatcagctgccagtcaaccactgccaaatcacacatctggaaaagtagctaatatatcatcaattactcctaacagaagaaataaagccacggcaagaaaagactatcataagaatactgcttcactgtattcactgtaagactgatctactaagacagactcaagagcttcaaaagatacagtctacacctgggccccaactcttagcttatatggcagaaggagaggctgtagtgtgcaaagggtctcatgccacagtgggttttagccttgcttctcccacaaccccatgacagaggatgatcacagagctcaaagcttggattatttgcaactcccttgtcctagtaataccacaactctttgtctcacactcaacaaagcttataaaagtgcaggagagaatgacttacagagggccaactatgaatgtactcgaacttttttcagtatctaaatattaacagcagtacccaagtactgattcttagcactagccataccagtactagcactaataccagtgcctaagtactactaataataacaatgttgggggattcactgtcttagaaaactgctgccatgaaggcaggaagctgcaagctatattctgatgtcattagggtgacaacagatgcctgtttcttcccccatttcccaatttcagagggaagtacagggcctttttctttacattccatacacttaccttctgggctgcctgaagcctacagtttcccgatcaaacatgagattcttccacctggtaaattatcccccctcagaaacaccatgccatgggagtgtgcatgccccatgtagaagctcagtagggcacttggtatgttatgacaaaaagctcctacagtatgagtcaggtgagtgcaggtactgttagattggctttggacatagttctaattccagtaaggagaaaacagccagtgggggatccaacccaggattctgccctgacagttgctctgagaacccctgtgtgaaggagctcaactgcccgccctgtgactgtgcatgcatccctcccgaccctgcagttacagacacagcaagtaacctcacttgtaatcaccttccacctaaggccccacgtgaagatatataatcttttcactaggagatatcaattaaaaaggagggagatgagagggcagagatgagaagctttagttccattcagca

SEQ ID NO: 32044 - DNA, 2300 bp, Homo sapien
ctctgtctcctttgtcacggttaggtggccacagcaaggcaaagaggacgtccagattgttcctatcctttatagggttttagtattgatcatggaaagacttgctggccctggggccttctttgccttggcagcgacccagtgtggcagaatgcaatgttctggtttggggtctcaagctaagggctggtgaggaaggctgcggaagtataaatcttcaaagtgaatatgtcccaaaggggctggagagttgcaccaacctttagggtcttgatttccctcagtggttcctacatttcatgtaactgttttctataattttttttgcacttttaagagactttttatgtaaatgaatttataggttaatgaaaaatttttgtcataacatatatcccaacttttggttcagaaaatgtggccaccatgcccactgggaaatgttgggatctccatgaaagaggtggctggatgaaaaagctcatggcttgaaggtgggaaagaaaaaaaaagaaaagagaagaaagtggaaaacaaattaacttattacaggatggcatcatggtttcctggcatggtgttgagtctagaaatcagttgtgcacaaggtatgcctcagtgctcactagacatgctggagaacctggttgtggtggttgtgaactgcttcactgcttcagaatgtctttcttctgtttctctccagcaacagttgggcaagaatatcaagtttgggcagcggtcacccaatgccattcccatgaataaggcaaacagtggagaggctagcttagaagaggatctgttcctgaccagtcccatggaaattgtgactcagcaggacatcgtcctctcagacgcagagaacaaggtaagtctcctccagggaatgacttgatggctcataaaccagggcaggacattgggcctccagtaaccctggggtctgcagcaggggaattagagggaggagcttttctcatgagtagctcagggcttgagggcacttcctggtaggtgtcctgacctgtagccagtgaagaggacagggaggaagaggagacaagccctttgcaggcggtcttcccagtgtctttcacttacccttcaaggcttatgcctacctcttctgggaagccgtacctggcctcaccccaagctgtactgtcttcttgtgcctttgctgtgtgtctttaccatttttcacacgtctgttctccctatctatgtccatgtaactgttttctctccatctctaaacatgggattccttgagaacaaactgggtctgacacatctttgtctccctaggactgagccactgcctgctttgcagtactgcctaattatttgtccaagtggactaatttaaagggaaatgaaaaaagaaatgcgtaggggctccatgagatagaagacatcaaacaggccaacttgaagagtacctagtctggaaagaaagtcacattccagcaccatcctgtctaaatttgatctcttgacactttgagcatatcctgaaatgagagttcttccaaagcagcagaaaagatgcccttagacctcttagggaaaaaggagcaaagtccaaccagtagcgagtcaggaattctctaggtgaggcactggggtttcactttaaaaaaaaaaatgaaaaaacaaacaaaaaaaaaacccattctctaggctctgcctatcaagacccctggaattttgttgggtgttattaaaatgggcatgtctcagaagaaatcatgcattatcaactgatgtgtcatgagagtagtgagaaagacgagtgatttgcagaggcaagtgaggaagggatgtgaaaaaggacattcctcccctgttgcccattgtgacacctggcacccacgcattgacaccctttgtgtggtaggtcaagcagggatgggcccatctctcccggcagctctaaaattgctcttcccaacctctccagtgctaggcagaagcaacagccatcgccttggtgcaggggtatcctgagatctgaagcaaatgtcctcacagttattgatgagctcataagtgctgggcactgtggcctgggggattgtttgttcagcaggctctgtctcagatatgggtattacagaggtgagcaagattctacaaggggccccccatctctgtagtttacaccctaatgagagggtgtaacaaacaacaaacaagtcaaccagtatataaatagaatcatttcagatcaagaaaaatgctggctgcacagaaaataaaacagggtaatggaaaagtgagtaacttggtggtgg

SEQ ID NO: 32045 - DNA, 2300 bp, Homo sapien
atagaagaatgctatgactgatctggtatatgttttagaatgatcaccttggattatcaggtaaaaatgctgtcttaaacatagtgttctacatttgctccctaagactccctgaaaatgacagtaacaggatttttaaagtcatacacccttaaggattaaagaaaaggaataatggaaatgaaattctggaatcaatagcaaagggctcagttgacttgaaaaacctgaattctaaacccccagtgagcaaaaccaacaagcaattctatttgtatcacagaaccccctaaaaaactaagaaactggcttcaggaagtagaagtgaagagggtacctaaaaggactggaagttcatttaggagagtgttatatcctttatgccacccccggcccccgccttattctgaagcctttttttattgctcaggagtaaaacggggtctctgtaatggaggacatcaggcacctaaaacaaagagaattaagtgaaaattgtactaaattctgagacataccgcagcctccatacccctcctctcccacttgattttcaacaaacgtcccatgggctcaacagcttccaatcaacttttaaatatacccccacttacatatgagcagataaggaccaccagacatcctaggaaagcctctaatgtgaaagatagagcacaaaatcaacagaagaaaaaaaaaggaaacttgagggaaatagatactgcaagggaagaaaaactttaaaaaaggtatcattaatatcagagagttggatgatgatactggaataataaaacatcattttggcagcaattcagagtcaatcagaggcaaacaaaactgaaaacgttttaggaaaaagctgaccaagaagacctgaactaaagtagcagtaatggcgatgaacatgacacttaaaaaacgcaggttctaggcccctcactagaaaactaggggatgaacctccggggatggagtccaggaatttggaatcttctaaaacatcaccaccggcaattctgatgtagccagctgggtgctggtctcaagactgagaactagaggacatagggtctaatcggatgtaagaggttaagaaagtgggaaggttgataactgtctggctgggtggatgatggtgtcatcccaacgtagaaacatagaaacatagacaagatacacttttgcccacttccaacctaaatacataaataaggctgtgttagtttgagtagtccatggtacatcttggaaaagtatagttggcatgtggagatattttttgcttagattagaagcacagtttcttgtcaccaacaactacggctgcgagagcgtcctatgcttttttctcacgtactgttttgatgcagagctgtcttcgcagtccctcccccggctaaaaccccccaaacaaaaaaatcccgattattctgccaccagacagtagctttaaaacacctctgttattgcccttgacgcttattgtaataattgacatgtctccaactgtaacaattcccttggaaacagaaagttctattcaggcatatagtttacaaaactccacctcggacctgctttaatttctttacaggtcctactaaatgctcctgtcaaattccttagttatcgtttcaatctgcttcccaattaaaatgtcagcatcatgatgacaggaacgtcgtttgcaggcgtcactgctgcagccatatctccagcacgtttccagaaaatgtcattggttgaaagcaataactctcctatttcacaatgatttcatctctcttcacatcaaccctaggtgatgtttttattctcaccttatgaacgagaatactgcggctcaaaattcaagagtcttgcccagagttttttggcaagtacgaaagggttatggctccaaactggttagctccgaagtccttgcaaaccctgtccgagaccatgcgcgaccccaaggagcgcctgagcagataaccaaaagtgaaaaagcctatagacctcttcactcaagttagcgcctcggcttcaggagaggcagcgccagctccacgcagccggcccggggtcgctcgcactgacgtcacgtagcgacgcggaagatttacgtatggtgcctcgctctgggatagctttacggcttctgggagctgctgcttcgctgtgagaagtatccgcgacgagctatccgggaaagggccgaatgcgatcaaacctaatccgcgagacttgctaagtgagtcgcggcagggcgcggtgtccggcgggggtctgtgtgaaggaggcgaagtgccgct

SEQ ID NO: 32046 - DNA, 2300 bp, Homo sapien
caggagatcgagaccatcctggctaacacggtgaatccccgtctctactaaaaatacaaaaaatgagccgggcgtggtggcgggcgcctgtcgtcccagctactccggaggctgaggcaggagaacggcgtgaacccaggaggcggagcttgcagtgagctgagatcgcgccactgcactccggcctgggcgacagagcgagattccgtttcaaaaaaaaaaaaaaaaaaagttagcttttgttttgttgtcctgctttgctagaccaaatgaaagaaaacccattaacatcctctgtaaaaaaatgttaaatgtacccttccccagaagaaccaccacctataacaatcaaactgctgtaactgggcgcgctaaccttgtataaaaaatgttgtgattctgctaaaaactcctctgtctgcctatagaaatgaaaccttaactttcctactttgcaatgctgactccattccttggagttggtgtttctgggtgagacatcctcaaacttggtgcttgaataaactctctctaaattagattctgatccttttaattatttaggtcgatagcatgcgtgatataatttggttttcacaacaatcctatgaagtaggtactatgattaccatgcccattttacagataaacacactaaagcaatagaaaggaagttactttcccattgtcacacagacagcaggtggtagccaggattccaatgcagacaatccaactgcagaatttatgcttctaacctctactctttataacccctaaatagggtttcaacaggatgagtatgtagatgtaaattaaaatctccaaatataatagaggcaaaatgcatagttggtaaccattttttatgcctttctgcattttccaaatgttctccaataaatagcacttttgctattagaaaaaaaaattttgtttctgaaaaccctctgctgaccaggcaccctttcccatgtctgtgtctcatttcctgcattagtgttgattaagtggtgatacagagaaaaaagccaaaatctagactgaaggtagggcaagacatagtaaagactaagagcatccataccactgtgcagtataaactctcataaaggttccaactgctttgccatttttaatagttctgaacaagtgctataaatagtagatgtttattgaccaatttttgttccaaagaatatatatcaggatagaaacaaaaagtaaacctcttccatatgtgcctgtagactttagtagctgttaatacattgatttatttggtaaaaaggaacctttttcaaaattatatattgcaattgttgcagtgttttattaacgagaaaaatgacaacattaaatatgttgccaagtaaaactctaaaaaaacttggcatgatcacagctcacagcagcctcaagaaatgattttattaaatgcattaaatactgaaaatagatatgcataatactatataccatatgggactaaataaattgacttatgatttcttttatttagtgaaatgctgtggggtctgtaagttaaccaatgttagaggactaggtgattcatgtcagaggaaatatattattaacattggctatagacctcttggaaaaagcctctgccaaccattttcaaaacaatttttaaaaatcaacaatcatttggtaaaacagtaaattatgtaagaaaagaaatacacaaaaaacggttttctttcccttttgtctcaagggaagtttttccttcaggctgaaatgatatagttaagaatcatttagatccaggcttctttaatcacaaagcctgcttatttggcagtttctcaagttactccctcaggcagcttgaaccagttaaactacatcctttcagctcttcggagcttattgacaaccagccatgtggtttcctaggaaacaaaaccttggctggaaatagtgaatcatttccaggtcactttcaacatggagagtggagcaggaaagcactggactgaggaggaggttaaagctttgctaagtgtctgggcagaaaaaaatatacgaaaacaactttatggaacactaagaaataaaggaatatttatttacattgctaaaaggctgcaatcattaggagtatacagagactggaaacagtgctgggctaagtacaaaaatctcaaatatgaatatagaacagttaaatatgcccataactctggagacagctctaaaactatgaagttcttccatgatttggatgtaatcctgcagtatgaacctgccacacaatttacagaggaagatgc

SEQ ID NO: 32047 - DNA, 2300 bp, Homo sapien
gacagagtatccaaaataacaactgtttttttttttttgagacggagtctcgctctgtcgcccaggctggagtgcagtggcgtgatctctgctctctggaacctaagcctcccgggttcaagcgattctcctgcctcagcctccggagtagctaggactacaggagcgcatcaccacacccagctaattgtatttttagcagagatggggtttcaccatgttggccaggatggtctcgatctcttaacctcgtgatccgcccgcctcggcctcccaaagtgctgggattacaggcgtgagccaccgcgcctggccatagtttctaagaatgttacaaactaatgttgctcacaactaccacataatcaagagtttactttctccttggattacgtaactaattttctcaataaactttttttaaaaaaaacaagaaatctattatggtcaacccacaattatccaagattggagctacgcaagttaaaaatattctttttgatgcttcccacattctcagctctttagtaaacaaggaacacacaaaatgtgaaactgaaattgaagtacctgggacaatgaaaacagcaaaaaatacttctaatttaagtttggtggaggaaaagctaatcttttggaatgcgtttatacgtgttgcacccattttgctgttacgtgttattgccaagttccttaactgtagtgtaagttgttaccactgtattgccttatggaaactgtaatactttcagtaagaatatcaaacccaggtttgtttttcttatcctagtgtaataatttatatcaacttccagttaagtcaggtagtaagaaaaggaaagatcaccgaagcaaagtaattttttttaactcgaaaggatctcccaatttttcaaaatcaagtgtatggatcttggcatagagacactactcccctgtcccccttttgaagaagggagttaatttttgtcatgttattaccaacgttttcattcattaggcaagacgtctaccaatgaatcttttccagatgcactgttccctatggttggcttatttccatttaatttatgtgagatctactaccagtagtcattctcaacatcaactagtcatctttccctgggtctgaagtctagcatcctcaagttcccatagcgataactactttcaaacccataatctgctcaatagctctgcccttgcaaacaaaagcttgtggtggttggaggccccgcgcgaaaacctttaggtgttgaaggacctggactggccgccacgccacactagcctattacaggagcagccacaggctccgggagactagaacccgcctgcagtcggggaggagccctgacccagctagaccaagcaaaccggcggtttacaagctggccagcctctggatgggtgcacacaccggggggcggggagggagagagcccctaaaaggcataagtggctgggagggtgggcaggacaggctaaagttcatggaagcgaggtgcccctcgtgcacgcctaggcaacccggtcgacgccacaggcaggtactggcttaggtcggagaggtcggtcctcccgggccctcgggcgctcatgagaacgccgactgcgggaagcggctccgagagatggagacgcacgcccccgccacccccaccctgttgctcaccggtgctgcagccccacgagtcccagagtgatcacatgcggtacatccagctgcgtgggccactctcctgaggcgatgcacccgaacacgccacattcctctcggatccccaactcctccagctccatgtcgccgccgaaagcacgtggaaggacctgccgctgcggccaaggtgtaagcaccaaccagctgccagctcggcccgtcgagctcagaagctcgcgctcgcgacaggctcttccttcccgagggtggccccagctactgcggcggcgcgcgctgtccctaggtggcgtggccagctcagccctgctcctccccctccgagtccaccaacgagcgagggcggaggggcggtcccgcggctgaggggcggggtcacggatgctgtagggtggagctagccttcccctaagagctgcctggaaagctgtatttgctgcacgtggaaatctccgttattttccagcacccaacagtagcgtaatgggagtaacggacttaacctcatttctctttcagagcatttagccttcatatgcccttccctgcatgcttcccccaggccgtcaagacttggtacgctccaacttctgagtcgctcccgcagccgagaaggggccgg

SEQ ID NO: 32048 - DNA, 2300 bp, Homo sapien
gcgcgatcccggctcactgcagcctctgactccccggttcaagtgattctcctgcctcaggttcccgagtagctaggattacaggcatacgccaccacgtccagcaaatttttgcatttttagtagagccggggtttcaccatgttggtcaggatgatctcgatctcctgacctcgtgatccgcccgcctgggactcccaaagtgctggggattacaggcgtgagccacagcgcccggcctgagtctacagctttttaaaatctgaattcagttactttctatgtggaaaagaatgtacccagcagccacaaaagcaatttgcctcactatacatatagcaactgggtgtgtggaaaaaaccagcatttgtttttttccagcataaatagcaagaacaatctttcctgatagtgcaacttttttgcctaaaggttttggagttcttcaaagccatcgtggcatcaaagactactggaacgaacacacacacacacacacacacacacacacacacacacacaccatcatggcatcaaagactacctaaaaacagcccccctccccagccatcatggaatcagactacttcaacacgcgcgcgcacacacatacacacccatgacatcaaagactacttaaacacgcacacgcacgtacacacaccccaagctatcgtggcatcaaagactacttcacgcgcgcgtgcacacacacacacacaccatggcatcaaagactacttacacacacgccccctagacaggtttttctttttcttttttgagacggagtctcgctttgtcgcccaggctggagtgcaatggcgcgatctcggctcactgcaacctccgcctccgggttcaagcgattctcctacctcagcctcctgagtagctggggattacaggcgcgcgccaccacgtccagctaattttttgtatttttagtaagagacggggtttcgccatgttggccaggctggtctcgtactactgacctcaggtgatccgcccgccttggcctcccaaagtgctgggattacaggcgtgagccaccaggcccggcctctagacaggtctttcaaaagtttcaattattaaccttcttagaaaggtcattaacctaacgggcaaagcaagactcaggttttgacgaatcaagactgatttgcttgtattttgcaatagctattgattataaataatacttccaggcacctttccaccccttggccatttctcgttctcctctactttgctccttctccccatccccgaggcagtaaagttcggggaggcccgggagcgcctgggccacgtgtgcgcccgcgcggctgcctagaggcgctgctgcagggaggcgggacagagtttcgcggctcgcacgtggccgcgagctcacggcctgggggtcagggagaccgtgaagggcccggatccctgttactcaccctcagctgtcgccattatcctaagtgggctgagggctgcgaccgcgccgggaagcgaggcagaactctagaaaagaggggtggtcagagagcttcgctgggcggggaaggaggcggggccgcgcgaccctgcgccactcttttcgagctccgctacagccgcctaacccggaggggtatgggcggagactgaaacgcggatatcggacgaaacaacgccccactggcttcccgccgcgcaggcgcagagacgcgaccccgcctccgggccgccccgcgctggcgcagtgcccggacaggcgaaaagtggcgcgcactggcggcccctccccactctgcggaagctcgcataccccggccccttctcggctgcgggagcgactcagaagttggagcgtaccaagtcttgacggcctgggggaagcatgcagggaagggcatatgaaggctaaatgctctgaaagagaaatgaggttaagtccgttactcccattacgctactgttgggtgctggaaaataacggagatttccacgtgcagcaaatacagctttccaggcagctcttaggggaaggctagctccaccctacagcatccgtgaccccgcccctcagccgcgggaccgcccctccgccctcgctcgttggtggactcggagggggaggagcagggctgagctggccacgccacctagggacagcgcgcgccgccgcagtagctggggccaccctcgggaaggaagagcctgtcgcgagcgcgagcttctgagctcgacgggccgagctggcagctggttggtgcttacaccttggccgcagcggcaggtccttccacgtgctttcggcggcg

SEQ ID NO: 32049 - DNA, 2300 bp, Homo sapien
accctccagcacctagagttcaagccacctttcatgctctttgcattgtatatactggaaggaccagacaaaaatatggcagggcaccatatgccatatcaggagctgggcagtttctgccctcaaggaactcaagattaggcaaggaatgtgaaacaaaaaatgccaactatgtgccaggcagtatgctagatcctagggatactgcagtgagcaaggtaaatatggttccttggcctcagaactatagtccatacagagtgagataacccttaattatcagtgctcagaagtggagtcctatagggagtctcccaacctttttggcaccagggaccggtttcagggaagacaatctttccacaggagttggacagctggtttcagtatgattcaagctcattacatttcccattagattctcttaaggagtgagcaacctagatccttcacattcccagttcacaatagggtttgagctgtgagaagctaatatcacagctgatctgacaggagctcaggcggtactgctcactggcccaccgatcacctactgctgtgccgcccggttcctaacaggctgcagaccagtacaagggttggggacccctgttctaagaggatgcaaccagaaggctgcccagtctgcaagatcaaatgtttcctcaaagtaactttcaacgtataaccagaaagactgaaagacaaaaagtagttagcaaggccgggcacggtggcttacgcctgtaatccctgtactttgggaggctgagagagggcggatcacttgaggtcaggagtttgagaccagcttggccaacacagtgaaaccccatctctactaaaaattcaaaaattaaccgggcgtggtggctcatgctacttgggaggctgaggcaaaagaatcgctttaacccaggaggtggagattgcagtgaggttcatcctgggtcacagagctagactacgtctcaaaaaaaaaaaaaaaaaaaaaaaaaaaaagctaggttcctgagggacacaggaagtagtagaagttgtaaaggtcatgacgagatatgagtctgaagagcaggccattcaatgaaatacaacattcacatcaagtgaatcactcacatcgtcttggtgtggtggctcatgcctgtaatcccagcacttggggaggctgtggtgggaggattgcttgagcccaggagttccagaccagcttgggcaacacggcaagatccccgtctcaaaaaaaaaaaaaaatcactcacatcaagtgtacccaacagatatccattcccttcgtacatctgaacacatcttgatattaacggtcgcaagcaaaccctaatattttatatctctagaacaaatatagtatccccatttcacaatcgggaaaacagactcccagaagctaagtaacttgtttattgtcagacatctagtgagtcgcagagccagggaactgaccacgggcattttcaccccattacccttccagcttattgccgactgctcccgaagggagcgaaaaggacaggcaaagggtttcaccaaaccctttgtaatgggagattcttgccttcttacctttcctcacgtttgcttctctgccagaatgtcttcccgcactttccccagaacccaagttctcctaatcatctttcaagatccctttccctcaaccacagatgagccgtgcctatttctccttcaaatgactccctatggcttctagttggtagtcttttatttaccacctcatagtccttttatttatatcccataaatgatcgtccggccccgcaccgtgggaccaggacgctgcctcgaccatggcggtctcctggaaacaggctgctttgagccgaaactggtgaccgtttcccaaccccgtccaggagtccgacgcctcttttctccaggccaacttcaagtgaggtgtatcaactctatccgcacaaatttcttgccacgagagcagaagattatgatctctgatgctgccttagggctgaagacactcccaactcggcgacgcttagcaatcatcgacttcctcctcctcttggctgcctcggagatcctgttccggggcagaggtctccccgccccgcccctcgtctcctccaagatggcgagcggcggcagcgggggggtgtcagtacctgcgctgtggagtgaagtgaaccggtatggccagaacggcgacttcacgcgcgctctcaagaccgtcaataagagtaagtgtcggggtgggcactggggcgggcccaggccggctggaggatgcggcctgtttccgg

SEQ ID NO: 32050 - DNA, 2300 bp, Homo sapien
aagttctggccagggcaatcaggcaagagaaagaaataaaggatattcaaacaaaaaggaagtcaggttgtctctgtttgcagatgacatgattgtatatttagaaaaccccatcgtctcagcccaaaatctccttaagctgataagcaacttcagcaaagtctcaggacacaaaatcaatgtgcaaaaatcacaagctttcctgtacaccaatagtagacaagcagagagccaaatcatgagtgaactcccgttcacaattgctacaaaagaataaaatacctaggcatacaactaacaagggatgtgaaggacctcttcaaggagaactacaaaccactgctcaaggaaatgagagaggacacaaatggaagaacattccatgctcatggataggaagaatcaatatcgtgaaaatggccatactgcctaaagtaatttatagattcaatgctatctccatcaagctgccattgactttcttcacagaattagaaaaaaactactttaaatttcatatggaaccaaaaaagaacccatatagccaagacagtcctaagcagagaacaaagctggacgcatcatgctacctgacttcaaactattgttacaaggctacagtaaccaaaacagaatggtacgggtaccaaaacagatctgtagaccaatggaacagaatagaggcctcagaaataacaccacacatctacaaccatctgatctttgacaaacctgacaaaagcaatggggaaaggattctagccatatgcagaaaacaaactggaccccttccttacaccttatacaaaaattaactcaagatggattaaagacttaaacataagacctaaaaccataaaaaccctagaagaaaacctaggcaataccattcaggacataggcatgggcaagaacttcatgactaaaaccccaaaagcaatggcaacaaaagccaaaactgacaaatgggatctaattaaactaaagagcttctgcacagcaaaagaagctatcatcagagtaaacagccaacttacagaatgggagaaaatttttgcagtccatctgacaaagggctaatatccagaatcaacaaagaacttcaacaaatttacaagaaaaaaccccatcaaaaagtgggcaaaggatatgaacagacacttctcaaaactgccatttatgtggccaagaaacatgaaaaaaagctcatcatcactggtgattagagaaatgcaaatcaaaacaacaatgaaataccatctcataccagttagaatggcgatcattaaaaagtcaggaaacaacagatgctggagaggatgtggagaaataggaacactttaacattgttggtgggagtgtaaattagtttagccattgtggaagacagtgtggcaattcctcaaggacctagaaccagaaataccatttaacccagcagtcgcattactggatatatacccaaaggattataaatcattctgctataaagacacatgcacacttatgtttattgcagcagtattcacattagcaaagattggaaccaacccaaatgcccatcaatgatagagtggataaagaagatgtggcacatagacaccatcaatactatgcagccataaaaaacgatgagttcatatcctttgcagggacatggatgaagctttaaaaccatcagtctcagcaaactaacacaggaacagaaaaccaaacaccgcgtgttctcactcataagtgggagttgaacaatgagaacacatggacacagggaggggaatatcacacaccaggcctgtcggggggcggtgggaggctaggggagggatagcattgggagaaatacctaatgtagatgacgggttgatgggtgcagcaaaccaccatggcacatgtatacctatgtaacaaacctgcacgttctgcgcatgtatcccagaacttaaagtataataatttaaaaaaaaagaccatttcgcctgctagattatacaaactaaactttctcaaataaattcatttccattttaatgttatttattcccaggcttagagacatcgtttaaacaaactatcttgaaaatattatgacacatctctcatttctttataatcgttatgcaggaaaattgcctaagaattatgacccaaaagttaccccagatccagaaagatggctgccaatgcgagaacgttcttactaccggggaagaaagaagggtaaaaagaaggatcagattggaaaagggacccagggagcaactgcaggagcttcatctgaactgtaagttattgctcca

SEQ ID NO: 32051 - DNA, 2300 bp, Homo sapien
ttcttcaaagagttttttatgaaagactttcctcctttacaagaaagaaatggggtgctgcctttctgtttagtaaaagcagaatttgcagtggcatctaaagagatcttttttaaataaaaattatgtattgtggcataatcctttttttgagctctacagagaacagtcttttggtaatagtggcaggtatttattccttctgaatatataccccattataggaataactgttacttatttaggattccatcattgaaaattttgacccaaggcacagcagtgaaatttatagttctcaatttagttgtcattattgacaggcattggtattattagtcattgctaagcaactaaaacttcatcagttcaaataagttttaattgtcaaatgaagtataaacacatgaactttctagaaatatttcctcttttggataggtctttaaccagttcatatatatactttgtcaaatatatggatgtgtatgtgtacatttataagaaccagtatggatacatccattcactgtggtacattttaaaataaaatattttagcagtgaatatggattaaggtgttttgggtgttggcattttatggaggacttcctggttagtataaccaagaattttcttttaagctgagtatcaaaattgtgtgtactgtccctcttagcaaacccataaaactaatctaatgggattgagagaaccccgtgtaaacttactgaaaattcatcttggtgtgtgtataaacagaagtaaacctttgaaaaagtcattaagcatagcaattccaatgctattgggaacagccaaccttaaatatcattgcatcactcaagccttctggaacctgctattcattgttccttacaagtctatttgaaacagatacaatgaaggaaaataagtttattacattgaaaaataattgtggccgggcacggtggctcgcacctgtaatcccagcactttgggaggccgaggcgggcagatcacctcaggtcagaagttcgagaccagcctgaccaacgtggagaaaccccatctctactaaaaatacaaaattagccaggcatggtggctcatgcctgtaatcccagctacgtgcgaggctgaggcaagagaatcgcttgaacctgggaggtagaggttgcagtgagctgagatcggaccactgcactccagcctgggcaacaagagtgaaactccgtctcaaaaaataattgtgctggacgggtgcggtggctcatgcctgtaatcccagcactttgggaggcccaatcaggcggattacctgaagtcaggagttcgagaccagcctggccaacatggtgaaactccgtctctactaaaaatacaaaaattagctgggcatggtggcacatgcctgtaatcccagctactcgggaggctgaggcaggagaattgcttgaacccgggaggtggaagttgtagtgagccgagattgtgtcactgcactccagcctggccgacagagcgagactgtctcaaaaaatatataattgtgctaaactgaaatatactaaagagttcagtttagcaagataaaaggaaccctccagatatttcttagccagtttgagaaacaataccacctttgaaaagcccttcgtgtgccttatttaccatttattagataattagaagtgactagactatttggttttggttttaatactgagcattactagcagctgtgatcctggcaggctatctccgaataattttttttaaagtgaaatacaggccgggcacggcggcttatgcctataatcccagcactttgggaggcagaggcggggaggatcacttgaggtcaggagtttgaaaccagtctggccaacatggtgaaaccccgtcgctactaaaaatacaaaaattagccgggcgtggtggcccacgcctgtaatcccagctacttgggagtctgaggcaggagaatcgcttgaatccgggaggcggaggttgctgtgagctgagatcgcaccactgcactccagcctgggtgacagagactccgtctcaaaaacaaaacaggaacttaaaacaatggaacccattcacgttcttctatttgtctttaataatcctgggtaatagtcaactaataatcctgggtagtagtctggagacactcctagcggagtttactcgggagagggcggagaaatacatgacatgagcagtacaggctcatggttgggagctgagggaaggctgagaatcctcccggaacctctggattctgacgccccaggggttcttcacac

SEQ ID NO: 32052 - DNA, 2300 bp, Homo sapien
cagcaaacatttgtcaagcaaagggctgagagctttgcagagaaataacagatacatttgactatagagatcttccaccttcgtttctagaaatcaggtttgcttggtgtaccttggagaagtaggcgctttcaaatggtcctcccacaagtctcagcagccaaccaaagccaatgattctcagccaactaacccaaggagttctttaaagttaaccaggacctctccacaaaatctcatacaaagtcctgtaacaagaagccacagaaatctcataaaataaaatgcagtaaattaaatgtaagaccagtagcagcccttgagtgttataacaggaattaaataaccaaaaaagaggggaaagtataagcagaacagtcagtttagaaattaatatttctgaaggactgaggattctacaaagaaaaagacaaaattttcatggaagagccggcacaactatgttacacaaaattagctggaaccttcctaaggcaagaagtaaaatcagaggcagctgtctcccagcccttgttttctttcaagcgaagcaagcagtggtgggtggttcccgtgggcaactttggctagaattggtgtcctactaggacagtctatgcccattcaaaatggcaatgagctcctgcctgcattatgactactgccctcctgatttttcctaccagactaatgacagactgccccactgagaagggtctagcggagcacaggtcaccagctgggcaacattcagaaagttagtcttcctatgctcattttcctgggctgttacagaagaagactggaagaggtaatttccaaggttcttcccagctctgaagttgtgtgtcaaaggtacgggcaatgggtgcacacagaagaagaagtgtttctgacctggtatgaccctctcctgcctagcaccgtgacaggaatcagtgctatgatttttaggtgggaaagcacagaatcccctaaaaacatgggatttcatggtggcttggcaagtgacttgagccagactctcacagtagaatgacttcccgttgtgcctgaaagccccttcagagtgacccaaaggagaggtaaagacacttatttaggaagtagaagatgcaggtcacagtggagaaggttataacagcattgggtacattctgccgggacatcagtgaagtgtggctcatcccaggcacaaaccacatcacaacctactcaggattgtgctggatgattttgcaattgtttgttaaaacaacaaaccaacgtgattcccacacttgcccttgtcttttactgtcagcgacagtcaagtcctgacaggtgtgccaaacccacagccaaggatatcttgaagactccaactttctataccttcatgcatcttaaattagcaggaggaggtggatggggttacatctgccaatttttaaaatttttaagtttttggtcccaattcagagacttcgtaggtatggagagaacccagcaggaagtcatgttgcttcaaatttgctagagtaatggttggctctaaagtaaggagatacaagagatcttgaagcttgtgatgggcccattttcctgactttatagtaaattttaatacaatcacagggaagtctgaaattttaaaagacagctgactggatcctcctcagttggattgtggctccatcttgcaagtcctcccctcggggagcacacagtgaggcaggctctttgccgtaaattgtggaatagtggcctggtgactgcaggccggggactcactaaagcatacttagaaagagtgggggcgaagggttgaaggaggaggttgcagagcggcagagtggcacatgcaagcccacaggtggaagtttctcccgtgtctcaatcccctgccttaaatcacttctctgcggacctatctccatctctgtaaaatggaaagacattaaaagcaccgcctccgtctccccaactttgagaagtaacttgtcttgcggggaacttttttggaggaagggtggggtgtgcagccctgcctggagagggccccaaagcgccaacccactgcggagacagaaggccgcctaccggggaggccggaggccggctagtcgcggactcgggcgaacccaccctcgcgatctgtcaagtctgtccccaggggaggtccccctttcgggaggaagtttttaaggggatttctcaaaatcacccccgcgcttccttcactccttccttagagccggaggtcggtgagggcccgcggaatcatctatctcgcccccgtcgcaggcagggatacagtt

SEQ ID NO: 32053 - DNA, 2300 bp, Homo sapien
atatgatgaatggagctactgtagccatcttaccaccatgaggagagacaatgctgtcacactgagagctacaaaatgaaagatggaaaaagctagaggtcttggtttcatcactgcacccccaatcaaccggaaccatatacctgctacctgcagagtcaagtgatgtaaaaactgcttcatggtttcaatcactttttctttaatctccatgatacaccggataaagagaaacagcttgaagttgacacattatgcaagagaaaaagaaatgtctcatctgaaccaggatgagactctgttgatgccaggacctctatctgttgggctgtactgcctccacgggaatttagaaactgaacagatggcacatatttattgagcacctaccaagtgccaggcactgttctggatcacaggagtaaacaatgcagaaaggtcattgttgtcatggaaatcacattctggaagacagatgataaacaaaaacacaattaaggataggtgaaaacactcttaggcaactttctaagtattggttcaagccagtcctgagtgaaaccctgactctggaatcagatagaactggattcaaattccacccccaccattcactgtgaccttgggaaagttatttagtctttctgagtatcagtttcctcttctgtaaaataacgataataaaaaaaactaactcagccgggcatggtggctcacggctgtaatcccagcactttgggaggctgaggcaggaggatcccttgagcccaggagtttgagaccagcctgggcaacatggtgtaatactgtctttacaaaaaattagccacttctggtggtgtgtgcctgtggtcccagctacttgggaggctgaggtgggagaatcacctcagcccgggaggtcaaggctgcagtgagccaagatcgtgtcactgcactccagcctgagtgaaaaacaaaaaacaatacaacctcatagggttattgtattacatattaaataagcagacaaactctctgtacagtccttacatggagcctgacacacagtcagtcttactagattatggatcatcaccattgtcatcatcataataatttgtgctgtcatagtaataatttgtgcaacaacaataataataataatgctgtgggtatcaaatgataaacaagacatagaccctgcccattcaaaaaatcgtggcagcaagaatccagatttggccatagaatggtcagaagttaggcattgaattaggcaggaaacaaaagaattcctctggtaaccaaggttgggttaacctgggccccctgtctctactctttcccacacatgttttataaccgtcacccccttttccaagagggaaagaggtattctgaatgagcgctgctcttctttcacatatggctactgttcccaagagactcaagtgggctttctctttctctgctgaagtgaataatatagggtgtggctctctggatggcacttaccggtttgtgctacaaaccagcaaatacacacagataatcccacagatgatctcaccagaccttgtctcccttccctcattccctcaaaatcatacccacctaataatgtttagtgcactgcaattgagtattagctcccgtatctagctaataaaatacgtaaacatccaacagccgggtcctcacacccacacacataccctcgcctttagaaacatttccacggattgtcacacgagcccctaaactctctgtcacactctgcatgcatcttcccacagacttgctcacacactggctttttattcgcaagcccatggggaatctttcacctcttagacaggaatttcattaacgaaggggaggggatggtaagaggaaagtacagatgcaggggaaataaatgagaatcgtttttgagggagacctaaaactgtatcatcctagcccgaatctctcccttttaactgttctttatgtgtacattctgtgcccaaaagaaaacaacctttcattaattgggcaattgtccaggctcttagcttggcatccagctctcagagctgtgaaatcaaccgcaccagatctacgctttgaaatgaggcaacatctaactggaaactcgctcaaagtaaggaagtggatgagaagactcagggtcccttttctcttccccgtcttctctcagccacatctctcttatcctatcttggtgaagaagcttgcttggctaggagagaggtcagggacgagaagatagtgacgagaaagttccatgagactctcagaagtcccagcctgaa

SEQ ID NO: 32054 - DNA, 2300 bp, Homo sapien
caggtgtgagccactgcacctggctccagtcttcagcttttccacacactcttagagccacctgcatatccaagcaacacccccttcccatgggtctgagtcccagctttccaggacctctcctccaaatttctagttctgagaatcccaacctaatccgtttgttcccctagatcgaggcatgatgcctacttcctaaaggctttatctctgtgttacctcgttttccctttctgcttttttcagttatccctactggattagccaattccttatactaaattatctctggtgaaatacctagtaaaccttgtgttttccagactggacccttactgataaggcaacatgtcacagaatcatttgacacacaggcataagaagcagaaaaaaaaaaaagtggatctgctaatgcacttttttttttttttgacagagtcttactctgtcgcccaggctggagtgcagtggcaccatctcggctcactgcaacctctgcctcttgggtttaagcaattctcatgcctcagcctcccaggtagctgggactacaggtgcgcaccaccatgcacagctaatttttgtatttttagtagagatggggtcttgccatgttggccaggctggtctcaaactcctggcctcaagtgatctacttgcctcagcctcgcaaagtgctgggattacgggcatgaaccaccgtgcctggccaaatttttttgacatggtctcattttgccactgaggctggagcgcagtagctcaatctcagctcaatggccacacctggctaatttttgtactttttttagagacggggttttgccctgttgcccaggctcctctcaaactcttgagctcaagtgatccaccaggctcagcctcccaaagtgctgggattagaggcgtgagccaccacgcctggccttaatgcactaacttgctcagcctctttggcaaaaattatttctcacagaagtaatgagtagaacagtagttactagaggctgggaaggatagggggatagggagaggttggttaaagtatacaaaattacagctaggtagaaaggataagtgctagtgtttcatagcattgtagggtgccgacaattaacaataatatattataaaggtcgagcacggtggctcaagcctgtaatcccagcactttgggaggccaaggtgggcggattgcttgagcccaggagtttgagagtagcctgggcaacatggtgagaacccctctctacaaaaaatgcaaaaattagcttggcatggtggcatatatctgtggtcccagctacttgggagggaggctgaggtgggaggatcactggaacctgggaggtggaggttgcagtgagctgagatcgtgccactgcactccagcctgggtaaaagagcgagaccctgtctgaaatttaaataataataataatttattatgtattttcaagtagctagatgagaggattttgaatgttctcaacacaaagtaatgataaatgtttgaggtgatgaatatgctaattatcctattttgatcactacacattgtatgtatccaaatatcactatgtacccccataaatatgtacaatcattatgtgtcaactcaaatagttaaaaaatatattaaaagagggaaaggcagaacgcttcctgagagcaaggacctcctttgtcgaggtcagggctgtgtcttcagcaacgaaacactatctgggacttagtacatgcttaagaaataggtgttgattgacagagctcccaagagctccacaagggtccccctaggactgtcacaggttcttgtatgtcggagggagaggtcttccccttcgtctccttggggggaggggaaggtgttggggaacaactgccccttcctctatctccctcgcccctccttccccatggccccctcccccgtccttctacctttctccttcccagccctttccggttctcccccgacccttcacggctcctcttcccgccgctcctcttcccgccgcccctcttccctcgccacctaccgctgcttttcctcccattctcgccccgccccttcccccgccctccccgcgccccgtcgcacgagcgctccctgcgagtggcgcaggtaacagaccgcaggggcaagacagccggcgcgggaggaggatggcgctgtcggtgctgcgcttggcgctgctgctcctggcagttaccttcgcaggtagcgctcggagcggtcctggcgagcggggacctccggagaaaagcgggtttgggagtcagaccggcggcggacc

SEQ ID NO: 32055 - DNA, 2300 bp, Homo sapien
ttcagagtttttatcttgcagaagatcctaaagtttggatacagcaaagtaaaatacagacttttgaaaaacagttaggaattcaagttcatagcaacagcttccctcaagaaaattttcaattgatttgtaatttggcctatgaatttgacctgtggccttcatgtcatgataatttgggtcactctgaatatgccatcccttgaacaagggcctctgctaattttaaatgaatgcagctgcccattcgccattcttctatttgcatcacaatatgtgggaataaatttgcaattaataagacatttccagtaagcagtcagattgaggaaatgaaggacatttagtaagtttaacaagagacatttcatttttgcctttttggacctaaaaaagggaaagaaaacaagtttatgtctttgacaaccttggtagaggcctgaattgtaccctgggctacagcatctaaaaaagccatgtgacctcaaacttgattttagttaaacaaataaaatatatatagaaaagtttgtaccagtcctaaaaatgtcgatcttcctttcctccctccctccctcccttccttcctgtctctttggttcaatgaaaatgaatacttttcaggtttgattcatggagaggtgttacatttgaaattgcctcattgaaacttttggtggtcgagcaccttagggtcttcatttcatcttgcatcggagactgcattaattagtaatatattgtccagatagagggaaacagaggtcctacgtgggtataccaggaaatgaagagtctggaagccctgccctaagagaaacaaataaaggaacttcaaagagaaggaagtgaggtaccctgaggagaagctgggatgtcttaacaactgctttgggattttgagcttgcccttttcactgtgtagagtgttccttgccctactttccacctgttgaagttttcctcattctccaaggtcagactgaatacatctactgtgaaaagtttctagaacctcttgggatccatcttcctactggcaaacccccatagcacttgctacttatgttgtaataccaagcaatagtcagacttatctaggtcaagttaagtaggggcttgaacgccacactaaggggtttaagctttaagcttgtagtcatggggagccactatgcttctgaggacaggtgtgacttacgactgacgtttaggaaggtatcaaaggcagactgagaagctctttcaggtgtgaaagggggtggaattactctctctctgttcttttttgttgtttttgtttttgttagcacatgactatgggctaggcattccgcttggttatcccgcttcatagacgtgagcccggttactccgacacaccgtggccccaggcagcctccccgtcctcaccaccttttcttctgtcatctgagggtaattcctcccctgcagtcgtgctttccgggctcagcaatgacctgctacctgccacgtctagggatctgtcccctcagtcctcacgctcacgctttctgagtccataacctccttcctgaaacgttttcttctcacttctcccaaactgactgcattccccctccggtagtttgaaatttggaagactttttttttttttttttttttttaccgcagacgcttaaaacgaagcttaattagtcaaggacagctatgggtggagacttgaagagatctgaagggtatcttggagcgctttagacttgagaggccggtgacaatagctctaaagagacccgtcaaagcctgcggattcttcttttaacagctctattctcatgcatgcacgccagggctggggggaacttttgttgtttgtttgtaatagaaatcgagaaagggagtggggcccgcctcttttctgacctaagggcaggagtgaggggccgggaggattacgggcggctccccctagacgcgcccccaggcgagctggagactggggcactccttgcttggtagaggggcggggcgcgcctagcggccacgcgcgcgggcgtcggagggggcgtgtctcgcgggcgcgcgcgggcgtcggagggggcgtgtcccgcgggcggtggcggcggcggcggcgcggactgggtgcgcggcgcagcgtcctgtgttggaatgtgcggctgccgcgagctcgcggcgcagcagcggagcgagcgccgccgaggcccggggccccagaccctggcggcggctgccgcagccgagacggcagggcgaggcccggaggcctgagcaccctctgcagccccactcctgggcct

SEQ ID NO: 32056 - DNA, 2300 bp, Homo sapien
gtcagacttatctaggtcaagttaagtaggggcttgaacgccacactaaggggtttaagctttaagcttgtagtcatggggagccactatgcttctgaggacaggtgtgacttacgactgacgtttaggaaggtatcaaaggcagactgagaagctctttcaggtgtgaaagggggtggaattactctctctctgttcttttttgttgtttttgtttttgttagcacatgactatgggctaggcattccgcttggttatcccgcttcatagacgtgagcccggttactccgacacaccgtggccccaggcagcctccccgtcctcaccaccttttcttctgtcatctgagggtaattcctcccctgcagtcgtgctttccgggctcagcaatgacctgctacctgccacgtctagggatctgtcccctcagtcctcacgctcacgctttctgagtccataacctccttcctgaaacgttttcttctcacttctcccaaactgactgcattccccctccggtagtttgaaatttggaagactttttttttttttttttttttttaccgcagacgcttaaaacgaagcttaattagtcaaggacagctatgggtggagacttgaagagatctgaagggtatcttggagcgctttagacttgagaggccggtgacaatagctctaaagagacccgtcaaagcctgcggattcttcttttaacagctctattctcatgcatgcacgccagggctggggggaacttttgttgtttgtttgtaatagaaatcgagaaagggagtggggcccgcctcttttctgacctaagggcaggagtgaggggccgggaggattacgggcggctccccctagacgcgcccccaggcgagctggagactggggcactccttgcttggtagaggggcggggcgcgcctagcggccacgcgcgcgggcgtcggagggggcgtgtctcgcgggcgcgcgcgggcgtcggagggggcgtgtcccgcgggcggtggcggcggcggcggcgcggactgggtgcgcggcgcagcgtcctgtgttggaatgtgcggctgccgcgagctcgcggcgcagcagcggagcgagcgccgccgaggcccggggccccagaccctggcggcggctgccgcagccgagacggcagggcgaggcccggaggcctgagcaccctctgcagccccactcctgggccttcttggtccacgacggccccagcacccaactttaccaccctcccccacctctcccccgaaactccagcaacaaagaaaagtagtcggagaaggagcggcgactcagggtcgcccgcccctcctcaccgaggaaggccggtaagtggggcgctgggctgggggctcggtcagggtgggggagggccgcccgggcggcggcagtggcgggacggggagggcgcggaaggacgcggagtcaggcgctgtccagggctgatttgcagatactgtggctccggcggcggcggccccgccgggcgggggctggcggccgagcaggatcgggttacacagcagccgcccgggggctgggggcgtttgttgggagcagcgcgtcgcctggaccccctccccactggaggctgggacgccgcctccgcgctggcccggacgctccaccgagtcaggtcctttgaggccaaggagcggagctgctcgggcccgtagtcctgaaacttcctctgcttcctcctcctgcccccgggtcccaccgcagccccgcgccggcccgcggccctcctggccccctcccccagggcctctccctgtcgccggaaggcgccgttgagtgcggccgggcgggttgagtcagccccggggcccgggcggttccgcctgcggggctggacagcgatttctgcgcttcagccgtccggcgccgctggcccccgcgtccggccacccgaccgctggagctggcggggctggggcgcgcgtcctgccgggcgccgtgggggagtgaagttcgcaaacttccggggcgcgggggtggcggctggcccgtgtgggggccccctccggcgctcggagcccgacgcctcgcgagggcgcccgcggagcctccccggccctgggcgttgggcgagccccggggcggtcggaggggcccgggggcggtcggagaagcccggacgccggctgcgcggtaactttccgtcctctcccgggacgggggccctagggctggggagggggctgcctggactcggggaggactggttccggccaaacagcgcctcgagcttgatcccctcccccgttttagtg

SEQ ID NO: 32057 - DNA, 2300 bp, Homo sapien
cagtcgctcccgcagcctctgccggtagccaggagcatcctggggcaggaggtccactttgtttcccagcacgatcagctgcttggggcccaccagcgcgggcaagtcgggcagcagggcgtcgggcaggtccagcaggtccaccatgtagagcaccagggaggggccgggccgccgcaacgcggcgctcaccagctccaggtactgctcgcggctcacctgcaggcgtagagcgcgccggtggtgcgacagcagccagcagcgctggcacacggtccgtgccagcccgccgtctgcctccgccgtgcggaggaacttctctcggggcaggtagccgggcactccggcgtcctggcagtgcagctctgccccacagcccgagcagttcacgccgctgggcggcaatgccgggtccgggtgccccacgaccgggtgctcccgggacctggcccgtaggttttgctgtcgccgctcctcccgccgctgctgcctctgtcgctcctcctcctcctgctgttgctggagctcctgcagctgcttttcgcgggtgggttgcggctccggatccaggatgtactccgggaacagaaaacgctcctgcatgtcaccaccttctccaaagccctccgtgtccacggggtcataaggaagctcgcgtcccagactcgatgagtgctggaaggaggaggcggcagcgcacctcctctccaggagcggctcccggaggccatggcgcgctgccgtgggagcggatccacgaaggaaaaggctcagcagcctgaacggtaggcgagcgggcagcatgaggaagtagctccaaaggggcggagccaccagcgcgcacgcgcactagggtccgaggcgcgcatttgacccgagacgaaagcgcgtgggtacttgggagctgtcctggttggttttgcgtctaatcccgtcagttctcgcgatttaagctctgagactgagaacctacttaaagctatggcaaaggcactggaggattgagctaggtgggcagaaaagagcagtgagtgttttgggttttttcactttcaggcttaacgcctcactgctagcacaagccgcccttaataaatcacacttaaaaaggagcttccggggtcgggcgcggtggctcacgcctgtaatcccagcaatttgggaggccgaggcgggcggatcatgaggtcaggagatcgagaccatcctggcttacacggtgaaacccccatctctgctaaaaatacaaaaaattagccaggcgtggtggcgggcgcctgtagtcccagctactcgggaggctgaggcaggagaatggcttgaacgcgggaggcggaggttgcagtgagccgagatcgcgccactgcactccagcctgggcgacagagcgagcctgtctcaaaaaaacaaaacaaaacaaaaacagaaaggagcttccggccgggcgcgtggctcacgcctgtaatcccagcactttgggaggccgaggcgggtggatcacctgaggtcagcagttcgagaccagcctggccaacgtggtgaaaccccgtctctactaaaaatacaaaaattacccgggcgtggtgacccttgcctgtaatcccagctatttgggaggccgaggcaggagaatcgcttgaacccgggagacggaggttgcagtgagccgagatcgctccactgcactccagcctgggcgacagagcgagactccatttcaaaaaataataaataaataaaaataaaaaatagcttcgtgttttggtccttataaaggcaaataaattgagcatcccaatgttgcggattcacaggacgaacactttttaataataagtatacctggttttgttttcaggtgtcgttatttgtgcaacaacattgaaaaacaagcagaaataaaacattgacggaacggatacgaccgcagattgcgggagctgtcctctcaatcagcccggcagcggcggcccacaatttacgcgtgtgcaaccctaaccccggcccaagcttgacctacaatttgcgcaggcgcagatcctaactttggcgtccctgtgggcggcctttggtgtgagacgcgtggtattctgggaacgtcggagacggaagttacttcgtctttagctcctggcgctgctggcttctgggcggtttttgtcttttgatttcaagagttaggagctcgagaaccgtttggcaatatgtacgacgcggatgagggtaggtgaacgctcaaaacacacgccgtggcggtccatttaagcaggaaagcgttgggaactgattggattgaggat

SEQ ID NO: 32058 - DNA, 2300 bp, Homo sapien
cactaggctaatttttgtatttttagtagatacaggatttccccatgtttgtcaggttggtctcaagcgatctgcacatctcggcctcccaaagtgctgacgggagccaccgcgctcggccactactaagaattccatatgcgcaaacaaacaggtattatacattggcccagtgcagcagaatacatatcatctgagaactgtgacattgtgagaagaggaagttaaaagtcatcctttaagacaatttactttgacttacaaacagtatgaagaaatgtcagactaaaccgagtcccccccgccacccccaccccccgatattctctgtcccggaatatttccaggaccttccacactgcctgacacaggctgacactcaacaattgagctattcgttaagtcgactgtggctttaaggaaaatttttaaagggtgccctttgcttcaaattcaaaacgtaatttatcttacgattctgcacgctacttcaccacaggaaacgaggatcagatctaacggaacgagaaagtgcagagagcagcagtgaacgtaacctggaacattaacactatgttccctgcaccctccgcctctccctaccccagtttcgttcccggcctggtaagtgtgggaacaaggctggggactgtgcagccggcgcatgggaaggccccaaatcctcaatccaatcagttcccaacgctttcctgcttaaatggaccgccacggcgtgtgttttgagcgttcacctaccctcatccgcgtcgtacatattgccaaacggttctcgagctcctaactcttgaaatcaaaagacaaaaaccgcccagaagccagcagcgccaggagctaaagacgaagtaacttccgtctccgacgttcccagaataccacgcgtctcacaccaaaggccgcccacagggacgccaaagttaggatctgcgcctgcgcaaattgtaggtcaagcttgggccggggttagggttgcacacgcgtaaattgtgggccgccgctgccgggctgattgagaggacagctcccgcaatctgcggtcgtatccgttccgtcaatgttttatttctgcttgtttttcaatgttgttgcacaaataacgacacctgaaaacaaaaccaggtatacttattattaaaaagtgttcgtcctgtgaatccgcaacattgggatgctcaatttatttgcctttataaggaccaaaacacgaagctattttttatttttatttatttattattttttgaaatggagtctcgctctgtcgcccaggctggagtgcagtggagcgatctcggctcactgcaacctccgtctcccgggttcaagcgattctcctgcctcggcctcccaaatagctgggattacaggcaagggtcaccacgcccgggtaatttttgtatttttagtagagacggggtttcaccacgttggccaggctggtctcgaactgctgacctcaggtgatccacccgcctcggcctcccaaagtgctgggattacaggcgtgagccacgcgcccggccggaagctcctttctgtttttgttttgttttgtttttttgagacaggctcgctctgtcgcccaggctggagtgcagtggcgcgatctcggctcactgcaacctccgcctcccgcgttcaagccattctcctgcctcagcctcccgagtagctgggactacaggcgcccgccaccacgcctggctaattttttgtatttttagcagagatgggggtttcaccgtgtaagccaggatggtctcgatctcctgacctcatgatccgcccgcctcggcctcccaaattgctgggattacaggcgtgagccaccgcgcccgaccccggaagctcctttttaagtgtgatttattaagggcggcttgtgctagcagtgaggcgttaagcctgaaagtgaaaaaacccaaaacactcactgctcttttctgcccacctagctcaatcctccagtgcctttgccatagctttaagtaggttctcagtctcagagcttaaatcgcgagaactgacgggattagacgcaaaaccaaccaggacagctcccaagtacccacgcgctttcgtctcgggtcaaatgcgcgcctcggaccctagtgcgcgtgcgcgctggtggctccgcccctttggagctacttcctcatgctgcccgctcgcctaccgttcaggctgctgagccttttccttcgtggatccgctcccacggcagcgcgccatggcctccgggagccgctcctggagaggaggtgcgctgccgcctcctcctt

SEQ ID NO: 32059 - DNA, 2300 bp, Homo sapien
ctgaggcaggagaactgcttgaacctgggagatggaggttacagtgagccgagattgcgccaccacactcaagcctgggcaacagagcaagaccatcaaaaaaaaaaaaagaaactgtggagtgataagaacctcttataactgttataactgtagttacccactgtggagagttcaaactgggcagatggtgggtaagaaggagacgtgacactttaacttgttttttttgagacaaggtctcactttgttctcagctcatagcagtgtcaacttcccaggctcaagcgatcctccagcctcagccccacaagtagctgggactataggtgagcaagaccacgcccagctaatttttctatttcttatagagaggggtctcccatgttgcccaggctgctctcgaactcctgagctcaagtaatccacccgcctcagactcccaaaatgctgggataacaggcgtgagccactgcaccagccaccccactttaacatttttaaattttctggcttgtgagctatgagaatatattacccagccaaaaattatgctttaaaaatcttttttttcgaatttttcttctactgagatagtagttaaaaaagaacaaggaatataatgatgctaataaatttctacaacacaagatataaatgagacagaagtttaaacagctttaaaagtttaagcttttggctgggcacattggctcatgcttgtaatcccagcactttgggaggccgagacaggcagatggtttgacctcaggagtttgagaccagcctgggcaacatggccagaccccatctcttaaaaaaaaaaaaaaaaaattaagcttttgcttcaattttttccatctgatttatcagaagtacctgagggaatagagagaggagatgtagggggtggccaaggaattgagagctataagaaaataaggtttgaattagcagatatggagaatggaaaaggcggctacgaaaatacactagactcaactaagaattttttttttttttttttgagacagtctaactctgtcactcaggctgtggtgtagtggtgcgatctcagctcactgcaaactccgcctcctgggctcaagcgatcgtccggcctcagcctcccgagtagctgggattacaggcgcacgccatcacactaggctaatttttgtatttttagtagatacaggatttccccatgtttgtcaggttggtctcaagcgatctgcacatctcggcctcccaaagtgctgacgggagccaccgcgctcggccactactaagaattccatatgcgcaaacaaacaggtattatacattggcccagtgcagcagaatacatatcatctgagaactgtgacattgtgagaagaggaagttaaaagtcatcctttaagacaatttactttgacttacaaacagtatgaagaaatgtcagactaaaccgagtcccccccgccacccccaccccccgatattctctgtcccggaatatttccaggaccttccacactgcctgacacaggctgacactcaacaattgagctattcgttaagtcgactgtggctttaaggaaaatttttaaagggtgccctttgcttcaaattcaaaacgtaatttatcttacgattctgcacgctacttcaccacaggaaacgaggatcagatctaacggaacgagaaagtgcagagagcagcagtgaacgtaacctggaacattaacactatgttccctgcaccctccgcctctccctaccccagtttcgttcccggcctggtaagtgtgggaacaaggctggggactgtgcagccggcgcatgggaaggccccaaatcctcaatccaatcagttcccaacgctttcctgcttaaatggaccgccacggcgtgtgttttgagcgttcacctaccctcatccgcgtcgtacatattgccaaacggttctcgagctcctaactcttgaaatcaaaagacaaaaaccgcccagaagccagcagcgccaggagctaaagacgaagtaacttccgtctccgacgttcccagaataccacgcgtctcacaccaaaggccgcccacagggacgccaaagttaggatctgcgcctgcgcaaattgtaggtcaagcttgggccggggttagggttgcacacgcgtaaattgtgggccgccgctgccgggctgattgagaggacagctcccgcaatctgcggtcgtatccgttccgtcaatgttttatttctgcttgtttttcaatgttgttgcacaaataacgacacctgaaaacaaaaccag

SEQ ID NO: 32060 - DNA, 2300 bp, Homo sapien
tgataaagcaaatgtgacaaaagtaacaactgttgaatttgggtgaagagcatataagacttttatatattattcttgcaacttttcttattttgagacaaggtcttactctgtcacccaggctggagtggggaggcatgattagggttcactgcagcctccacctcctgggctcaagcgatcttcccaactcagcctccgcagtagctgggactacaggaacatgccaccatgcctggttaaccttttgcattttttgtagagacaggtctccctgtgttgcccagactggtcttgtggactcaagtgatcctcccgccctggcctcccaaagtgctgagattataggcgtgaatcaccatgactggcctttttgtaacttttctgtaagtctgaaattatttcaaaataaaaagttaaacaacaggtatcaactactcattttccctttttactaaattgcaccaagctggtgtgcttctgcgagcttccttaccaatgtttcttcttgctgctgtcattaactccagctgcctctggttttcatgtctattttacaacaaactgtcagaaaagagacccaggcagggctgaaagctttcactacacagtaaatggcataagatttgtgacagctaaattactcttcagaacagctttctactatgttttaaggttagcaacaatcagtaactctaaatctcttataaagctctgtgaatacattttgctttcacattaccatttccatcatctctggatcttcaaaatcataaataatatgttctaaaatatctctgtcggacacaaaacctaatgctctgaacacaataatgatgggaacttcttgcttgatatatggtagagttgccacaatgcgctgaccaatagcactcttcttggcaccctagaaaaataaagtatcattagaacatgaatatacaaaagctcacagcaatataaaaacaccaagagaactatttaatatatatatattctttgtgcacatttcaaaagaagcacgcctcccaatactgtgaggaacctcctatgactgcttttcaaaaccaccgaaacaagtatactaattttacatacaggctcaggtcacttagacctgagacaacttccattctctcctatctgcatgccaagattctctcagaattacccaatactgtatttggaaatcacttttggctgcaaaaaaatatgaatactgattcctcaccctccccaacctatcccccctccaaaaaattaaacctctggaagaaagaaatagaagagaggtaaaaaaaaaaaaaaaaagagacaatacagatagacaaatacggaaaaaagctaagcacacaataaaaaataaatattaaatcagagctggtctgtgaggcatttccttgtctcagtgtttcaaaactaacagcccctttcacacagcttcttttttccaatttctccctctttaattgtacgcatatacaaagacaaattaaaagttactaacctatgacatacctgacttctcagttttaatcatatttgtttgcttcaatattaatttcactctatcttcccttggcctcataaccctacattactataatccctctaataacttctgtcatcttcctcctcccaccacaggcctcctgcttcagaactcctctcatggacttgttcagtaacaacttttcatatatgacacccaaatgtttatcttgatctttttcttgtaccctcagcccccatatctccaaatgccaattggttgtttccacctggacatcaattattccatttagtctattatttgtttcatcatggatcttatcccagaacaagcagaacattaaaaaataatacagctgggcacagtggctcatgcctgtaatcccggcactttgggaggccaaggcgggaggattgcttgagcccagcatttcaagaccaacctgggcaacatagtgggacctcatctctataaatatttttaaaattttaggctgggcacggtggctcacaggccgggcacagtggctcacatgcctgtaatcccagcactctgggaggccaaggcgggtggatcaccagaggttgggagttcgagatcagcctggctaacatggtgaaaccctgtctctactaaatatacaaaattagctgggcatggtggcacacgcctgtaatcccagctactcaggaggctgaggcaggagaatcacttgaacccaggaggcagatgttgcagtgagctgggatagagccactccagacttagtctccaaaaaaaaaaaaaa

SEQ ID NO: 32061 - DNA, 2300 bp, Homo sapien
cattaatagtatatagtaattcaagtttaatctcttttatagttcagagttcaattcagaataacgcattgcattttgattatatgtctttttagtcttttacaatccttccttggccttattttttttggagacaaggtcgcgctttgtcgcccaggctggagtgcagtggcacaatctcagctctgcctcctgggttcaagcgattctcctgcctcagccttgtgagtagctgggattacaggcacgtgccaccacacctggctaatttttgtagttttagtagagacagggtttcactgtgttggccaaactggtcacaaactcctgatctcaagtgaggggcagcctgcgtaggcctcccaagtgctgggattacaggcatgagccagcgtgcctggcctcctcggcctttctttgtctttcataacaaagtatatagaggacaggccatttattttgtagaattgtcctcagttgtgtttttcacatatttccccatgattagattcaatttatgcacttttttggcagaaaaaatacttaagtaatattatatgcttcccagggcatctcaacaagagtcatgtgatgtcattttgccccattaatggtactgttaactttgatcgcttcacagtggtgtctgttaggtacctccactgtaaggttactatttttgtgggaaccttttatgggaaggatttttgaggttaaatgtccagttccttataaattttttccattgatgctccttatctgaacagtaaatgatattcttaaaattgtcttaaattgtccagagcgcttaagactacagagaaatctttgtcacagattttgcaggctaaatctttgtcacaaagttagaacagggagtatattttagttatttgaatatttgttggtgtggttacatgagaaaattgggttctggttagattttactttcagattttgccagtagttacataccttattattatttgagaaagggtctcgctctgtcacccaggctggagtgcagtggtgaaattacagctcactgcaacctcgacttcccgggcaccagtaattctcccacctcagcctcctgagtagctgggaccacaggtgtgcacaatcatgcctggctaattttttgtatttttggtagagatggagttttgccgtgttgcccaggctgatcttaaactcctgagctcaagtggttcaccatcctcgggctcctgaagtgctgggattacaggcgtgaaccaccgtgtccaggcccgacctggagttttcgtagtaaagtgaaaaatatgatatgctttatgtatgttgtctttttgagtattactgttggttttttcagcacttaggaagcttaagccaatttttacaagtctctgagtcaagcattcacttcataaaactgctttattttttttcttccaaaagtacattattgttattccttttttctaatctatattttaacaaaatcattttttttaaacaacagtggcagtttcctttgaaaaatatcactttgatttactgtactatctgtgacctcactttggttgacatggcctttttctgatctttgtttccatgattggaattttgatgtttaaacttgtggaatggtcctcgcttctgtagcacatatactaatactggaacaatatgtaggttagcatgtctctgtgtaaggatgagacacaaatgagaagggttccatatttttgtttgacccctgggtcctccccctttctttaaaaaaaaaaaccaaacaaacaaatttgtggaccagtgataaaaagacataggaaatcaagggcaagaaaggcatttcagtgtctgggataagatcagagggcacttacagaggccagagttgtcaaatgttacccttcatttctcatgctcattatcgtgtatagttggaaatttagaatatgagaactggtatggaacttagaaattattttatataacccttttgtagatgaggaaatccattacatgccttctgagaggccacagatagtggcaggaatgggaggcaggtctctttcacagtgtgtttttaaaataacctttgggctgggtgcggtggctcacgcctgtaatcccagcactttgggaggctgaggcgggcagatcacgaggtcaggagatcgagaccatcctggccaacgtagtgaaaccctgtgtctactaaaaatacaaaaattagctgggcatggtggtgtgcgcctgttgtcccagctactcaggaggctgaggcaggagaatcgcttgaacctggg

SEQ ID NO: 32062 - DNA, 2300 bp, Homo sapien
acatgaaattttcttaaattagctattagtattactaagatagatttttggcttgcagtttagaaactcaaagtaattaaaaaattagagtagctgcttagtgggtgagacagtccatgttagtgaaatttttatgtcttaaaagctccacattagaagccaactaagagataaaaatggtcatcgccctcctttgttggaaaatacagtacttctgacactggtttctatatgttggtctgttgcatatataatgactgcagtagctattctcagatggagtaatggagaaaagctttttaaagagtgtatcactgggcattttaattttttgtatttgcttttcatagatgattgaaaacctgtaatgtactttatgccatttttagggggatctccccctcctttccttgtttaaactggcctataccagtatcacctgattgatttggcattcggacaccaatttcaagctcctttttcctagaaatctggatgctgtaagaaattttgaggggctactgatagcaaagttaatatttaaattccttgtaattcagtaaggatttattgggtatatttgatatttgtgatactgagttcacacacatgaatgagatgctgatctcagccctcagggagctcatcagcatctagcagaggaaacagattcattcatgtgtagctcactatgccctgtgctgtgttatgacaaatgccacattgcaaattcagttcaaggaattggttttttttttttttttgagacagagtcttgctgtcttgcccaggctggagtacagtggcaatctccgctcactgcaagctctgccttctgggtttacaccattctcctgcctcagcctcccgagtagctgggactacaggcgcccgccaccacgcctggctaattttttgtatttttagtagagacggggttttgccgtgttagccaggatggtctcgatctcctgacatcgtgatctgcccgcctcggcctcccgaagtgctgggatcacaggtgtgagccaccgtgcctggcccagttcaaggaattgttattgggacctgtgatgtgccaggcactctgccacatgctggagatgcagtgatcctgatcttcagtagttgacagtctatgcttgtagatgtaaacagataattacagcatggcatggtaactgttataataagagatgtgcactgctgctctgtggaaatgctggagaaagatacttagcacagcctgagaaggtgaaaagaagtccttgtttaggaggtaacacctgaactgaatcttgaagagtacttggaaaacgcccaagttgcgaggtaggtagaaccagcagctcataagagagcttagagaacttcttaatattctgaattaaaagagatggaggcaggaaggaatgtgtgtctgtcgggggagctagagcagttctgggttttcaaatcaaagtggaggcttaggaggatgggaaccagctcatgaagaggagtgacgtggtcatttttgttcttttggacagattcacagtaattggcaatgtggagaaaagagaagggcaagtttggtggcaggaagattgttgcaacagcctggggtgagaagtaattagggactggactagagcagttttgtagagatggagagtaaattttggaaatatttaggaagtaagtttcgtaagactttgtgattgattagtagaatggttgaaaactccaatgagtacagaaaagagaatagttcttcctggtggtgtgtcagatggctttgtagaggtggtatcatttcaccaggcagagcagagtggagaagtgtatttcattctgtggcaatagcatggtcaaaggcttggaggtgagggtgtatggtgatgtcagtggagtacaggagtgtaaggagactggtaggggaaggttgtttttggggcttcattgaggaggactttaatgttgtgctcttctgtagccagtggctacctgtttaatttttaagtgggtaagtgttaataattctggcaagtgaagagggtagattggagggaaccaggcagggacttatgagctgatggacgtagtataggtgaggggaaatgggctggtctattactgtgacattgggaagggaggggctaggttttttagaatatttgaaaatagaattgatagggtatgtttatagatgggtagaaggaggaacttggagacaaaaatgattttgagatttccagattgagagaaaggtgatgctgcttatccacgacagaagacttaggaaagaggaagaaagt

SEQ ID NO: 32063 - DNA, 2300 bp, Homo sapien
ttaggatgagaagaaatggctaatttaagtcaaggtttccagttttagatgctgttttctctaacatttccccaaatataaagaaaagccgggccggaaccctcaaagggtttgcagtctggagaggtactgagctgggtgtacatggtaatgaggttatgaaactggttctatatgactgtcagtctcaatattttataatcagactgtgtgagtgtttggtgatgtaagtagcaggtgagaaaaaggaatattaagtataaactagaaattgacaacacttgaacaatcaccaagctaaccttctgctctgataaggcaagtatctgccattttgaaaaaactataaagttccccattgtaatgtttataagaaaatctcaatatttggaataaattcttaaataacgcacatttatcttttcatgatgtgaccgacaaatgagatccaaagtaacaaataactgtttctattgtaaacatatgcagattattttgggttgcaattttctaagtttaaggtgatgatactataaatagttactagtgagttacacaatttaaggctttcaatagtgaactctgaaattgatgacatacaacctattagtttgtggacttctgggaaaagctctaaagaaagaatttggaaattctggagaaagtctgaactgtgttaaagaagcaacagcttctgtaacctcagaactgcctcctctcccttttctaccttggctaagatcaggagctgccaacattgaatgtctgactttcccttgaaaatactgccaatggaaaatgttatttcaggcattagagttaaaatttctatgtgtgtgtgtatgtgcgtgtatttgcaagtccagactttattttcttctttctttcttttttttttgagatggggtctctgtctgtcacccaggctggagtgctgtcatgtgatctcggctcactgcaacctccgcctcccagattcaagcgattctcctgcctcagcctcctgagtagctgtgattacaggcatgcaccaccatgcccagctaatgtatatatatatattttttattagagatggggtttcaccgtgttggtcaggctgatctcgaactcctgacctcgtgatctgcccatcttggcctcccaaagtgctgggattacagacgtgagccaacccacccggcctatttccttatttcatttacagcaagcttggacttgtttggaataaaataaacaatcaaacataatctcaaagacatttctgctgaacagtgtatcctggggacaaattatgcaaaacaatacaaatcaaagaaataggaaggaaaaacaaaatggtcagaaggttgacaacaaagtgcatcacaaaaacagtcttcaaagagtttgtattttatttttgcccacaaataattagctagttagattactgtttgagaacctataatttttagaaagtggactattttcttcaatactaagaaatcagggctgtgcacggtggtttatgcctgtaatcccagcaggccgggattacttgagctcaggagttcgagaccagcctaggcaacatagtgaaactccgtcgctataaaacaaaacaaaacaaaacaaaaaaccaaaaattggccaggcgtggtggcacaggcttatagtcccagctacttgggaggctgaggcaggaggatcgcttgaggcagaggttgcagtgggccaagatcgtgccactgccctccaccctgggcgacagagcaagatcctatcttttaaaaaaaaaagtctgtctggaagtccttactttatatttaattgtcaaactcctttcccccatctcttgacttcacctctctctacatccccaagccaagaatgatgagaaatggacagatgttagcacgagttgggtgcgctttgggcatggggaagtctgaggtctcggaaaatcttttctacatatacacccggccctcactttctggacgcacgcagcaaactctcaaaataaaaccaccaaaaaggagaagggggggcgtcgcccaccgctcctggcattccgcggctgccaactctttccctcccatctggctcctgggatgcccgcgggggaatcgcagtgagcagcgcggggcgaggccgccgcggacgccccgtcggatgtgcccttcgctgggccgagcggcgcagggttggagagggaagcgctcgtgcccaccttgctcgcaggtgcccttgctgacctgggtgatggccttctccccgcggctctcggccctctggctggcggcgcgcagctggca

SEQ ID NO: 32064 - DNA, 2300 bp, Homo sapien
gcaaacacacacacacacacacacacacacacacacacacacacagtttgtagagcctgagggcttcttctggctgcggagataagcacctttattggctgtcttcccttcctgcttgctcacctgcctgccccaaccctcaatctctgtgtcctgatgtggcttctcaggtgacctacttgcactggaatccttgtctcagagaaagcttctggagaatctaaaactatgacagatcgtcatactagatcatggaaccaatttagtggctcttgaccagtgaattaataaaaaggaaatcagggccgggcatagtggctcacacctgtaatcccaacactttcggaggccgaggcaggtggatcacttgaggtcaggagtttgagaccagcctgggcaacatggtgaaaccctgtctctagtaaaaatacaaaaattagccgggcatgttggtgcatgcctgtaataccagctactcgggaggctgaggcagaaggattgtttgaagctgggaggcagaggttgcagtgagccaaaatctcaccactgcactccagactaggcgacacagggagacttcatctcaaaaaaataaaaaaaagaaaaagaaagaaaagaaaagaaagaaagaaagaaattaaatacaataggaaatagagtgcactctgcatttgtttccttttcaagaaaacaaatgggtcatgtaaactgcatctcttaggatggaacaaagacaaaaatatttagggaaactctgctgtaaagatttttcattgttttttaaacaactgtcaggtcaacatatgacctttgaggggaaaaaaaatgctccacttgtctataatacactaaggagaggccaaaaagcagtgctaggtttttctggattggaggatgtttccccactctccaccccccgattttgtggtcatttaattttcaaaaaatttgcaataattatccttgtaagagtctgttgagaatgagttctttacactgctaatgggattatgaactgaactgctggctttcagtcagcaaccctgtaaatccctggatttatgctaagaaaaaagaacacaaaagaaccacaatgtgacatgcagaataatgcacgctgcaatgttacacattcagttaaaaagtgaaagcaacttccatgtctgcattggagaggccagtgttcctgggaagagaggctttcaagttgagtttgcagagcacttcgcagaaagactgaggaagagtccaccgtttatatcaaaaacctcctggaatgctggtgaagactgggggcgctttaggtgcctccgtggcagctccaacgaggaaggagctgggacccctgctcctctcagctgcgctctgttctcccgagaggcttgctggagggcgagcagttcagcaagaactcaaaacaagggcacagctctcacacggattccagtactcactgaaaacggctcagcacaaaaaaagcacagagtcttgttgaatgccactgggagacaaagcggggagggaggtgcaggcagttaagaggttccagaaagggaagtggttggcaacggtttgtccttttagtgcttgacacccaagaccacagcaggcctgtggccagcggggacacagtccacaagtgggggtttttaacagcttgttcttaagagagcttcccaaaccacagagtaatgagcactcaggtgtctcaggcccacggaggatttaatagatgaaaccctggatcgtctcgaagccgtggttgttaagaagtttaaatatattgaccggaaacggggagaaaccagagggtggaagagccgctcgcactgcggtgcgatccctgagggctcggggcaggggactggggaccgagcaggagctggcggggtgagctctgcgaagcgggcgtgagaccgagcgcccatgggccggtcacgccgggtgcccgctcaccccccgacgccagcaggagcgcgcgcgcaggccccgcggggccgggagggcggcacgggcggggcccccgtgctctcaccgccccggggtgtggttcccgcggacaggccgggcggggcggcgggtttaaggcgccggccggcccgacacggctcactcgcgcccttgccgctgccaccgcaccccgccatggagcggccgtcgctgcgcgccctgctcctcggcgccgctgggctgctgctcctgctcctgcccctctcctcttcctcctcttcggacacctgcggcccctgcgagccggcctcctgcccgcccctgcccccgctgggctgcctgctgggcga

SEQ ID NO: 32065 - DNA, 2300 bp, Homo sapien
ttagagggcacatctcttggaaataagtgggagactatctttgctttccactaatcaaaaagatgctggatgcatttattagaatctgcaccaggtgggagttggattcggtgatctctagcttatctttagaaactcaaactttgtaagacaactttcagttgaccaaatagcttcctttcattggattcatcctataagaggccacagggtagatttcatgttataacgaaaaccaccaccactaccatcacaacaacaacagaaaaatgagaataccttattgaaaaggagagtcattatttccatgggcattgctattcccattaaatagttcctattgtctatagacagaatgcctgatgccaaaccaggataatagatacagaaaaagtccaagaaaacataattcctgagcaaatagtggactccatgacttctgaaaagggggatgctggaatgcggcttgcatagaaggtggctgtgataggatttacaccaaagtgctaagctaagatttcctttgaggctattgcctttaagctgcatgactcaccggcaaaattcacaaaacaaaaatgtgatcactgaggattatgctgccattgctggtaacacgctggcaatgatcataacaggacttgccaagcacacattgaccctgtgagtcacattggttcccatggagattaacaccatcagcagtgggggcaacagcccagaagtgcgattggcattagacagagaagagaaaaatggcagtatgatcctctagaaatgcagcaattggaatgaaaaaggagcatgggctggcgtaacccgggagagaaaatgacttgtaatggcatagcaacctacttctcttcctgcaaatggctggggaaaaagtgtgcttcctggcagataggctacaatctactgttatttatctggctatttccagcaagttctcttcttatcctagatagcttatctcttcaaaggagtctgtccaaggtgaactcaccatgggccaagaggtcctgcctctgggactgcacatctgattaacatgttggggcttaggggtgggaagggcacagtttacttagatatatcttgctaggtttaaattttctttctggatacaaatattttttactgttattaaaaaaaccccatgacttcaatttcacaatttttgtagttatttcatgtattttaatagggcaattgggtttctgataattatagtctatttttcctttggaagttgtcatgggaggggttgatgccccacaccctcttgtcctttgcaaccaggtctacttgcacacttttatgcaggctgcagcagccttgtgcatgagttgatccctctggtgcccgacttgccagccctctcccatacagagagaggaaaaagtctgaagacacacatatttcccaaattcaatatcttgagtagctgaatcatgcccagctcagatgaatcagggtatttaaggtgagctgcactttttcttgtctcttttgtatctgcagttgtggaaaatgcctgttagttgatgaatggtcaaacagatgtaagaagaataactggttcctagcaaaatcagattaaactgcctcaaaagtaaccaagctaaaatgacaacatgtcaccctggaaaagaaggaaaataatggctttcaaaggaatgagaaagcacttttcaagaaaattagagttaataagatatctgaagatggaaaacatgccatcatccttccaaatgttagttgttgatgactgttccatctagtgggagatgtcacttggcatagagaaaaatgcactgggctgttgataaccatggtcttacctgtaccattgactgttggtgaggtgttgggtacatgttccaagttcactgaacctccgtttactcatctgtaaaataagcacttttactcacacagtctcagagcactgaacactgtgcctgaaagggaggacactcagtgtgtggtagagaagatgatgatggtgatgttgagggtgaccacaatgatgatgacaatgtgatgatgacataatgagccatcacattagtaagggttttctagagaaacagccaatagaatgtcctaagatatgcagttggcaagctggagacccaagaagagccaatatttcagtttgagtctgaaggcaggaaaagactgatgtcccatctcaaagcagtcaggcagagggagttccctcttgttctcactcaaggaagggtgagtcgttgtgttctactcagtcttttgacctattggatgaggtctgccac

SEQ ID NO: 32066 - DNA, 2300 bp, Homo sapien
atatcattcccttagaaaaataactagcaataaaattgttgagtcataggatagatgttttaactttttaagaattactacacagttttctaaagtacttgcgcaattttacagactccaaaaataaatgagcattccagttgctctatactctcccaaacatttatcattgtcagtctttaaatttcaacaatctagaaaaatgtgaactagaatatctcattgtggcttatttaacacataatgccctgatgacaaataatgttaagcaacttttcacggcttattggccattttttatattttctgttgtaataatctgctcaagctttttttcccattcttttgttgattttgtttttattattgacttgtagatgttcttcatacatcattcatgaaagtcctttgttagttatatatattgtgaatatttccctattatttggcttgcttttctggcaaagatgactttttataaagaaaattgataatttcgcagccaacatgaccgaataggaacagctccagtctacagctcccagcgtgagcgacgcagaagatgggtgatttctgcatttccaactgagctactgggttcatctcactgggcagtgtcggaaagtgggtgcaggacagtgggtgcagtgcaccaggcatgaaccgaagcagggcaaggcattgcctcacctgggaagtgcaaggggtcagggaattccctttcctagtcaaagaaaggggtgacagatgtcacctggaaaatcgggtcattcccaccctaatactgtgtttttccaacagtcttagcaaatggcacaccatgagattatatcccatgcctggctcagagggtcctatgcccatggagcctcgctcattgctagcacagcagtctgagatcaaactgcaaggtggcagggaggctgggcgaagggcgcctgccattgccaaggcttgagtaggtaaacaaagtggccaggaagctcgatctgggtggagcccaccgcagctcaaggaggcctgcctgcctctgtagactccacctttggggccagggcatagccaagcaaaagacagcagaaagctctgcagacttaaatgtccctgtctgacagctttgaagagagtagtggttctcccagcacacagcttcacatctgagaactgacagactgcctcctcaagtgggtagcctaactgggaggcaccccctagtaggggcagactgacacgtcatacggccgggtacccctctgagacaaaagttccagaggaatgatcaggcagcaacatttgctgttcaccaatatccgctgttctgcagtctctgttgctgatacccaggcaaacacggtctggagtggacctccagcaaactccaacagacctgcagctgagggtcctgactgttagaaggaaaactaacaaacagaaaggacatccacaccaaaaccccatctgtacgtcaccatcatcaaagaccaacggtagaaaaaaccacaaagatggggaaaaaaacagagcagaaaaactggaaactctaaaaatcagagcaccactcctccttcaaaggaacacagctcctcaccagcaatgaaacaaagctggacagagaatgactttgacgagttgagagaagaaggctttagacgatcaaactactctgagctaaaggaggaagttcaaacccacagcaaagaagttaaaaaccttgaaaaaaaattagacgaatggctaactagaacaaccaatgcagagaactccttaaaggacctgatggagctgaaaaccacagcacgagaagtatgtgatgaatgaacaaccctcagtagccaatgcgatcaactggaagaaagggtatcagtgatagaagatcaaatgaatgaaatgaagtgagaagagaagtttagagaaaaaagaataaaaagaaatgaacaaagcctccaagaaatatgggactatgtgaaaagaccaaatctatgtctgattggtgtacctgaaagtgagagggagaatggaaccaagttggaaaatactctgcaggatattatccaggagagcttccccaatctagcaaggcaagccaacattcaaattcaggaaatacagagaatgccacaaagatactcctcaagaagagcaactccaagacacataattgtcagattcaccaaagttgaaatgaaggaaaaaatgtaaagggcagccagagagaaaggtcgggttacccacaaagggaagcccatcagactaacagctgatctcttggcagaaactctacaagccagaagagagtgggg

SEQ ID NO: 32067 - DNA, 2300 bp, Homo sapien
gtaatcaacagtctcctttacaaagaaggcaccaaaaggttcagcaattgaccaaggccactcatttaacttgaccagacttttcctctgtcagaaggcatggttttggaatccgcacctttctgtatccattatggtaatttccattgatgatgtgaaataagataattgaatctccacgattgttcatcagacagggatactttaaaccgtgcaatgaacttgcaggtcgagttaagtttgaaggaacataaaattgaccaaaggcaggaaacattttcagactcggtacttgcataatgaaaatacggaataatccgcacctgaaaaaatgagacactggcaggactttcaagctgatgtcgtttactcacctagggtggagtgggagaggaagacaagaggagaaaggggggagggaggtgatggagagtgggagggggagagagggagggagggacagaggaggaagtggaagagagagagagagaaagaatgagagagagagagagagagggagagcgagcgccgaggcgggcctcgaagccactggagaggtaccctttgtctgacaaaccctgaaagggaagcctctagtagcagccctcccgttcccacctccaagcgtttgccgaactgctaggtggagcccgcgccgcggagcccacgagcactccatatccgggttttgccggccacccctttccctggcgcgagccccctccccggctctcggagctcttgccgctggcccgcccgaccgctgctcattctggcctccgctccggccccggctgcgcctaccccgcgcgcaggctgcacggtccccgcgcgcccgcgctctgacccgctgtctgcgcgtcgcccccctcgcctgctggcccggcaccgctcgctccagttcccaggagcggggatgcagatgctgcagctggtcggggtgggcgccgccgccgccgccgccgccgctgctgctggtttttctcggactgctcgttgcctccgctccggcagctgctgccgccgccaccgccgcctgtgactcgccccctcccctttctttcttctctttttgccttggtcctcttcctacgggtgtgcgcgcgcgcgggttgcacggtttgctttggcaggagctcgctcgtgtgtgcgcgtgtgtgagtgtgcgtgtctggagagcgccagtgcctcgctcgctcttggggagtcgaagaagagaaagaaccgaagagacagcggcggcggcgcagagcccggggccgcgcgatgaagctcccacatgcccgcagctgcccggcccggccggcgagctaatcatccaccccacgggctcggggttcgccggcccccgggacgcagccctcggcggccgggcgcccgctctgtctgcgcgccccctccgtgcaccggggaaggagtttgtgtggctctcgctccggctgtccgcggaggttgcgggcttgagaggggaccctcggctgggagagagcctcgggaggacgaagaggaggacggtttggcggagaagccacccctggccctcgcggctccccctacctattccatcgctcccgctccgaggcggaaaggggaggacgtggaagaagaaaaagaaagagaaggggggtggggtgggagaactggatataaagatcggctggggggatggtggaagatttttggtctcttcggcagcgtcttttcttaagcggcggcggcagcagcagcagcaagagaaggagaagcagccccagctatgactgccgcatgttaatagctgccgctgggtccctcggctgctgctggagacagagcctgactccgaagttgtgcaactgtggactgggagagacatttgaaccctcttttcttttcgctccccttttgcccccttggggtgtgtgaagcgaggaacgtaaaggaaggcgaacatttggctctctttttccttcccctttctccgtggctgtgtagcggaagaaagggaagagagactttttgttgttgtttccttgactggggtctccaccctcctgctgctttctctgcgcttcgattctcgttatttgccgcgtgtggttgggggtgtctgcacaggggccggccggtcttttgccccgggctcaatggctggattgtggaaactgcacccgccttcaggttgttgagcaactgatgggacgatctcagggaccggcgtttacgaaaggtaatttattcttcgcactcttcataataggggtcgccctggccgggcgcaggcggcggcatccaccgggcgggcaacaagagggggtgcg

SEQ ID NO: 32068 - DNA, 2300 bp, Homo sapien
gacatatccttcatacctgcaaagccatctcatcagctagactattgcactcatgctcataaatttgacaaggttggttgattctcttccaatcccatttacatttagaaatatgtagccatataggatatttttctattaatttataaagtgcttcagttatgatgaaaggcaacattacctgtttgtttccaaagcacaggttaatattttgattatctttgtatctcattgtcgatgtagagtttgaaatgcagtacagattttgctatgttttagaagataaagcattcagttaggatagtccaaaactgttgatgggatcatctttcattagggccacttaagccaatatatggataaaatgattcatcactttaactctagaagccattatttctaattaaaaactaccccataaatacctattttattatgacatctgtgtggtaaataaattcaagctatcagtaaagcactcaccaaggaaattaccttaaaaaattacttcatttccaagtgtatcttcctaattaacatgactatttcccatccatatttctaaactgcaatttataataactttagagtctctgaatatctaatacttagggaagttattatctggatttcttaaatcacaatgcctacaaaaaatgtaatcatttattgaccttttacaattatgtacatgaaaatttatagagcttgctgatattcaaagagaaaaggaataaactgataaaactctataatcattttcctccaagtctaagctacagaagtggggggttaattccaattcaattacatcaactgtacaattatcattgtagttctttgggatataaaaagatacataatacatgaattcacatactgatgaagacaatcatccaaagcatcttgtctctccaatatttacttaaggtatgactgattctttcacctttaacttttaagtttgctttctacccacctttcttttctaggtaggcaacatggtgcaatgaaaacaactcaagggttgtgttcttttagattcagatatgaatatttactttgtcatttactagcaatacttttttgacaattgtcaagcttcaatatcctatcactgtctctaatttctcaatctgagctggtttatgttctcaaacaatactgtgattgttggctgtgctaacaaaactgtaagcaaacattggacagtgttttcctggagaacagaatacaagctttggagtaaaattatacctgggtttgtaaccacatcttcctaccaatatctatatttataatagattatttcaatgaaaaatgctttttttcattaagccataattatataagatacacatatatttatctggaatgacagatagatagatagatagatagatagatagatagatagatagatagatgatatagatagatagatgatatagatagatagatagatagatagatagatagatagatagataaatgatagctagatatccagaacatgtgagatatatgatagttacagagatacagttagataggtctatgttacagataccggctaagcatttcacaaatattaattcatttaatactcatgatgtattcatgaagtggccactattatcactccaattttacagatgagaaaactgaggctaggcatgacataactaccaaatcacatagccggtaagtggcagaaacagacaacacactcctgaatctactcttacctagtaagttatatacactgtctctcaatatttgaatataaactaattttctggcactagaattttttcagatctaattttggtagcctttgaaactattgatggtctttccttaacattccctttaatgttatcttctgtcgctgtaaggaaaatggctgtgcagcagtcaagagtaggccaaggtaaacatctggcatagcatgacacagcagggttggagcacaggtgcacaatcccttgcattatataaccacagttatgtaaccatgttatgagtgggctcaccacctggctctgagccactattgtctatgaagtgcataaatgtatcactgacactgtgaggggtggtgcataataaagccatgtcccacctgcctacggccccccgagtgttgtttcaactacctgccatccattcacccactccccttggaccccagctcaggttggaacctgataattggcgtagtcaacaggattccgaggtgagtgagtcctcagcccctgatggtcctgggtcagctatgtggtctcagcatgggttgt

SEQ ID NO: 32069 - DNA, 2300 bp, Homo sapien
aatgttcatagaaccatatgaattaagtaatatcaccctacccattacacagataaaaaatggagatgctatagttaaatgaccatcgacaggagaactgagatgctatatagttaaatgacttgcccaacgtagtagaacagtaattgagatcaggttgtctggctccagaatgcgtgctcttaactaccatgccgtaaataacaatatcaaaacatctgataaatttgtgtaatttttgccttttagtaaagactttggtttttattttgacagaatgaagtgtattaatacattcatcagtaaacaattttgaatatcccttttgagaagattttaaaatttaattctaaaactctgaaattattgaaaatatgtatcaatctccaagacaaaaaaaagaaaagaaagacagaaagaatgaaagaaaaaaggaaggaagggagggaggaggaaggaaggaaggaaggaaggggaagggaagggaaggaaggggaagggaagagaatggaaggaagaaaggaaggaaggaaggcccaatttgtgcttgattgatcagtttgaaaggtgctgattgtaaaagatggtgtcttcaggatttggattatgtttctttagtattttggtttcctaagataaatcttgggaagacttgaagaggaggcaactacactagtttggttcaataaagttactttttcagtgcttaaagttattaatatttgacacctctaggcaagattcctcatcttgaattgtacaatcctggagaataggttgcatgttttcttcaatattctattccatgtttctagaccactgctttgtattttagtgagcattcaattaacctctgttgaatgaatgatgttcgaactgcattttaatttagtttgtatctatatgcttactgttaaaaacaagctatttagaataacataaatgaaacataaatgaaaatgaaatttcgggcataataatctgtctttaatcatcgtacattgttatttagataatactttgccttgattttcagtactgaatgaagcttttgacattcaaacaaagagtaacatcttttgtaaacataaatctatgatgttcacagatttacagagatgtttagaaaagtaatgtagttaatatgtagaataatttctgaatgaatattgcagcctgagatgaaagtaagacatatatttaccttttgttttaaacttatttatggtaacagtgatgaattaaatattttactattctaatgttagtgaaattatactgtggtataattatactgtggtataaccccatggggcttactttgtgtaagctttaccatggtataatatatatgtatttttagccaggcgcagtggctcatgcctgtaatcccagcactttgggaggccgaggcgggtggatcacctgaggtcgggagttcaagaccagcctgaccaacatggagaaaccccctctctgctaaaaatacaaaattagctggggtgaagctacccgggaggctgaggcaggagaatcgcgtgaacccgggaggcagaggttgcagtgagccgagatcgtgccattgcactccagcctgggcaaaaacagcgaaattccatttcaaaaaaaagaaagaaaaggccgggcgtggtggctcacgcctgtaatccctgcactttgggaggcccaggatggcggatcacgaggtcaggagatcgagaccatcctggctaacacggtgaaaccccatctctactaaaaatacaaaaatttagcctggcctggtggtgggcgcttgtagtcccagctactcaggaggctgaggaaggagaatggcgtgaacccgggaggcggagcttgcagtgagccgagatcgcgccactgcactccagccggggcgacagagcgagactccatcttaaaaaaaaaaaaaaaatcagtatatttcagttaatttgctcagtagagactgaattgtttatttcattaagatctgaggccaggatattaacatgatggcaatatatgtattgtataaataatgtctttggattacttacttattttatacaataacccttttttttttcttttttgcaggtttcagatttgggatattggtgtttctgttttggagaaattattctttttctttttaatttgaagaaaaatcatcagtcttggaatacagaagagaaactagaaatatacgtattttgtttcacatttgaacagtcattcttgaggaatactccatacctgagtagacagccatgtggccatcgcagctactaattttc

SEQ ID NO: 32070 - DNA, 2300 bp, Homo sapien
ataacaatggatacttatcctttataattatagcaagcatatgaaattcttacaatcaatattattatggattgtatattgatgatggccctctatcctttctatggaagattttggtagttagcctgttcccaaacttgttatttctctaaaagtaaaactttgggcattttagtaatgtacttttctttttgataatctccaaaacctacctgagtttcatcttagattgttttccattgcatctatgcttatagttactgtttaaaagctaatcactaatgccaaaataataatactttaatcattaaaaaagggtcaatatccaaattactgtgattttctaattttttcacccagtacacttctaatcattccaaacataacagtagactgcatgattatttttcagtgtgtttgctttgcaaatatattagagcagtgtttcccatggtaggttcagcggaattctatactccaaagaagctctatgataaaggtgccatgatccaattagtgtgtgaaatttgctcacccttcccacttctgccttggagattcacgaatgtacttaagcaattagaatctctgccacaattatatgtaatataacatttcttacacacatgtggctaaggatccctttttcctttctgtgtaacatctagctatgccacttgaaacatgtgattcaaggaccaccctttgggaaacattgctttatagccccttcactacagatgaatcagccaggctttcttaccaccattcacatgatatgctactgaatcatactaaaaatcaagtgaatcagatgattcttggccattttcatcctgaagtatgagcagcaaaatattatagcaagtaatcttgggttttaatgctcttctcatgtaacagtaaaaggtacatgtttttaagttccaatactactgtatttaacaggacatttttaactgattaaaatctagatcttgggttcttttctgtaacctttcaccttttcttctttccttattccttctttcctttctttttcttcctttctcttttccttccagtatccatccatcactcatttttaattgtgtgggttgcatgctctgtgtgtgttgtagcaacgttgagagcttttttgctaaaagattcagtggcctgtattacagggcttttctttttcctttatcaaaaaattactatgagatattcatctgtttcttaatgataactactgaatggtgaatttcatcagaatggaaacaatatttttgtttcaaaatatgttcttcaatgaactattaaaagtattgtgtgtaaacatttgtatttcttatatgtctatagaatacatagacatatgttacatctgatatatgtttccaaaaatattgtagcatatttacaaaggtaacaatcacaggaatgcacagctactcacaaaaaggctagatatttttcagttatcaaaatcaaaatgattttgaaatgaagccaaaattaatgtggaagaatactttgtgttcttaaaagaatgcagcaaaataagtgatggtgggtatctcttgttagagttgcattccatttggtgaaaaataagactatataacaaaatatgaaattaatatatttatttattttaactgtttcccttccaacagtttttctttgtcctggactactaaaaggagtataccagagtgaacatttgtttgagtccgaccaccaatctggggcgtggtgcaaagaccctctgcaggcatctgacaagatttattatatgccctggactccctacagaactgataccctgactgagtattcatccaaggatgacttcattgctggaagaccaactacaacctacaagctccctcacagggtggatggcacaggatttgtagtgtatgatggagctttgttcttcaacaaagagcgcaccaggaacatagtaaagtttgatttgcggactaggataaagagtggagaggctatcatagcaaatgccaattaccatgatacctccccttaccgatggggaggcaaatctgacatagacctggcagtagatgagaatgggctatgggtaatctatgcaacagaacaaaacaatggtaaaattgtcattagtcaattgaacccttacaccctacggatcgaaggaacatgggatactgcatatgataaaaggtcagcttccaatgcctttatgatttgtggaattctgtatgtggtcaaatctgtatatgaggatgatgacaatgaggctactggaaataagattgactacatttacaaca

SEQ ID NO: 32071 - DNA, 2300 bp, Homo sapien
tgatgaattaattaatgattttttaattgttcttttttctaccaccttttgtgactcaattttttaagatcctgagacatttatgacctgcttatctgtatatttttatgtgttcatctgaatttccagtaagaagtaaatttccgtcaaacagatgtagtataccgctataatacagcttatttagccagctagaagtaaaacttatgccaccgaaacaaacaaatgattactttcttgtcaaataatatttttgtcacatttttagacttggttgtttttcctctttgaaatctagttcacatgacactttatcagggacactagctaatggacctcatgtttagttaattctgaaactgatggattgttgcacagcctctgctcctaactgataaatatttgcggcaaagtccaaattttgtgaaggagaaattggttggaattaaattttatgggcgtcccttcttgtttccactatattataattaaacacactgaagttgaataataaattactgtgctaaaataattgtaataacaaaaatgaactgacagaacaattatcttgaagtaacaataatcaggaaaatatctaacaaaaagcacgtaagggaaatatccttaacttcctgtaaaaaaaattcacattgactctaaattaagatgtagtttatcatctgtattttaaaatatccatcataactaaaaatgttgacatattaaggaaaggatctttaagatctaggtttaagattcttattagtattaacttaattggtatgacaaaacttttcataatagatataagcatataagggaattagtaacatttataaaggacccacatatttaattttaggcattgtcttcagcttccctggacccccaacacatgttgaaatgttattgactagcttgctttttttaaggaatgacattaaaaatttcgactgactttctacattactgtaaagatcaaaagggagaggaaaaatagtttacaagttttctaaagatcaactccagactaatctatatcatcccctaataatgaaaaaacaattagtttttagaagttgtctatcagtactgtaccgaagtgctactgcttggatttttttgttgtggttttaaagagatggggtcttgctctgtcacaaagactgaagggcagtggcacaatcccagctcactgcagcctcagactcttgggctcaagtgatcctgctgtctcagccttctgcgtagccatgatcacaggtttgagccacagcacttggcctgtgatgtattgcagagggaaaaaaaccaacactacagaagtataatgcatgtcaattcagatttagagagtgtaaaaaacaaaaacccaaagtccaactatttagttttgagcaaatctgaagatattggcatgaatatcctttcttctctaagaaaatttttgagataacaatatatatgaagttcccagtacattgtagaccaaggtgttaaaatttaattagttcatttttagtaattcataattttaacttaccacataaacaattactatgcatttctaagtaacgttttcaatatagcttatattagatttctgcacatcattaaattacgaagatggcacaaaagcaaagcagcaacattgcacaatagcttatggaagcatttttgtgcgaatggattttacataagaagcttttctgagctcataaaatatattcaatggatcccaacattaaatttaactttgcaatcagcaaatatgttctttataacatcttaaaaatattaaacaattaaattttcatttgtaggctagcagaacttaaatgtgttggtagttgcttctttcctgattaggccataagaagaaactttcctatttactaattaacactgattacactctctttggtttaaaagggaaactttcacctgtacacatacacactctgattccatttatttacagcctgcagaagaagtagcttgtttacgatatttaaaactttgtgatttctgcaataaaacaggtagttaatatagtttcgcataatctcattgaaagatattgctattccttctttatttaaaaaaaaatttaaaagtcagcacttctttcacatctagcacctataagttactattcaaatgtcttgatttcagctaagttttgatgtttctttttctcttaatagtatgtcaaaagcattgttctcatttgataatttgtgtcccgttacagtatttcaaaggtaaatgcaaactaatttttaggaaggcttgtgaaa

SEQ ID NO: 32072 - DNA, 2300 bp, Homo sapien
gtagcattaacaatagccacttacacaacatcactaagtatttctaggtgtttcccttaactcacgaattgctttgtgagacttatttgtctctccatgtgtatatttgcggatactgtttaacatgtcaatctcttatccataaggttgttcagaatacttttttgttaaataaaatattagaaatattttcatgacaagaactgcctatttgagagcaaaagatataaagtcagggggggttttagatattcaaactcagaaattcatattcatcaaattttctaacttatctaagagatgtaaggctggtactctccttggattccatagaatttattttatttcttttcaacataatgctgtatttcagatatgtatgcctttaattttaaaagatgtctcactaggatgtgtcttgcatttacataatgtacagaaagagaaacatttaaaattgttgaagacatgtatatttaggattttttatgaaatattgcttttagggtgactacacccctctttatccctgacccttccaaactggctcaatatatttttttggtctggaggtaatattagcctcagctaagccatggacatatttcttggaaaaacaaatgtttcatagaaatcccagaataggcagattctgtctctttgttctcggaaatctgatagaattcaagttcaaagaaatgagaataaaaggcacagtttgttttattgagaataacttaggagttgatctgtgtctagcttatacataactatgaacaatgaaatctgaaataaccatacagacatctcactttcttaagttcagttaaacataccaaacaagtttattttacaaaaaaataaagtaagtgactagtatacacaaatcaccgccactgttcccagagaataaaaagttgaataaggaaaaaacgtcgttcttaagagtctattattttttataaaccaaagaaaaaataggtttataggggataaaaaaagagggactgtttaattctgactgtagagataagtagaggcattatagagaagggtgcacttcctaaagcactgattagtctttgtgattttggtggatgaggtaaaggattttagctaaaataaatgacatggaaaaggcatattggtgatataaatgttggcatccccctaaaatttatatgttggaacctaatacctgatgtgataatattacaaagtgcgacctttgggaagtgattaagtcccaccttcatgaatcagattagtggtcttataaaagaggctgaggacgctccctttcctcttctgtcatataaagacacaactagaatgtgcccttttaaatgcagagaggaagccaacaccagacatagaatctgttggtgacttgatcttacacttctctcctccagaattatgagcaagaaatttatgttgtttataaattatccagtctaagatattttgttacagcattctgagcagaataaaataggatataaacatgaacttgctcagattattagagaattgcatagatacccattgtgagtgtcatgaagagatctatggacaagaaaaagttggtgaaagaaaattgagtgaattggttgaagccatatatttttagaaacttaaattacaaatttaagaaattagattttatagtgtgtttactgtgaatattttgaaagtatttggatagtgtccttaattacaaaaacaagttggccgggtgtggtggctcatgcctataatcccagcactttgggaggccgaggtaggtggatcacaaggtcaggagattgacaccatcctggctaacacggtgaaaccccgtctctactaaaactaccaaaaataaataaataaatgaataaataaataaataaataaatagccgagcatgatggcatgcacctgtagtcgcagctactgggaaggctgaggcaggagaatggcgtgaacccaggaggcggagcttgcagtgagccgagatcgcgccacttcactccagcctgggcgacagagcgagactccatctcaaaaaaaaaagtgtagggggggagccaagatggccgaataggaacagctctggtctacagctcccagcgtgagcgacgcagaagacgggtgatttctgcatttccatctgaggtaccgggttcatctcactagggagtgccagacagtgggcgcaggccagtgtgtgtgcgcaccgtgcgcgagccgaagcagggcgaggcattgcctcacctgggaagcgcaaggggtcagggagttccctttccgagtca

SEQ ID NO: 32073 - DNA, 2300 bp, Homo sapien
atgaacatattttataacatatgtataatctgagaattgaaaatactccatagactaacaaatctaaaaatcacaatttaaaaatgaagaaactgaaaatttttttaaatattttaaataatgtgtactttgatttatataggtcatctctttgtgaagtatatatgcatgctcacatagaaactcatacacacacacacatgcacataggctttcatagaagataggtatttaaagatgtaaaaatagaacaaattttttccactctgaatgtgcccaaattaccaatgtacttttgctttgcaagtgcatacaatccatttgaaatatgcatatatttgtgtatgtgtatatatatgtgtatatatatacacatatacacacgtacacacatattttgaaatatatttcagaagatgtataaatataatttacatacaaatataatctatatatttcaaaatatatatttagaatgattttcaaataatctacagaaaatattttaattgtaaatttcagtatgataacatacaatgtctgtattattaacaaataagtacacaactaaataaaaatgttacacttttaatatagctataatttccgcaagaatttgaactaatgacataatacctatgacacatctcactaacagattgaacaataaaagaattaaattattgtcaaaataatgagattcaagtaatttaaatgtcaaaactttaaaaaatatttactttaaaaatcagatactttttaaattaaattttattttttgagcgacataagaattgaacatatttgggagatacataataatgtttcaatacatataatttatagtggtcagatcagagaaattagagtatccatggtttcaaatatttatcatttctttttgttggggacaaaatctccttttagctatttgaaactaaatggaatataatgttcttaactatagtcgtcctacagtggtatagaacaccagaaattattcctcctaccaagctgtaactttgtatcctttaacaaatctctctctagtctccctttgctgcagctttcccagcctgtagtatcctctgttttattttttacttctatgatatcaatttttttagcttccacatataagtaataacatgcaatgtttaactttctgttcctggcttgtttcacttaacatatgccctccaattccatccatgttgtcctgaatgacaggaattcagtttttatggctgcatagtattctattgtgtatatataccacattttctttatccattcatctgttgttggacacctaggttgctcctatatcttggctattgtgaatagtgctgcagtaaacatagggttcaaatgtctctttaatatacagatttcctttttccagtaatggtattgctggatcatatgatagttctatttgtaatttttgaagaaagtccatgttgttctccacatggctgctctagtttacattcccaccagcagtgtctaagagttcttttttttttcccgcatcttcaccaatatgttatttttattttattttgagacagtctcactctgtcacccaggctggagtgccttggtttaatcatggctctctgtagccttgaacgcctgagctggagcaacctcgagtagctgggactacctactggcatgtgccaccacgcccagctaatttttactttttaaaatttttttgtagagacagagtctcaatatgctttttagagacagagtctcaatatgttgcccagatctcaaacttctgaactcaagcaattcccctgccttggcctgtcaaagtgttaggattacagatatgaaccaccacggctgtcatattttttgtctttttgaaaatagtcaccttaattaggatgagatgatatctcattgtggttttgatttgcatttctgtatgaatagttaatgttgagcattttaaaaatatacttattgaccatgtatatgtcttcctttgggaaatgtctgttcagatcgctttttcatttgttaatcagatttttttttttgctgtggtattttgtcttatgcaaatagtattgtgaagtattaatgaagtaagacaattttattcaaggaccaatcccatgcaaatacattcagagctgttcttagttaattgcatttataatttatactttttattaccatgtgcatttctctaaatttagtgaaattttactattttatatttttactcagtgtatatactgttgctcatgaattgttggagtataatagttaactat

SEQ ID NO: 32074 - DNA, 2300 bp, Homo sapien
gaattattcaaactttggctatgagagctctttccaattggcttctgaattcttttgactatttctttttctttttcttttttttttgagacggagtcttgctctgtcacccaggctggaatggagtggtgcgatcttggctctcagcaacctccacctcctgagttcaagtgattcttctgcctcagccttccgagtagctgggactgcaggcgctcgccaccacacccagcgaatttttgtatttttagtagagacggggtttcactatgttggccaggttggtctcgaactcctgacttgtgatgtgcccacctcggcctcccaaagggctgggattacaggcgtgacccactgcacccagccaactattcctttttttaaataaaaaaaaaaaaaatctggagaaacattatatgaatagtgtttaggtcatttcaatataatgcaataacttagcacaatatcattctgttacacattcaaattatactttttggtcattaattaatttatttaatactgtttatggatcaccagtccatattagaaactgttctaaatgctgtaaataggttaggggatatggtcagagagatgtcatagggtgctgggtgatgcagaactttgcaaacctttgcaaatatctttggctttttttttttttttaacataaaatagaaagcccctgcagtgtgttgagcagattaagttacccacttaatatagaaccaggtcactccacctactgttttaaaaatagactattgattgactagtgttggggtaggaagagcagtttggatatgcaatacaggtgagattcatgcttggattgtaactgtgaacagattgtgtagtggatctctgatggattagatgtgaggtgtgggagaaatggagaagttaaagatgattccaagtttgaagtgctgaacaaccagatgataaagttgcataatgtgtgcccacacatacgtgtaaaaagacacatatccctatcatttatatttttgaaaatataaaatattgaatgtaatgtaatataaaatattaagtgtcaacataataactgaagagtgtaaagtgaatctctagggcataatgtataataaaattaaaaatgaatacattattttagttgtttataaaagtaaagattagcctcaggtagataacaggtttcctcccctatatattttgtgtcattttatttgtatgttttcattgaaaatcacattccagaatattttcctttaatatcattttgaatcagtgataatatgttttggatttttttttcagttgtttcttcatcagatttacatatctcagaggactaggagtttttctaaaagctcttttgccaggatgtttttcagatttcatttttcattctgaggctatctgtattttctataacatagtgttgtggaaaatgtgatgctgactacagattttgtatatcagttcaacagatttccaaagatatacaatgttaaaataatgtttacttctttttccccaggttacaaaattgttctctatcaaattctaatctcatagtttgctatcttttcaatgtttatatgaagtgaagaattcatcattttatattgtgtaacagttattttaagttcgttgggatttgtaattagtactgacaaaaataaatttttcactttagaatgctttacatgcacatgcacatatatttatatataaaacatatataaacatatatatgccacttctctttaccttagacaggattttttaaatgttacatagtaatgtactaggacttttaaaaatttaactttaagatagcactttgctaatgttaaatacatctcaatgcaaatgtgtgtgtgtgtttgaagatcagtgcatccagaactcagagatgatgaaaatgttctgtctattcttgctttggaatttcagataagagtagtcatattacaaagcagagataaaaggagaaagcaagaaatcattcaattgctggtaaagtaatactctacacagcaaatcacaatagcgtgttatatatagaaataagatcagtcactgttttcaagcctgctaaataaaactgaactcttggaatggcataccatttgacctttcaaaggttctccagcagtatttaactgatgcaaaaggaacacacttgcaattttctacttttgacatgacagaccctcctcttagttcacacaatgttcaaaaggcacaagtccctcgcttcggaacgcaagagagcattactttcccaaagagctacacggttcata

SEQ ID NO: 32075 - DNA, 2300 bp, Homo sapien
gtgtgtgtgtgtgtgtgtgtgtgtatgatttgtgtttcaatatacgtatttcaaagtgtcattcatccaaatatctacctcttttgtgctagctacttagggccattcactttcatttttatttttctactaaataattgcagaatatcatgagggtatctatgtgatggaccttccatatcacctttttctcattcgctggttgacattaataattaacatgattattttccttgctaattatctcatattgtttcaccttctctcttcccaaaagaatataaggcagctttaaacaattgaccagaaatatatgcaaattgaaacccattgtcgatctccaataattgtgttctataatgataggttaagctatttagtccatatcacttatagtaattcatggctaatacgtgtttaaggattattcttgtcatactgtattatgtatctaaatgtacttttctacttcagaacgtacagtgaagtgaaatataattgtgcaaaagaagctgtcaaaaatacaaataagagagaactattaaaccaaaaaaacatagagacatgattccaaattctaagtttatgaaaagacttgggggatgataccttatttatctatcaagaaacatttgaaaaatatttgaataaagtataacaaaaataagaataaccagttatttctatcattcatgatatttcaaataaatgttgtttcactgtcccctttctagaagcatgggccttaatgatttgcagaaggacaggtgtccagatggcctttgctgacccagttcttctcctccttggttacaattatcagacattccaagaggaacattctgagataaagaggaaatatgtgatacagcccagtttgtgtcctcatttctcccagcatatgatgttctacagtgcttcagcacagtgactcagctggggactagggtataaaacccagagcaaagtgcttttggagtccctcagcagcagagttacatggagcacatggtgatgagactccatctgccctgggcagttgtactgaaccttggagaactaactcactgtagacccaaggcttctgtgtatacctgctgcctatgtatgacttcgcctgacttatgagagtgttctttctgaccataccatacctaagaacctttgctatgttccttttggtaatgtatttatttgcttaccgcctccttcacaaaaaaagtttctaggcatcaactatatgccacacaggtttcaggtactagctgtttaacggtgagcaagatgacaatagcccctgcttttatggagattacggtcagtcaggaagcaaataaactaaaatgcataaatgctgtgacaggatagataatacaggtgaatacaataggacatatcttaacctagaagggcaaataaggcatcctgaaagaagtagccattaagttatgccagaaagatacctgagaattatctagactaaaaatagaaatgggaaatatttcaagaagaggtattagcatataagtcttggaggccaagaagaattagttggattcaagaaattaaaaggtaagtgagtattgctggagattaaagtggaggggtgaagtgacaagaggtgaatgtggatacatgggcaggagatagtgaagaagggtcctgaaaatataatgaaaagtttgaacattataccaaacacaacttgaaagccctgacgtgattcacttttcatgttagaggagccactcaccatcattgttgtagactatattggatagttgaaaaccggagggaggcaaaacaagcagatgatgggaaaaggtcgaagcaagaggcgatagtgacctaaactcaaatgatcgtggtggagatagagaaaagacgggggttccctgtgtggacaggtcatggtgcaattatcagagtcagagattgctgtgagaggaggaagtttgtggagttagatgggcatagagtagaacatgagctagttcagttttggatgtgttgagattttgatagggccaaccaacaaatatattaggctggaagtttgaaaaacaaaatgtatctgtactttctctttctctctacagagaaatcatgggaaaaactgcccatttctgttttgtccactttgctttgggaagtgagagctatagtcattatcaccacatcccctggcatccaattccgtaagtactgtgaattccactggctcttaattcttgaaacttttggtgaactacagattttctggtctgtgaccaaggctgtataccagagaggaaagtctg

SEQ ID NO: 32076 - DNA, 2300 bp, Homo sapien
agctatttgtagcttctccttctcttgccttccccatccctgctctcttgcattgtctgtctctctgtctcccttttcttccttttatttcttttgtttaagaaagcatgtggttattaataggtaatatgaatcagaaatagatttgtataattaaattattgctattgtttcattcaggttttcaaaccaagtaaacataaaaatacaatggcttggaggagccaagatggccgaataggaacagctccggtctacagctcccagcgtgagcgacgcggaagacgggtgatttctgcatttccatctgaggtaccgggttcatctcactagggagtgccagacagtgggcacaggacagtgggtgcgcacaccgtgcgcgagctgaagcagggtgaggcattgcctcacctgggaagcgcaaggggtcagggagttccctttccgagtcaaagaaaggggtgacagacgcacctggaaaatcgggtcactcccacccgaatattgggcttttcagaccggcttaaaaaacggcgcaccacgagactatatcccacacctggctcggagggtcctacgcccacggaatctcgctgattgctagcacagcagtctgagatcaaactgcaaggcagcagccaggctgggggaggggcgcccgccattgcccaggctagcttaggtaaacaaagcagccagaaagctcaaactgggtggagcccaccacagctcaaggaggcctgcctgcctctgtaggctccacctctgggggcagggcacagacaaacaaaaagacagcagtaacctctgcagacttaaatgtccctgtctgacagctttgaagagagcagtggttctcccagcatgcagctggagatctgagaacgggcagactgcctcctcaagtgggtccctgacccctgacccctgagcagcctaactgggaggcaccccccagcaggggcacactgacacctcacacggcagggtattccaacagacctgcagctgagagtcctgtttgttagaaggaaaactaacaaacagaaaggacatccacaccgaaaacccatctgtacatcaccatcatcaaagaccaaaagtagataaaaccacaaagatggggaaaaaacagaacagaaaaactggaaactctaaaacgcagagcgcctctcctcctccaaaggaacgcagttcctcaccagcaacagaacaaagctggatggagaatgactttgacgagctgagagaagaaggcttcagatgatcaaattactctgagctacgggaggacattcaaaccaaaggcaaagaagttgaaaactttgaaaaaaatttagaagaatgtataactagaataaccaatacagagaagtgcttaaaggagctgatggagctgaaaaccaaggctcgagaagtacatgaagaatgcagaagcctcaggagccgatgcgatcaactggaagaaagggtatcagcgatggaagatgaaatgaatgaaatgaagcgagaagggaagtttagagaaaaaagaataaaaagaaatgagcaaagcctccaagaaatatgggactatgtgaaaagaccaaatctacgtctgattggtgtacccgaaagtgatgcggagaatggaatcaagttggaaaacactctgcaggacattatccaggagaacttccccaatctagcaaggcaggccaacgttcagattcaggaaatacagagaatgccacaaagatactcctcgagaagagcaactccaagacacataattgtcagattcaccaaagttgaaatgaagtaaaaaatgttaagggcagccagagagaaaggtcaggttaccctcaaagggaagcccatcagactaatagcggatctctcggcagaaaccctacaagccagaagagagtgggggccaatattcaacattcttaaagaaaagaattttcaacccagaatttcatatctagccaaactaagcttcataagtgaaggagaaataaaatactttacagacaagcaaatgctgagagattttgtcaccaccaggcctgccctaaaagagctcctgaaggaagccctaaacatggaaaggaagaaccggtaccagccgctgcaaaatcatgccaaaatgtaaagaccatcgaggctaggaagaaactgcatcaactaacgagcaaaatcaccagctaacatcataatgacaggatcaaattcacacataacaatattaactttaaatgtaaatggactaaattctccaattaaaagacacagactggcaagttggataaaaagtc

SEQ ID NO: 32077 - DNA, 2300 bp, Homo sapien
cttcaaattcaaacgaggatgcccctttcggtggaataagacagttaataaaagagcctcctccaaagctgttataatcctccagacgtctaacagaatgaatttaacataaggtgttaataaaaggtctacgactctcaaaaacattttttcaactttatcagaaagggaaaatacccaattgtttggcttaagcatgagagatagctatatatatgtatatagataaatgcagataaatacacataagcctttaattagcgtttaaaaaataaacttagaggttaaagagaaagttcatgggatgagggcaggggagcctctatctgccctgctttcacacccttcctttagagctggcattgctgggatatcagctcagcgccttctcctacagcggagactgaacccatgcaagtcacgaggacacacacgactccaccactgctgcttcatctttccggtctagtgtcccgtgcccaggagtggaaggaatttctgcaaggttttgagcctcacgcgtcgcatccacagccccaaaccgaaacctcaccattctagccaaagtgggtaggtttttctatgttttcatggtggagctgacagatctggatctgagatactgttcccgcccctccgcgagtaatgcgcccttgggctgagacccgagctcagtccgggtgtgggagaggagcaagcgctgctggaggggacccaaaggcagaggtctcaggtccaagaggcaggcggacagaggggctgagcactgttccgggagcacgaagagcgacacaggtgttgctcccgcgccagctctactctcccagaaaaaggcagggacagtattctgggtctggagcacaggattgggggtagggagggggactgggtactcctggatcaggtgctggccagagcaggtcttttccgtctttaagacatgcccaggtgggttttagcggcaacttcctagcagcgacactccccctcacccctcctgccgcggcatcccaccttctcgccttcttccaccttggcttgagtgtgacaatgaactcccccaagaagaagggcacccaactgtgtggggcgccttctgtccttcgctatacccctcccacgagaaataaaagctcctgccacccaccccagaatagcagctggtgatgccctaaataacagctcccagcaggcactttccccaaaaataaaagcatccagccacccccacaacgtttcccatcactggcctcaaataacggtttctaaaagccccactgctccagagatccttgtcactgagcttccaacagttcccactccttcaagcccgaaatgtcacttccccacgcgccttaagtgaggcccagccgcacccatccccctggaacgggcctccattccccaaaggaggcctcgacctcctttcccccaaggttttccaccttcccagccccccaaccagcctctgtccacacgcatgttccttgcccagcactccgcagctaacgtcaaacaatgcaaccaaaaaccgcagaggggagcgaaaaggccagtggaaggggacgacaaataccaatttgagatgagactgcgatttagtctgcagcagcagcgtccagcgcgctgagacctgaactcccaggccccgcctagcccctccgccccaggtcgccacggtccccacccccatctccctaccttcgttgctggggctggccaggagggtccggagtgcggcgcacaggagaaggcacgtccagaggggagcccgtcgaggtgcagagtagcagccggccagggacgctggggtgatgggggtgtcgccgccgccgcttgggggccgccggcgtcccgcaccccggggccccgagccccgcatcttctccgagcctcctccggtgccgctgtcccgagcggctcagtccaccgcttcggcctcgcagagcggcgaagggagactcgggagtcctccttgtccccccttggggtcctacgccttctggcacgcggctcctccaaatgtaggaaccacggatccggctgagacagctgaagtttgcttctggctcctctcgcctccccctttggtggggttaaatgaaatattagttctggttgctagtgcagatctggactcggatcaagggtgtcgagagggtcctgggtcctgttcctttgcctttcaaaaagactttttacggattgagaatttttaaataccactaggggaaaggtgaaggttctttgcagccttcagtgttgaaatggacgaaggtaaggaaggcaaatcattttaa

SEQ ID NO: 32078 - DNA, 2300 bp, Homo sapien
tggtgagctgactcacctttattaggtgtgaacggaagcccaagctttacagtggttactatacatgaaattaaatgagatatctttcttctataatcagacctttctgtaagtgctttctctgcagccttttgtttttaaatgcctgtgtactaaaattgtccttcaaatgtatctctttgaaagaatgaataaatcgagggaatatactaaagcaagaaaagacataatagaggtgaagcatagaaagttgattgttttaactgttttttttttcactgtttgtaaatctcccaatgctatagggcacaatcaattaaaataattaatttttcaaaaccctgaatttatttgaccgaggctaatttcactggaatgtatgtcgtgtatctgcatatcgtccaatttctaaaatactaaaacattttatcaatgaaataaatgaattaaatcgccacctatgaaagtacctggcacactacaaatctcaatagtcaaattctttgactccttgaaatctcaaacagagctaccgcctctttatttactctacaatttacttctgaagaaaacattgagtaattatcctattccagccatcaaagtatgggaagaacagaaagagtcagcagcggtaagcggtatgggtgtttaagaaactagccacggaccagcagagcctgcgaatgcgcggcgatgtgacgacaaggttgttgatgccacagcctgtgagggacagcaggcaagatgccaaacggagggacccgcgtctctaagggccgccggctgagctggggctgatctcccttccgcctcccgggaaccccagtcctcgccagcgtcgtcaggattccttgccctaattatcccgggaggaagacgcgcctttcccggagaccgctaggcaacactcaccaaggcagcctccagattacttccctccgtgggtgtgtgacttcgtcgaagcaactcacacttacagtagattctcactggcgaggctgcgagcagcagagggcgggggagctgggaagaggaggagggaaggagggtgggaggcgctgagctgggaggcagaggagacgccggagctccagacacagcaggagcgcgccttggcggtgcagtttcaacctcgacttcgcagccgcgcacacaccgcctgctccccgagcagcgggaaccgcagcagctcctgggccgccgcagcgcagctccgcgctcctaccggccggcagccgtcagtccctcccctcttcagcactcagcccgcagctatttccttctgccagtctctttgaactctggatctttgcttttgctcgctgctctcctgtttttcattctccacattttctcaagtcctctttctttatccttagccaccctgcttttttcctccttttttaaaaaatcggagatttcgtcttaaaatgatttgccttccttaccttcgtccatttcaacactgaaggctgcaaagaaccttcacctttcccctagtggtatttaaaaattctcaatccgtaaaaagtctttttgaaaggcaaaggaacaggacccaggaccctctcgacacccttgatccgagtccagatctgcactagcaaccagaactaatatttcatttaaccccaccaaagggggaggcgagaggagccagaagcaaacttcagctgtctcagccggatccgtggttcctacatttggaggagccgcgtgccagaaggcgtaggaccccaaggggggacaaggaggactcccgagtctcccttcgccgctctgcgaggccgaagcggtggactgagccgctcgggacagcggcaccggaggaggctcggagaagatgcggggctcggggccccggggtgcgggacgccggcggcccccaagcggcggcggcgacacccccatcaccccagcgtccctggccggctgctactctgcacctcgacgggctcccctctggacgtgccttctcctgtgcgccgcactccggaccctcctggccagccccagcaacgaaggtagggagatgggggtggggaccgtggcgacctggggcggaggggctaggcggggcctgggagttcaggtctcagcgcgctggacgctgctgctgcagactaaatcgcagtctcatctcaaattggtatttgtcgtccccttccactggccttttcgctcccctctgcggtttttggttgcattgtttgacgttagctgcggagtgctgggcaaggaacatgcgtgtggacagaggctggttggggggctgggaaggtggaaaaccttggggg

SEQ ID NO: 32079 - DNA, 2300 bp, Homo sapien
tccatctcacccgtgaggctttttgccaaactgagaaactgattcactgctcttcctctaaatttgcttcatccattcggagcacattataataaaaagaacctgctttcagacttctggtgccaaaacatttcaggaaaaaaagaaatcaaagatgagctttcacctctttacaaaattgcatcactgctgctttattctttcatctttattgcaaatatttaaacaaaaaacaaatgtcaccagctaaagatagtgaggaatttattgtggagacaaacaaggctctagatatgtcaaaactggtgagctgactcacctttattaggtgtgaacggaagcccaagctttacagtggttactatacatgaaattaaatgagatatctttcttctataatcagacctttctgtaagtgctttctctgcagccttttgtttttaaatgcctgtgtactaaaattgtccttcaaatgtatctctttgaaagaatgaataaatcgagggaatatactaaagcaagaaaagacataatagaggtgaagcatagaaagttgattgttttaactgttttttttttcactgtttgtaaatctcccaatgctatagggcacaatcaattaaaataattaatttttcaaaaccctgaatttatttgaccgaggctaatttcactggaatgtatgtcgtgtatctgcatatcgtccaatttctaaaatactaaaacattttatcaatgaaataaatgaattaaatcgccacctatgaaagtacctggcacactacaaatctcaatagtcaaattctttgactccttgaaatctcaaacagagctaccgcctctttatttactctacaatttacttctgaagaaaacattgagtaattatcctattccagccatcaaagtatgggaagaacagaaagagtcagcagcggtaagcggtatgggtgtttaagaaactagccacggaccagcagagcctgcgaatgcgcggcgatgtgacgacaaggttgttgatgccacagcctgtgagggacagcaggcaagatgccaaacggagggacccgcgtctctaagggccgccggctgagctggggctgatctcccttccgcctcccgggaaccccagtcctcgccagcgtcgtcaggattccttgccctaattatcccgggaggaagacgcgcctttcccggagaccgctaggcaacactcaccaaggcagcctccagattacttccctccgtgggtgtgtgacttcgtcgaagcaactcacacttacagtagattctcactggcgaggctgcgagcagcagagggcgggggagctgggaagaggaggagggaaggagggtgggaggcgctgagctgggaggcagaggagacgccggagctccagacacagcaggagcgcgccttggcggtgcagtttcaacctcgacttcgcagccgcgcacacaccgcctgctccccgagcagcgggaaccgcagcagctcctgggccgccgcagcgcagctccgcgctcctaccggccggcagccgtcagtccctcccctcttcagcactcagcccgcagctatttccttctgccagtctctttgaactctggatctttgcttttgctcgctgctctcctgtttttcattctccacattttctcaagtcctctttctttatccttagccaccctgcttttttcctccttttttaaaaaatcggagatttcgtcttaaaatgatttgccttccttaccttcgtccatttcaacactgaaggctgcaaagaaccttcacctttcccctagtggtatttaaaaattctcaatccgtaaaaagtctttttgaaaggcaaaggaacaggacccaggaccctctcgacacccttgatccgagtccagatctgcactagcaaccagaactaatatttcatttaaccccaccaaagggggaggcgagaggagccagaagcaaacttcagctgtctcagccggatccgtggttcctacatttggaggagccgcgtgccagaaggcgtaggaccccaaggggggacaaggaggactcccgagtctcccttcgccgctctgcgaggccgaagcggtggactgagccgctcgggacagcggcaccggaggaggctcggagaagatgcggggctcggggccccggggtgcgggacgccggcggcccccaagcggcggcggcgacacccccatcaccccagcgtccctggccggctgctactctgcacctcgacgggctcccctctggacgtgccttctcctgtgcgccgcactcc

SEQ ID NO: 32080 - DNA, 2300 bp, Homo sapien
ttcagaaaatattggcattgtgttgatttatgtaaagctatgagtactttgaggaggagaacgaagtaacttttttgttgagaaaagaagaatttaatcttgagtgcctggctctcctaggacactgggtatgatttagatgacagtagtgtgtgtgtgtgtgtgtgtgtgtgtgtgtgtgtgtgttgtggtggggtgaggtggggggcggataaatatttccagaggtgggatttctttagaatggaatgacaggtagaaaaatcagagaggcatgaggtaatttaggggaaaaatgagtttaacattgtagtatagaataaaaaatatatttaaaccatttgtagtagaaggctttaaattctaggctgaaaaatttggttattttgtggccaatagtaaataattggagatagatgaacagggtagtcacatagacatgcaaccaacggaagggaagaaggcttgaagattgtcttctccaaattcctcattttactgatgaggatactgaagcctgtagaagtaaaggaacgagctcaaagccccattaaactcatattagttttactacatatttctgggctttagatatcgtagttggtattctgcttaaatatttttaagtaactcaattataattgtaggggagaggggagcttacattttgaatggtcctcaaatagaaacataaattttaactttccatctcacccgtgaggctttttgccaaactgagaaactgattcactgctcttcctctaaatttgcttcatccattcggagcacattataataaaaagaacctgctttcagacttctggtgccaaaacatttcaggaaaaaaagaaatcaaagatgagctttcacctctttacaaaattgcatcactgctgctttattctttcatctttattgcaaatatttaaacaaaaaacaaatgtcaccagctaaagatagtgaggaatttattgtggagacaaacaaggctctagatatgtcaaaactggtgagctgactcacctttattaggtgtgaacggaagcccaagctttacagtggttactatacatgaaattaaatgagatatctttcttctataatcagacctttctgtaagtgctttctctgcagccttttgtttttaaatgcctgtgtactaaaattgtccttcaaatgtatctctttgaaagaatgaataaatcgagggaatatactaaagcaagaaaagacataatagaggtgaagcatagaaagttgattgttttaactgttttttttttcactgtttgtaaatctcccaatgctatagggcacaatcaattaaaataattaatttttcaaaaccctgaatttatttgaccgaggctaatttcactggaatgtatgtcgtgtatctgcatatcgtccaatttctaaaatactaaaacattttatcaatgaaataaatgaattaaatcgccacctatgaaagtacctggcacactacaaatctcaatagtcaaattctttgactccttgaaatctcaaacagagctaccgcctctttatttactctacaatttacttctgaagaaaacattgagtaattatcctattccagccatcaaagtatgggaagaacagaaagagtcagcagcggtaagcggtatgggtgtttaagaaactagccacggaccagcagagcctgcgaatgcgcggcgatgtgacgacaaggttgttgatgccacagcctgtgagggacagcaggcaagatgccaaacggagggacccgcgtctctaagggccgccggctgagctggggctgatctcccttccgcctcccgggaaccccagtcctcgccagcgtcgtcaggattccttgccctaattatcccgggaggaagacgcgcctttcccggagaccgctaggcaacactcaccaaggcagcctccagattacttccctccgtgggtgtgtgacttcgtcgaagcaactcacacttacagtagattctcactggcgaggctgcgagcagcagagggcgggggagctgggaagaggaggagggaaggagggtgggaggcgctgagctgggaggcagaggagacgccggagctccagacacagcaggagcgcgccttggcggtgcagtttcaacctcgacttcgcagccgcgcacacaccgcctgctccccgagcagcgggaaccgcagcagctcctgggccgccgcagcgcagctccgcgctcctaccggccggcagccgtcagtccctcccctcttcagcactcagcccgcagctatttccttctgccagt

SEQ ID NO: 32081 - DNA, 2300 bp, Homo sapien
tgatccacccacctcagcctcccaaagtgttgggattacaggtgtgagccactgtgcccagcttaagtgtagcctttctttgtctaaactgaaagcccatatggttcagcaaaggctctccattctgcttggtcagagccacgtctgatttttgccacctctgtactctgttcagctcataggcttctgtcatgtctcagaattttgctctgcacatttgcagcctactgttcagccaactgttcagccaacttctagggctataatggctgatacagtagtcacaagttgtagctatttaaaattaatttaaaatattgtttcttacttgcatttgccacatttcaagtgcttagtagcacatggtactggtggctaccacattagatgtcacagatacaagttgcagaaagttctgttcttgggcacctcgtgcagatttctggagctctttttcagtggagtttccacttctgtaccctgcatcacaattcagttttctcaacagccctaaattgtgatctttctgtgcccattaagaccactgttctttttgagcttaactctctgtgtccagttttggagagtgcccccaggcataaaactgggtgactatggagttaatttcatgtctttaaagaatcacagtcctgcctactttgtcaggcagccctcatgctcatgaagggtcttaaagaaagagacttctacccgggcatggtggctcatgcctgtaatcccaacactttgggaggctaagtcgggtggatcatgaggtcaggagttcgagaccagcctggctaacatggtgaaaccccgtctctactaaaatacaaaagttagccgggcatgatggcaggtgcctgtaatcccagctactcagaggctgaggcaggagaattgcttgaacctgggagatgatggttgcagtgagccaagatcacgcaactgcactccaggctgggcagccgagcaagactctgactcaaaaaaagaaaacaaaagaatcaccgtccttcacttttgtccaatgtctgcatagagttaccttttatctttttctattttaaagtttgttggaggagggcaaatttgatacccattaatccatcgtgggcatcacccatgagagtttttttaatgatttttctaatttttattgttggataggattccacagtttgttgtccatttacttaccacatggatgcatgtgtctttaatttcttccaatggttacttacatctatgtaactacaatgcagaaaacaggaatttggcaaggatacaatgcatgtgtatagttctatttcatcatatgtgtgaatttgtgtaactactgcaatcaacatagaactgtttcatcatcactaatttgttcttcatctctgtaatattgtcacttatatattgttgtagcaatggaataatatagtgtatgacctttggtttttctcactcagcataaagcccttaagatcatccaagcagttatacctatcaatagctcatttcttttttattgctaagtggtattctctagtatggatgactgtaccacaaataaagatgaagtgaacacttcctacaggtttttgtgtaaatttaagttcttgtttctccggagtaatgcccatatgggaagcatacatttaattttttaggaaactgttttccagattggctgtaccattttacattcccacaatcaatttatgagacacagtggtctcataaaccccttatctgtggtttcactttccttgaatgcaattaacccacagttaatcgtggtccaaaaatgttaaatggaaaattccagaaataatccataagtttcaaattgtgtgctgttccaaatagcataatgaaatcccatgccctcccgcctgggacatgaatcctccttttgtccaacatatttatactatagactacctgcccgttagtcattaatattttctgctcttgactttcaaccattgataccaccatggttctgtgatccaggatcacctgaagcagtttatcctcctgacaatagtagcctaacgctatgtcacaatgcctgtgtcattcacctcacttcatcccatcagcataggccttttatcacgtcatcacaaaaagacgggtaagtgcagtacaagaaagtattttcacaaaacttttattatagcacattataatttttctgtttcattgttaactcatactttgtctaatttataaattaaaccattatatgtatgccaacaaaaaaatctaaagatatctatatctatagatatatatagggt

SEQ ID NO: 32082 - DNA, 2300 bp, Homo sapien
atgtacctaaaaccataagtaacgaaaagttttttttacttctctttcaagccaaatttctggatactttatgttcccatatacacatctaattatgtatatgttaatacttccatatactgatatgtaaatacacacatgcacacacaccccttaactaggtaagtagttgtgaaagaaaacttcaagattgtcctagcagttcataagaagtaatctttgatgtattttggggggagatttataacgacaaacttgggtttttaaataaatattactccccccattaattagcaatcctattttaggatactaaaaccatggtgggctattaagtactacaacaagtacatatggaagtaaaacgtttctctggaaactgtggagtctccacaactgtttttataagagtactgctctattttctttagaacagttaatcctcaacgccctctgtggcctgctttctgcagcagcacaagccattgcattccaaatttctcaaaataagtgtgggacttagtttccagtggaagcaggaggatataattttacatgtgggactttacatctataatcgtgcttgctaaaatttcttacccagaggcaaagagtgtagtgattaagagctcagttgtggagtgagaattcttgggataataacccatcctaccatttagtggtgatgtgatcttgggtaagacacttagctctctgtgtttcagtgcccttgtttataaaacaggaatattaattgttctcttcaatgcatgcaaagcatttcagaactgggcatagagtatgcagtcaataaatgttagtgtttatcattatctattccaaatgtgacagcaccaaattataagttggactgattggcaaaactgccaaacatagtaaaaaactctccataatgattccaatagctttattattgaattcttactatgttccaaacattgtgcttagatcttaacaggaattattcaattacaacatctcaaccactttaatagtattctcattttgcagacaagagaattaaggaacagataacttagttgcccataatggcagaattaatggaatggagtgcaatccaggcctaatttcagtcagagatcatagttcctttttttctatcaaaaaaataaataaaataaaaaaattggccttcatagttgacagcatttgttaaagcactacatgttttaaaaatctattagctcaactcctgattaatgtatttattcaattagtaaactattttctgattagaattttcttgtaattttaaattaaataataaaataagatacagcttcatagaatcatacactggtcaggtgagaagtcttcagagcgtctaatttagacttccattctatcactatggaaacacccagaatggtgccgcaattttgccctccataacatagctagtcaatggctggcaggtttcaggattctgtatagaattcttttcagtgcatcatacttaaatgatagatatttacgtgggtcatttgttggcaatgcatcataaaaatatcgcccacatacttgaaaaagaatacaagccatcatcaccattattatacataattattcaattattttcagagatgatggttagatgggctgggcgtggctgacgaatctgcattagaaaaatctcttcaaaaaaagattctattaaaaaaaaagtcgtctgcaatttctacctctcatccttccaagtattacttattattccttaatagaactgttgagaagttttacattgggcacaaggagcggttcccaggatcgtgccttcctaataaaagcccagtctcgcgcctgtcccgggcgcggcgctgaggaagggaggtgggaagagcagagcggctagaggtagggcgggcgggtgggtctgcaggctggagggccgttggcctggagcatgaaggggcgagcccactaacggcttgcttcctattggacggcgcggcccgttttgcgcatgtgtctccgggttcaaacccaggcacaggccaagcgttcttgtttgttgagggcggagccaatggcgggggagtgttgttagcgcgcgccttccggatcgcagctctcgcggcagtcgcctgagacttaaggttattgcttggccgcggcctggtattccggcgattcgtttcttgctcggcttcctggagctgtggtccgtgtgggcttccacctcagacagttgcgctggctcagcggggccggaacatggctgcgtccggtctggtaagtgcaggccccccgctccaggc

SEQ ID NO: 32083 - DNA, 2300 bp, Homo sapien
ttacaacaactaacagctgccaagaaagtggattaggtcatatattcaatcaggaggttttcctgttattcaagtcactttcttagtataccgaaactaaaaaatagttatggtttttgcctcaaaaaattcagttggacttatattttattatttgaaggttgggtagcaagaagcaggtctaaacttacaaaagcaaagcagtcattttggatcttcaactccctatttctgtcttgagctgttttcattttgataatacatctgaacactcttctctaacttactgataatcagtccgtattgttctacctcactttgtagacaatttgtcatcccatatctacagctgcaggatcagtgggacccatactggtggagaaaaccatgcagtctctccattaggaaaggagaatcagactgaagactcctgacttgctttgatttctaataataggctggtctcactgggcccaggctgttctaaatctagagtagttctgaaatactgagtgtgaaataggcaatggtagaaattcttaggacccctgtaagacaaatcaaaattccttctagtattcttttctcccatcatttcctgcactgtgctacgccaaatccaatctcttaaggaccatttcctacatgcaaccattgagtgcactttggccccagtatagctttataaatctcactagataactgtgggaagtccatccatgaatcatagtatcaatggtctgcagctcagaaagcacaaaagaacaaaataaaagtttgaaaacttacagctttctctgccagatatttttttgccaaatatcttagactcctttgtgttgctgtaacagaatgccacagactggtaatttataatgaacagaaatgtatttcgctcatggttctggagtctggaagtcaaagaacatggccagcatctgatgaggaccttcatgcagcatcattccatggcagaagatagaagagcaagagaggatgatagcatgtgagaaagtgccaaacttgattttataaaaaacccacttccaggccaggtgcaatggctcacacatgtaatcccagcactttgggaggccacagcaggagaatcgcttgagcccaagagtttgagaccaacctgggcaacatagggagatactgtctatacaaaaaatgaaaaagttagctaggagtggtggcgcgtgccttgtagtcccagctacttaggaggctgatgtgtgaggattgtttgagcctgagaggtcaaggctgcagtgagctgtgattgcaccagtgtattccagcctgggcaacagagcaagaccctgcctctgaaaaaagagaaagaaacccactcccacagcattaattaattcattcattcatgagggcagaggcctcatgacttaatcaccttctaaaagtcccatttctaaacactgttgcattggggattaagtttctaacacataagttttggaggacacattcaaaacatagcactaaatattcattgggaactcatgtacttggaatatctactggcaaaaaaaaaaaaaaaagaaagaaagaaaaaagaaaaaaattccatattccgtgttcccataattgtggtttatatttagtgaagcatcaaatgagcatgagatacaactattttttttatttacacaaaacttgaccctaaaatatttaaccaacagaagtagtactaataaaattattctatgaagtaatttttaatgaagctgagtttattcaagtcatgtcttctgcaaataaaaatggacaccaataaacaaaaacaaagatagaaagaataactgtgttcttgatatctcccctaaagttcacaatctctacacctgtttctttcatcttctggtgatgttaatcttctgtttattttgcgctttaaatctaagcacatgtggattacccagagattgccctctgaaagtcagtctacacctgttctttcttacctcacaaaaagtaatggaaaaaaaagtgtgtgtgtgtgtgtgtgcgtctgtgtgtgtgtgtgtcctgttggtggtagtgttggtggttaaaaagcaatttgggacttcctctttgaacagttgccttttcctctcacagaaggaagatttcattttgtttgagacgagaaaccaaaccacacaccaaagagaggggtatgatggctaagaagcccccaaaaccagcccctcgcaggatcttccaggaaaggttaaagattactgctctacctttgtactttgaaggttttttattaatcaagcggtcaggatacc

SEQ ID NO: 32084 - DNA, 2300 bp, Homo sapien
tgaatttttcttatgtttctcagtcattaaaaaatataaaaaggaatctttgaaagttagtaaattcacattgctttttacctagtaaaatctttactgcttgctgtggaactttgtttatctggttggtataatcaggtgaccttcagatggcagtgctttcatttgaaaaagatgatgatcataatggacacatagatttcatcacagctgcatcaaatcttcgtgccaaaatgtacagcattgaaccagctgaccgtttcaaaacaaagcgcatagctggtaaaattatacctgctatagcaacaaccactgctacagtttctggcttggtaagtttattattccttgaataaaaatgctcctttttcattgcctcttccctgacttccccgtcataccaacccagtcactcagagatgttagagagggaaggataaatattggatctcataatttaaaatttcaaaatattttctgaaaatgcagtcatctgtattgtgaagtattacataaatatacatttttaaaataaaaaataagctcaagatagattatgatttttcttataggcaataatcttttcactgatctttacgtcattcatacaaagcaggtactctgtttttcttgaataaaatgaacttccctaatctttattcataatgattcagaatctttaagtgcggccctagttattataccatattacatcattactctatgtaattatctatgaagctatgtagttatttacccctgtattaagtgattttagactgttgttattttttgagttacagcatgtgctttcaaaatagggagactgtatggttgaattaatatttttttaaataactgttaacatgtatagagtaggttgaaagtttgaaagtataaaatatactaaaagtatacagacctgtaataagaaatttatattactatagtcccatagctgcttttactatccacagagaaatgcttgaaaacgtgaaagttgaatagatgcaattaaaatcacggatagttttaggctgtttatattatcagatcaccttcttttatctaggttgccttggagatgatcaaagtaactggtggctatccatttgaagcttacaaaaattgttttcttaacttagccattccaattgtagtatttacagagacaactgaagtaaggaaaactaaaatcaggtatgtatgaaagtctatttctcttgtataatgagaatgaaataaaatattttaccttttaaaagggaaaaatactagcttcacctcttttttcttctattgtgtatgtgtaaatttttgccatcacttcaagatcagctcaaacctcatcttcattaaatatttctgactaaagtagccaaagaacccttacagcactttatctgccacattatttggcattatggtttcatctgtgtctgccagatgaattagaaggtaccctggtgtctgactgtaggtcatgagatttagaagaattccacaagcttgagacaaagcagaacaattcctgggcctgtactttttagttttcagattggcaacaaccaaaaacttgaaaaaaaacctaccttaacaagggtgtgagaaagcagacactctcatacattactaatgagagtacaaaatactataatccacagtaagggatatatagcactatatttcagatacatttgcacaagtctcaaactatatatttgcaagataattattctggcattatttatcgtggccaatgattagaataaccgaagtgtccagtaatggggtactggaacatccacacagtgaaacccattttaaaaagagagagacaacactgtcttgctaaaacatactgatttataatacactggaaggatcagcaaggtactgattaaaagtggttatctatatgatgtgatgaagaaataagattatggaatattttagaagatatattatcctttatttccccacattaatttctagcctgatcacaaataatggacttctgaaagtgggttttttttgtgtgtgtgtcatcactaaaaggaagaaaatttcaatgtttctgttctgaatatttttctgtaacagaaatggaatatcatttacaatttgggatcgatggaccgtacatggaaaagaagatttcaccctcttggatttcataaatgcagtcaaagtgagatacttttgttcatttagttcattagtagctttatgtctggtttctgttttgtttttatttataattttattggaagttataattatttaccatgaatttgctt

SEQ ID NO: 32085 - DNA, 2300 bp, Homo sapien
agttcctatttcgtcctcatcacatacaggtatgttgctattctgtttcaaatttaaatcatgtattatacaaaaaagagtttccttttaataaatagaaaatagtgattgaacaatcgtgttattttattagaaactttcaaattatcaattaatggaaatgacaaaagggaaaatattaaattatttaatgcacaatattgatttttgcattgattttggaattgaaacctgagttgtgaaacaggcagtatttttttcattttgtaatcaccagggtatgttgacattcattcaattttagaaaggaagtatatagaaatatgtttctaatttgaggttttggtagcaaatttggcagtgtctttttttatctttgtcataaatcagataaaagtttagcacttagaatttttgtgctcttttgatcgtttgaccaacatccgtttttattgtaaaataatgcttgttctcaattttctccttttttatataaatcaaaatatttaagtcaggcaagaaagcattttaagtcaagcagatttgcttttactttaggaatgtttagccagacacaatagctcatgcctataatcccagcactttgggaggccaacacaggaggattgcttgaggttaggagttcccgaccagcctgggcaacctagggaaaaaccagttctaccctaaaaaaaagttttaaaaaaattaaaacaaaaagaagttttttctttattgttcaacaactcattgcaagtcttagtaaactaagcttagtaatgtcatgaacagaaagtaactaaaacagatgtcatagttaatctaattgccttgcttatccaaatataatagacaaagtaacagggtccgttgtgaactaaaatatgttgcaaagtgtatttgcttaacttggtgcattttacttagagaagaactataaagtcctgttcattcttattttactgagttctaacaaagttttgatttgtttgtacacttagaacactaataagtgaaatgtgtcagcctaagaatgtgagaagagacagaaataccgttaaaactagatgtgtgaatttaaacagaatggcctaaagatatttaatgccaaagcaaatgcagatgaacagtgacagcacctgaaataacaatcatgatttaaaaatagtcactaaatctttttaagaaaagaaagaataaattatatttagagtacagtagtaccccttacagcagtatccagttttgcttgccacagtttcagttagccatggtcaaccaggatctgaaaataggtgagtacagtgtggtacaataagatactgtattttgagagggagagaccatattcatatgccttttgttaatgtatattgttatgattgtattgttttattgttattaatctcttactatgcataatttataaattaaactttatcataggtatgtgtgtatatgaaaatacatagtatatatagggtttggtactgtctgtagttttaggcattttggggggttgtggaaggcagatgaggaactactggactgttttttataaaatggaacacaaataatttctgaaaatatttccatccagaaataataattttaaaatatgttagtaccaaagtattcaactcgcatacctctaagaacttatcttctgcagagttgatttccaatgttttactgaatgtgttctcatttttttctaggcacttaccaagtcaaacatcattactagggaaaaattgtaattggatttttaactttttttaagaactgtaaagtacttaactataagatagaaggtgtttagatttttattaataatttgtaaattatttggactaatgtgcattattaatgtagtgtgattacagtgaatgtaatttctacaagccaaaaatgaaaactggtctcattactctcattatatatgtatggactatgactgaacttacacattcttatcactctggaatatatagaaaaatcatagtcctttttttgttgtttaacatattccttctgcttatattatttgtttagaaacctaaaagctacactgctgctgatgctactctgaaaataaattctcaaataaagatagatgcacacctgaacaaagtatgtccaaccactgagaccatttacaatgatgagttctatactaaacaagatgtaattattacagcattagataatgtggaagccaggagatacgtagacaggtatgttcttgaaattcatgttcctacagaattgtctttagttttcacttctgtttcccacat

SEQ ID NO: 32086 - DNA, 2300 bp, Homo sapien
gtgtaaggtatacttaattataaattaaattgttatgaaatggcctaagatactagagtgtttttttctttatataaataagattgaacttgtttttgccattttacagtttatcagtgcagatgtacatggaatttggtcaaggttattttgtgatttcggtgatgaatttgaagttttagatacaacaggagaagaaccaaaagaaattttcatttcaaacataacgcaagtatgattatattaatgaacttttaaaataaattttgttaaagttgatgtgaatgctgttttcagaaaggtggtatcagcaaagtattgcagtgtgcaaaatttattttacagtgttttaagataatgagggaatatgtagctaatttcttgactgcattgtattaaaactggaacattattgttaaaaatattctggattttctctaacaaataatacttgatagggccaggcatggtggctcacgcctacaatcccagcacttttggaggctgacaggggtggatcactttagctcaggagtttgagaccaacctgggcaacatggtgaaaccccatgtctaccaaaaatacaaaaaattaaccgggcctggtggtgtgtggtcccagctactaaggaggctgagatggaaggatgacttgaacccgggaggcggaagttgcagtaagccaagatcacgctactgcactccagcctgggtgacccagtgagaccacatctcaaaaataaagaaagaaaaataataataatacttgatagagcaacatttgcttgtcataaattttaattttaattttattctatgttatctcctgtgggtcatgaattgtgattcagtgtttactgaattgtttattgtgttagatagtggatgcactaagtatgttgtaagtcacctagcctaatactctaaaaaggcacacttaaatcatattagagaaaagcatttctaatttgttatatttctaaagcattatttagaaggtgtagaaagttttgattaaccttcagattcaaaagtctaaattttctaaccgcactcttgatcatgcataagctcaatttttttttgcataaaagaactggagaaatcattatgatccccttttaatattattttacctaaataatttactttatttgtactctttgtaatcaacttacattgaagtccaaaagaagacaaaataagggaatgataatatactttaacataatagtatttgtaatttgtacttctgtctttacactttatttttaaacccagtttaatctcatggtgatggagacccagtactgtctctgtcatgccttttaggaaaaatttatcaaaaagtcaatctgtatatctttctgctcaaagagtgattattatctacctgagttattctttcaggcatattaagacttaaccttttaccttctctagttgattttagtttgtccctgagaaaaacacagagaataaattccaaaatatggtatggattcttattgcattggtgttatcttttattgaatactataggaaatatagctgataagctacacaatatttctttaaagtgttgagcaagctgtaagctaccagattcccatctttaaaatttctatcctccttctttactgttctttgatcttcagtgttaggcttttatcatttatgcccatggttttttctcacatttaaaactattaggtaacttggaatgttttttacaagttacatgaatttttgaatctattaaatatttgatcctttctgtggaatttttgaacatctcctaccaaacatagaaattatattttcagcattcatttaaaaaatagtaataatttgatcattattttgtgatagctttttaaaggcttgcttttactaacagaagaatagcttagaatttcggttttgagaattttatggtaactttgtcatttttgcttaagatttgaatttgtacacaaagaatacaaaaaagaagttcttttttaatagattactcttatttttaggcaaatcctggcattgttacttgccttgaaaatcatcctcacaaactggagacaggacaattcctaacatttcgagaaattaatggaatgacaggtttaaatggatctatacaacaaataacgggtaagtcaatgtgttttattaattcatttatacttattcagcaaatttatagttcagacactaagtgttgggaacagaatgtcaactcagagagacatgatccaaagcccttggcctcaaaatattcgatccaagtgaagacattgtta

SEQ ID NO: 32087 - DNA, 2300 bp, Homo sapien
tggagcatttggagctgaaccactgtgagagctgagatcaatatactggcagaagtggaggccattcctagttctgagaagctctagttgtcaattaaaagattctaaaaacaatgcgatggcatcaaattcaggcttggaatccaactttctagtcctagcattgataaataagccaaagaatttgtaaacaaaggtaattaaaatgttatcatttatctcaccaaacactggcacatatcaaatgataccagcttctagctaattaaacggatagctattaaaaaaactgattccaattaccaaggcaaatcagaagatagctgtgttctaagagatcacctacctaataaaaaacacacacatacacaatataccctgtttgggcattgtaacaaaatataaaaattaacaaaatttgtttcttttctttttttttgagacagggtctctctctgtcacccagactggagtgcagtggcacgatctcggctcactgcagcctcgatctctctagactcaagcgatcctctcatcttagcctcccgagtagctgggactacaggcgtgcatcacctacgcccagctaatttttttgtattttgtagagacgcggtttcgccatgttgcccaggctagtctaagaactcctgagctcaagcgacccgcctgcttcgacctcccaaagcgctgggattgcaagcgtttgagccactgcgcccggccaaagttttttattatctactttcctatcattttatccctagtacactttcacttgctgttttccttgcatggcgggggcaataggcctggtgggtaaatctgaataaaaacgagaacagctgcagtctaactagctctgccacttaatggcgtgactggcccttttcagaaagttgtgcctcactggaatgtttcaaaaatatgtaaaaataatatgatctataagacaatcaaaaacgcttcaaataaggcgcgggttatattacataatatccctccactctggcagtgttggcaatggcagacaacaccatgaaactgaaagcatcccttcagtctgaaactggcgaaaaggctacaggtttacaaagtctcacatcagctgaaaataatacatccatcaattctatctttggcatggtgtattctgacagtggtggatagaatgtaaccacttgctttattaattatgagatgattgaaagaggaactactaaccaagaaattggtaaaggcctagcacaaatattttccccctaattttacaggggcgggaaagacctgaagaacttcaaaaccaagtgggaaataagaatgggtaacttgtgtatttttttttcctggctttttttttttccttcttccgaagtcaacaaaggcctcagggtgtccagattgctactgattcattcttaccaagttccttctggtaatagttttcaaaagaggatctcagtggaggtgcacagtggcgctcctagctttctttttacggaaaggaggaaaggtgcttggcaccagtcggggaagctcacgccaagtgaccgagaccagaactcgctctcgaccggagccccccaagtctggtgacttggaggaaggaggatcccgaatcccagccagaactgagaaagccctcaaaggtgcggaaaggggacttttccctcaggaaagccggcaacagcagaggccctagcccacgtcgccacacccactccgcgcgcgcccctcgcctcccagggccggctctgctcggccccgcggcctctcgggcgcccccagcccgccggaaagaaagaagcagaaacccggagcctgggtcccacccgcgacccctcaccttcgcccttctcgtcctctcacctgccagtcccccaggaagaacaggacgcctcttccccctgatgggcggccacaggctcggatccttccattgccgcctgagacaccgccgccggctactggaaggtaggaaggggcgggaccgtgggggggtcaaggggcgggcggagacgtcatcagagggggcgggcctggggaagctaggagcccggcagcgccttcccgtcaaccctaggggcgtcctggtttccggtttgggtgtggccgcatggcgtgctgtggtgcaggtggccgaagggggcgttactgttgcgactggcatccgcatccggcagatgtagatggaaccaaagtccagaagttacgcgtcacccttgctctacagccaaacatgcaggactctagtaacccgcgaaatgatgggatagcgttgcaaatccttaaaagagtct

SEQ ID NO: 32088 - DNA, 2300 bp, Homo sapien
caacaaaaaaagcatcaagttcaaatccatgcagttattatgtgaagagaataaggaatataacatcatcatcaaagataataaaaacatgcctgaaagatgcactacaaaacaatttattattttgaaactagctaaatgacattagagaaatgataaaagatatggaagaacttgattctgaattagaaaaacctcagaaatgaggtgacagaactcaggagaattagtaataaagaataaactacaagaaacacaaaagctaataaatgcaacagattatgatttgctgtaaagaaaccgagtcaatccttagatcaatgtttctgtaataattctgattgtcagacactttctccaattaattattaaggaggggctcatgaaaacactagtctcaccaaattgatatatcaattgttgataacagtttgtaccttttgtatattagttttgctgaatgtaaaatctttggcctacatatttttcccttaagtttcctcaatatgtcattctactttcttatgacataaagcctcactgtcaaaaagctgtgatcgcctagttttctttcccattttacatatgtgacaaaacattaaaatctgttaaatctggttgcttgttacatgcctgaaataattcacaccatattttatcaaatctaacatgccctcaattttaagatgcatcgttttctgtatttattttttaaaaattcatcctctattcatggatgttaaaatatgaagaagcgtgggtaatggcaggccattgttttggcctagccttctacactaggccccatcagatcaaaccagaatggagttgcttgtgctaagcaccatgtaattaaagtggattttgaaaaaatgagccagttttttttaaaaaaacaggagattctagttaacctagtgggcataataaggaagtatgctctgttttaacctttacaaggaaagaaactttgaaataatctgatttttgttctgtttctgctttcttcaatctttttcattatcttcagtcctgtagcattatcttagtgctagagcagagccttgaaagaatagaacacagatcaagaacattttaatgtggaaaaggttcacaactggattgaggaacacggataatgctataggtgagcaacataaagcttccaggtattttaagatgtgcaattttgaagagaatagagggcacgaaggataatacagttttgcctggaccctcatctccatatgagaggaaaaatttctaattaaaaatatgatacatcacagaaaattacataatacccaaagtatatgctaattttaaaaatcctgcagatgtttattcaaatatacagtgttatttagtgaaagacaaatcctaatgttattgtgtccaactcatttttgctttctaagaaaggtgacacggaagtaaatgaaaaagaattatatgagaactttttagatatgtgttctggtaatctaacagtgactagctctataaccttgaccaagtcacttgcactgaccggaagttcctttcccttacccacaaatttaagggaccaaactggatgatctaacgacatctatggcactaaaagtcacatgattctattaaatctgaggcagcgcctcacatgtagtggactcccaaaattatttattaaatgtataacatctttaagtggtatcccctcactgacaatctggagctattagcagccttcagtttatttataaaataaagctgtttcctcttcttaccgttaagactcttttaaggatttgcaacgctatcccatcatttcgcgggttactagagtcctgcatgtttggctgtagagcaagggtgacgcgtaacttctggactttggttccatctacatctgccggatgcggatgccagtcgcaacagtaacgcccccttcggccacctgcaccacagcacgccatgcggccacacccaaaccggaaaccaggacgcccctagggttgacgggaaggcgctgccgggctcctagcttccccaggcccgccccctctgatgacgtctccgcccgccccttgacccccccacggtcccgccccttcctaccttccagtagccggcggcggtgtctcaggcggcaatggaaggatccgagcctgtggccgcccatcagggggaagaggcgtcctgttcttcctgggggactggcaggtgagaggacgagaagggcgaaggtgaggggtcgcgggtgggacccaggctccgggtttctgcttctttctttccggcgggctgggggcgcccga

SEQ ID NO: 32089 - DNA, 2300 bp, Homo sapien
tggagagattcattaccttacccttcttcatatgacttcttgtgtagtctatcaatcacagagaaaaatatccatagataagtggatcaaagcatgggtttaaaaaggcaaagagaaagaagaagtgatttactgggtctgacaacctgtttaacatttcaggatcaaaccaataccaaattcctaggacatagtagggagtccagcagacagtaaatgaagtggcaaatgcaaccgtcatttttagagtcttcagccgtgctcttggtatattgttcttggactgattcagttgtagttctgttggatagagaaaagagcaggtgtttaaagatcagttttcttacaaaaccaaagtggacaaaaaggaagacagcatcactaattcaacttaatcaatgggagaaaatttccattattttaaataataataatttgtttgaaaagcatgttttaataagagttttccactatgtcacataatgaatagaaaagtttgaagatgatagtgctcttatttctgccaaagtaatctggatttgaaatatggggtactcaaactcttaacatataaatttaaaagagtagatgaggttgagctcagttgaattctttcttaaaaaaattatttttttattttaataggtttttttggggactgatggtgtttggctatatgaataagttctttggtggtgagttctgagatctcggtggacccatcacctgagcagtgtacgctgtaccaaatgtgtagtcttttatcccttgccacccccaaccctttcccctgagtttccaaagtccagtgtatcattgttatgcctttgcatcatcatagcttagctcccacatatgaatgagaacatatgatgtttggttttctattcctgagttacttcacttagaataatagtctccaattctatccaggttgctgcaaatgccattattttgttccttttttatggctgagcagtattctatagtacatatataccacatttttttattcactcattgattgatgggcatttgggctggttctgtgtttttgcaattgcaaactgtgctgctatgaacattcctgtgcaagtatctttttcatataatgccttttttccctcctgggtagatacctagtagtgggattgctggatcaaacgatggttctacttttagttctttaaggaatctccacactgttttccatggtggttgtactagttaacattcccaccaacagtgtaaaagtgttcccttttcactgcatccctgccaacatctattattttttgattttttgattatggccattcttgcaggagtgaggtggtatcacattgtggttttgatttgcatttccctgatcattagtgatgttgagcattttcccctatgcttcttggccatttgtatatcttcttttgagaattgtctattcatgtccttagcccacttttcgatgggattgtttgttttcttcttgctgatttgtttgagttctttgtagattctgggtattagtcctttgtcagatggacagattgtgaagattttctcccactctgtgggccgtctgttaactctgctgattatttcttttgctgtgcagaagctttttagtttaatgaagtcccatctatttatctttgtttttgttgcatttggttttgggctcttggtcaggaagtctttgcctaagccagtgtcttaaagggtttttccaatgttatcttctagaatctttatggtttcaggtcttagatttcagtctttgatccatcttgagttgatttttgtgtaggatgagagatgaggatccagtttcattcttctacacatggctagccaattatcccagcaccatttgttgaataggatgtcctttccccactgtatgtttttgtttgctttgtgaattctgacttcaaaacaaaattatgttcactgagtatctctgccactaaggatagtaagtatcatatgtggatgaaagtgtactaccccaaattatctatctcaactgtgtgcttctttctatgatatctgaaataatttcacttttcatattaatacagccattaaagttcataggttacacttgtgaagaaatttgctggaaattaatggaattgctgactttttacagtcaggctgcctacctgaaattttggacttagttcttaaaggtaaaaaggtgcaattttgaagtgctcaaaatctgttcttgtatttcataatcgagaacttctgtgtcaagtaagaaatactcttcacacactatattttttttgagg

SEQ ID NO: 32090 - DNA, 2300 bp, Homo sapien
acttaaattttaaaagttccccttttactcatttcacagttgtcgtagacactatcattctttgctcaacaaagtaagtcatgttttcaaaaactaaaaaaaaaaaaattcttttttttctgatattgtgctacttccatcttctctccttacaggaaacaaaattttttcccaaatacattttcatacacattcttcttatttgaaagagctgccttcctctattattttattctcatgagtaaagaggtatgaaaaatatttcttgctcccctgggtcacttctaaaccatcatcactctttcccttcagaagttggacttgtaattcaaaaaaaaaaaaaaaaaaactggctagttaggttcaagaagatgatgggaaaaacactatgaagaaaaaaaagatactataattgaaaaccaactcaggtgatgaatcagcaggagttgctcatccttagagctgcctgggctcctgttggctttctaggtcttgtgtatcatgaaagataactccattatctaaaacagtctccctttcctgcaactaaaagggcctgttaacacggcccttcattcactaaggactatggcacctggctcatagacctttccaccccaactgctaccagaaagtagcattgcatagtagttaaagacaggagctctgaaggcagactgcatgagatgtaacacaattctgtggtgtcctaattagggaaaaggagtcaggctggtgggagcaggggaaagcaaaaagaaaaagcagataagctacaaggacacatagccctcctgtgcaaataactctcaatcttcctatgcccaactatcaccagacacctgcaagttagctcactgcaaccttggcattatcagtactgcacaaagccctcttcagcatacagcataaacactatcctataaaatctccagcaagcctttgtttctttgcagtcagcttcccttccgctgatcctgcccattgtctccctggcaacgtattttcctcccttctctaacaaatttgcctttcttttacctacaacggtaaacccttttgtccctgcacctcgggcctagatagccaccgctcccccatgacaaactctaatatggatcaggtatgtaaatgtctctgcttcaccttcctcaaccataagacgaaaataatagtactgacttctagggttgttgtaaggtctaaatgtgttaatacgtgtaacatgcttagaaaagtgctcgacacaaagtaagtacccaataaatattaactatgagtaatattatcagtattgacagcaccttcaaaatctatatagttgactcatccaacaacttagattcaacaacttagagctcctcaaatgcgtcaaacatcattcgccctctacttcctctaccgactttcatagccacaccctgcacttgagggctttatacctttcatgttgtgttgatagcaagggttttccaaatagattaacctccctgaattttgattgcccactatttcccaaatcccttcaaggcattctctgtatgctacacaatacactaagtatatataaagaaaggagtatattactccattctttatataggtaaagcctaaactccttttcttggaatataggctctccagatctgaagtctgcctaattatttacacttttgctttcacataccctttgaactttctcacattgtcttcgtgtttgcatgtgctgctccagcttctaagcatgccctccctgtcctcataccccattccccagccacttattacgctatatgctgtagtcccattcagctcggttgcaacctcttccctaatgaatcagtccatcattaacaaagaaagggagggagggagggaggaagagaggaatgaaaggaggaaaagggaaggaaggggaagggaaggggaagggaaggggaagggaagggaagggaaggaaggggaagggaaggaatgggaggaaaagggacaaataatgaatgatatgctctaatctttttcccctagatatagaagacaaagagcaaaatatacttcactaaaattggatttttacataaatgttctttcctttgttttttggttgctggtccacttacaaacacttttcatatttgtatgtctttccaatggttatcctgttttgttcatttcaggcatatggccctgatcagattaactgacatgatgtatatgcaaagccttttgagttcttcagaaaaataaattatcttattcaagactgattgcttataaggaacttattatagctaatatag

SEQ ID NO: 32091 - DNA, 2300 bp, Homo sapien
tgcagatgctatttcttctagctcaaatattatctcctccatataatttaattactctcttttttcttttctctactttgcacttacatttatttgaatgattgcttgattaatttctacctgtaaattatgtgagggcaggtcctctatattttgctcgcagttaaatctgcagcacttattatagagtggtatcattagagtaatatacatatatttgaggacatgataaattaacttcccctatagtatttatcacattgcatctcaatgacttgcttatgtttctgttttcccatataaattgagtaacttgaaaaaagagatatctattaagtatttaatgagaaattaaagtacaaactttagtatgcataacaacaaattgggaaaaggttgtaaacaaagagatttgtagggcccatgagttagagatcgtttcagcaggtctgaaaggaagcctaggaatctgcattttagaggaccacctcccaaccccaacaagtaattctgcttcttgttgtctgggtactgtactttaagaaattatggtgaaatgatatcagcctttattgtatttatcttattctcattttttaatactagcacttactgaccaggctgcagcaaattggcttattaatggtaagttttaatattattttgtaactgtaatttgccaaatcataaagagtaaaagtgcaagtcttttgtgtacttttggccaaggcagtatctatcaagttgatgtctttgttcttagttcgctcaggtggtgttgaaacaagacagtgctgatcccaagtgtcccatggagtggactttaggtttcccctttccttttagaaaaaggaagaagttgtagtggaggactacccactctgcactcaaaattgccctcatgaaaatttctttggcagctttgagaaccttttactgccctggttctaaggtggcatttctgtagacttacaaattatgtttgatgacaccgtttatgtagcttctcctaaccaccagagtagcttgctttgttgtgaattcaggttaatcacaaagtataataaaaaagaattgtcagaagtcttcccagctttgggtctataacctgaaggaaaagtcactactcttcaacatcatcctatgtactctcaggctaggatagcagaaatgcaatccctagaaaacagcaacttacttctctgaccaaaaaaatgcagttaaaaattagttcaatgtacctggtagctggcctatcttaggtacttcagtgattttacaaagtgatggtagtcctatgggtgtttttcagcttcactacgtatttaattcatgcttattgttaatgaaactgtgataagcaatttactagggtatttgtttgggagatgccacaaaggaacacatgtatctcttaatggaagcctggtcctcctttatccaggaaatttgctaggaaaaaaaagcctttaggtggttgtgctattaaaccagggcactacttaaaagccagcccagcaatagttgtgtgatttaccattaatttcttagtaatagaccacacaaaagaagaaaattatgggaatgcgagttgagaggaattgggtgatcagcctaccccagcccgtttcagctctggccagtagactattcacgagctctttgaaaacatttaaataaaccttatttagatactagaaaccctctgtcaccctcaagaatattctgtggtatagcgactcctttatgagggcatgtttggtaatacagcatcagtcttggaggtggactggattctacaaggtgaactgcagtcactaaggagtcttttggatgagaccagttttcctccaacttcaatgtgtgcatgaacctcacatcaaaatgtagctttagatttgtcccatgatgtggttccaagaatcagcacttctaataagtttccaggggatgcccatgctgcaggcccacaaaccacactgagcatagcaagactattgagaaaaaggaaatttcccaggagtctgtggcctgagctggcacatccaataatgacctatcttaacctcaactcatgaggaattccagggaactctgaagctgctcaaaatttgaagcctatatgccaactaaattcagaaatgttctccaaaatgctatctataagcaacagtagtcacaaatgcattgtagaaatatatcgatcatgctttttggaaaatccagcatgtcctgaggaagaatgtataagacataaaagtcataaattatggaaagactcttcagcttcttccaaatgt

SEQ ID NO: 32092 - DNA, 2300 bp, Homo sapien
cctgaggatctaaagatgaagagtcaacatctttaaactggtccctgttatgaacaattcctttgcctcacaaaccataatttcctgccccacctccctttctgcgttgagctcatcatgcgggaagtcactttcagactgaattcaattttccccatgcctttcccccgactcatccccacgttctgttgtgaatagtaatagggcactgggatctgcactaatacgttaattatgagacatctaaacaacatatgatgagtaagtacctacgtggtaaaaaggcctttgctgctgagtattccaggaaataaagacatacaagaaagagcatgcataattagagaaaatttctgtaagcaaaaaacagaaaataacactttaaatcctagtaaaaattattaaaacaaaagtataattttataagccattaaaatatttaaatcacttggctcaataagcctcttcagtttattctgaagaaaaattcaactgtaggatgacaaagaaaaactatgtttgtgaaggtggtcattcaaagaatcatctacaataaaaaaatagaaaatgtctaaatacttcacattagaaaataactttggtgctttatgataagtccattcaatgtaatgtgatttaccttttaaaatgcaaccattaaaactgctaataattaatgaatcttggtaccatatttgtgttttaaattatataaaaatacaaagttataaatatatagctactaaaaataaaaattagtaatagcgatatatttgtgaaataatattaagtataaaaagcataatacaaaattatataccatgatataactatatttaaaggtacttgaagttaacatgtaaaatttaaaaatggtttgtttaggtaactttattttttaaacttttaaatcttattatagttatttatttattgctaaaaaatcaatggcagaatgtcaggcatgagatactgtatgtaaaaaatatatttcccaaatatatttgggaaaaaacatataagtaaccacttattcctgtctctgttgtttgatttgcacattatatagaaaaagtcaagtaactgaacacatctgaagttgcagtattggagtaaatttaaccattagttgtcagtgctttacaagatgaagtcatagaattttataattgagagtcctctaagacctcctgattcagcttccacttttcttagtagatacatgtgacttatggagaaataagtaaattttttcccttaagctacacaattagttggtgaaaaagctaagactagaattcatattgtactactaataatattgtaataattctattacaagttccaattctttagcattcattagttctcacaaagtaaccccagtataaccttccaaatttatatcctgcttctttgcaatgttagacaggaatgccctttttcccctccctgctagtcttgcctgttttcttgagctctccatccttaccctaacaccctacacactcatactgtcttcttctgtctgctcctcttctagtagtagtgtgttagaatagctttttcaaatgatcatatttggaaaaaaacaaagtggattttagttccaactattctgtttgcttgtcttactttgtgcatctactcaattatgctctgtttcatatattatgagaaaaactgcatttaatcatacagatgagggaattcagaggtagtgcccattaatgtacggaaagtatgttctgatggatcttggctggctgtgttgaggaatgaggtgtataacaatatgataacatgagcaaaataagtgtcaaatcctcttgaactaaaagtgactctacagttgtgaagtagtcacaggctttcacaaaatacctgtcaattgtaattgtgtttaatctcaatttaccagaataaataaatttcttactaatttgtgaaattccctgtctatttccaattatcttccacaagtcatactattggtttgttgattccctcaaacttgtttaacaagttagattttaattaacatgagatttcctcctttgtcctcaactatagatcacacgtaatacatgagagtcattcatttgagtgggaatctcaaagcagttgagtaggcagaaaaaagaacctcttcattaaggattaaaatgtataggtaagtcctgtttttgtctttgtagctttaaaagttttactatatcttacagtatgggaaaaatataaagaagcttagcaaattttgactgtgtctagcaatcttctagttacttctctgaaaactt

SEQ ID NO: 32093 - DNA, 2300 bp, Homo sapien
gtcatcattttaccttaatgtagtccatgattcccttcttatttgtaccagatagtgtgaggggcattttgcatatactgtttcctataattcctacaatagtctggaaagctattattcattccatttacggacaaggaagttaagacacaaaaatgccaaccagcagctagagagtaaagccaggatttgcaggctggtatatctctctccaaagttagagctctgtctatgaggacttctgccactcacaatggaagccgttgtttattgccattttgctagacagtttcacatacattatgcaatttaacactcacaaaggtcctgcatatagatggtatcaacccattctaaataggagaaaaattatgctcaagggatttaagtaatctgctcaaattaactagcagagtcagaattccattctaagtccatgccctattcactattccatgaagcactatgccagaagaaaaggaggaaaaagagggaaaggaaggaaaaggaaggaaagaatgttcctatgtgtgttccttgtatagttcactagaataaccttcactaaggttttgtctgttaaatattaggtaagaaaacatatgcaaatgaaatacagtcctaataataatagccgatgtttcttcttgcttccattgcaagaggcactattttaaacattttacatgcacagcattaactcatatatgtttcacaaaaaccctaaaagatgataattaatattattcctattttacagacatggaaacttctgagatttgaaccttggcactcctagagagcctatgcacttaaagcactctgctgtactgtgtaaaaagatttcaaatgtgctttctccaagtgctagaagcaatgacttggaaaacctctatttaaagtagtgttcccccttaaatgggtaccatttggttataaggtatgaacaagaaacactaaatattttcgtccttcgtgcaattggtaaaaagaataagggagatctgggccgggcgcggtggctcacgcctgtaatcccagcactttgggaggccgaggcaggcggatcaacaggtcaggaaattgagaccatcttggataacacggtgaaaccccgtctctactaaaactatagaaaaaaaaaaaaaaaacactagccaggcgtggtcctgtagtcccagctacttgggagactgagtcaagagaatggcgtgaacccgggaggcggagcttgcagtgagccgagatggggccactgcactccagcctgggcgacagagggagactccgtctccaaaaataaaaagaataagggagatctgttttccccaaaatggaatgatattcacaatgttaaacgaatacaaccaaactgcacaataatgtatacaatgtgatacttttaaattaaaatgcataaatgttttttatgcattataagcattaacaccccttctcctaacactaggtgcttctgagggagaaggaaagggaccaagagtaggacattgtcaaacatggttttagtctcattttttacaaagaacatgtattaatatgttgtttgtctaattgaaaatgtttatttcttctctttttttcattctgataaatgtctgtcaatgttttatcacattaagtcatttggggaaacatatagttttatattaatttatttgcctgtactctcagaagtgggtatttaaaaaaactattatgtattagtaaattcactatgcttctgtaagatacctgctgttcaacatgaatttatggaatatttcttgagttatatttttattatgtatttagattttaagatctgtttgtttttatctagagcttttatgtgacagtttctttaaaatacttatatacctaccataatcttctttaaattcttaattctagtacattcctaaggtatttctcattctaatctttgtaaccagtttctcctcctttaacaaaattagtccatactaaaaaaatattgctttcttgttgggactatcctgtctctggctttcttcaaggccttctatgggttgaaacttctctgttcagacttgtcaaactagtttcatttcaactacttgtaatttgtttccttatttctttgagccgtagacttctaatacatctagagatgtcatatagttgattagaaagttgagttcagtgggtgcagacctgcaagatcatattcttcctcctgtacatgatgtatcggtaagttcagttctgttttatagatggcttgtttgatgtactgtctgtcagtggccggattcctgatg

SEQ ID NO: 32094 - DNA, 2300 bp, Homo sapien
acaatgccataaggtagacagcttaaggtcccatttggaagatggaaaacatgaggtaaaaaacattacatgattcctacaaaaccaatcaataagtcagacacctaaatagaaataggacatataaattctgtttaaaaaatccacttttccattattggattttcttataaccttgtgtatttatttctctcatttgtgcttaaatatcattgaattcaattgaattaagcacagaaatatttaaatcagtatacacagtttcacagatacttattcacaaaaaggtatcacagtcttattaaatataaataaaattacacaaaacacatattcacggttatagaaattacatagaggaaagtaattttttggtagtcagatctgctttcctctatctactaaaggaagtgtttagttttaatataaaatatgttcatcatcaatcaagcccatctttaatatgctaaacattctcaaaaactttaaatgtttctgtgctatatgcaaactgtaggagtttaagtgaaggacatgtaagaatttaagtttttactctgttttctctggtggtagttactcctagtcattgactcagaaattcgatgacatttcatttttaaagaggaaatgtgtatgataagctttttgtgtttatatcttactgagatgtgaataataactgggagatatttttagttgtatttctctcaattacatataaacacatataaacacatgtacatgtaaactaacaaaattttccaacactagggaaatgaatagtctagatttttctctaataaatcagagcagcaaatctaatctcacatttgaggtctatagaaatacggatgcatctctgtagtcagaactatggtgacagatgattgtcacatcctatgactacttgtctataagcagacatagtgcaaaatatattaataaggcataaaagtgattttgaaaaaattatagtagttcaccgaatttgtcttacaacgtaattcaaagtactttgaaatcaattacatggctttaaagaagcaaagatcaattttttgaaagtatagtaagttttattgagtctaaagcacattattaatgataaatagtagctaatccatgagacactaccgtgtgcagacactattgcaagtgttttacttgtgttaattcatttaattctcaaaacaactattatgaggtagtaccacttttattcccattgtagaggtgaaagagttaatgaagagagatgttaagtaacttcagcaaggacacacagctcctatgaggcagagacgatgtttcaacttgaggagcctggttcaaagtccatgttttctatcactattaccatcattaggatttgggccgtatgtaccacttatttgaaaaaaaattgagctcatttatcttaaagcttgccaaggcattcatttccatataacaaagatttatttagttcatagtatatgcaaggcactgtcctacgtgctttacacaaagctttacacaaatcagctctgatattctgatagacacctgacctgatactctgatggacatctgacttgtcagagagctgaagacttacaaaagtaccagttgccatatactgatataaatatttctaagtaaataattggataactcattccatcaaaaattagcgtgcttgtcctgttactaattatttgaaaccaattctcctagccttcatctgcttctttttatcctcctgtgctcatggaaaaacgttccaaagagtcttaatttttttttttgtcctttctgggccaactgctactaacatatagatggcaagatgctgttaaagaataaatcagaaaagcttcttaacaacacaacatgcttcctgaagctagtgcttgagttataacactgtgttaacagcaagttcagatacatttaaaaacttttaaaatgtcaactgttgaggttagagatagtgctctgtattattagatataagcccagttcaagtcataatgcaaatcccatgcttctccattcttgcacactgaaggtccacttatcagttctagaatgttgaagccctgagtcttcagggaagactgttctttttcactagaagaatctcacatgctccaggtattatatgaggtaagattttggcattactggcagctcttcatatcctgtggaaaatgatgttcctgtcttcaattgagggaaaccacttatttatcttattaggaagtatcacaagcagtttcccttgtgagtaaggaataggtgctgtctgtcatttg

SEQ ID NO: 32095 - DNA, 2300 bp, Homo sapien
tatacatgaaggtttgcaaagcagacaaattacgcttcacttcaacgatcacagtaaaaccagtaaaataagaaccaaaaagtgagtcataaaataagaatcggtggaagatatgacatggagagaaaatgcctcttactatgtatattatccaaaacaaatcaaaattaattactacacagtttgttgaaattaaggaaaaaagaacctgaagagttcccagcaagcaagaactttaaaaattggaaattaatcagttattaattatttgtacataattaattgtaataaatttaaaaacaatttttttcctattatgttatcaactacaaactttctcaccaaaagaatgtttcaggagcataatactgacagttgggaagaaatacagtctcagtcttttttacagaattaagtcaagcatcacaagtattactttttaattttttgcagaaataaagacccaactcaatggattgctacttttggtgcaactataacaccacccgcagtgaaacgaaatgtgaggaaaattattcttcatgagaattaccatagagaaacaaatgaaaatgacattgctttggttcagctctctactggagttgagttttcaaatatagtccagagagtttgcctcccagactcatctataaagttgccacctaaaacaagtgtgttcgtcacaggatttggatccattgtagatgatggtgagcagtttcaacctaattttcttagcacaagaatgtcttgagatcaaacgagctatctatcttaaagaatccctcttaagcttttaataaaagtaatggtctttccagtatgtgtggccttgggcagaacaggagactgtgggttaaaaagtaaaaatcaggtcctgtatttgagtttacaattggagcagtggtggccgggtgtggtggctcacacctgtaatgccagcactttgggaggccaaggctggcggatcacctgaggtcaggagttcaagacacacctggccaacatggtgaaaccccatctctactaaaatacaaaaaaaattagctgggcatggtggtgtgcacctgtaatcccagttacttgggaggttgaggcaggagaattgcttgaatctaggaggcagaggttgcaatgagctgagatcgaaacattgcactcctacctgggtgacagagctagactccgtctccaaaaaaaaaaaagaaaaaaaagaaaagaaagaaagaaatctcctcaactgctcaactagagcggtggaaaaaaaaaaaaagtcagggagagagactaatatagaaggaaaagaaacaactgcatcaggtgatataagaagggacagaacactatgggagtgcaaggcagtaagtaatcacaaattttgtctttcctagatataaatatgttacatatactttaaatcacatatactttattttattcagcatataatttaaatcgcaaatgtaatgatagctttttcctttgtttattttaattatttctcattgtatgagaatttatgatgatcataaacattaaagtgggttgtaaatattttgagcattttttttggttagtcaataaaatctgtatctttttcctgtgtccaacctgctaggggtgttaaaagacatcaagtctagtaattgtataaattaaacaccagaacttaagatttctaggtactagttcactctacgttaaagagaaagattaggccagcggtgatggctcaagcctgtaatcccaacactttgagaggccgagtcgggcggatcatgaggtcaggagatgaagaccaccctggccaatatggtgaaactccgtctctactaaaaatacaaaaaaaaattaacagggcatggtggtgcaggcctgtagtcccagctacttgggaggctgaggcaggagaattgcttgactctgggaggtggaggttacagtgagccgagactgcgccattgcactgcagcctggtgacagagcaagactccatctcaaaacaaacaaaaacaaaaacagaaaacaaaaaaaaagagagaaaaagattaactgaatgttttaatgagaaataagaaatacttaagtttccgccatcagttggtgcggtccatggtgagctcatcatggcgattgaaggtggagagagaacctgtggagtacatgaacttacctgttttagaaaagtatctccagaggcagttgggtttttgtcagctgtttgggtgtttattatcctgatgctgcttctttttctctatattaataagcagttctgttttgaaaatgttggaggg

SEQ ID NO: 32096 - DNA, 2300 bp, Homo sapien
gacattaatatgggacagatactattttaagtcctttacatttattatcccctttaaattagagacaaatattatctccatattatagagggaggatctgagatgtagaaaggttaagaacattcctattttcacaaaggtaattcatgccagtgccagaaactgaacccagtcatcttatctagtagcctggtatactgtcaccccactgtggtaaagctattatgtcagagaaaaaaatgagttattttacgtagtcactgaaagctgaaggagggggaaaataaaaaccaataaacacaaactttaaaactattcaaataaaagatcatttgaaagaatggccaaacagaaaatattccgatgggagacaattaaatctctatttttgagccattaaacataaaacagcttctactgtaatctctaactttttaaacatggttaaagtaaatattgctgtatctcctaagttccccccaccatgtcctgtgattcaatatgaaaacactgattttcttgagagaataaatctatacataccacatgttttaatccagaatcctcaaagctggttgctggacttgcttgtaattacttggacatgtttcttgtaaagcctaatttccctcagttaagccacagagcttattgtctgctgtattattatttactaatgtaagaggctgagaatatatttatgaattttaacaaataaggattataaaatattagtttattattaatgtgaaatgcttaaatgtaaacatgaaaaccatttaaaaagaatatttacacaatgttaatttcaaattagcacaaatactactacatatactatataaaaatgaaaataatcagttatatttatatactaaacaaatataatttttctagcacctttttattagattttggaattttttacttttgaaaaaaagtaatgctccaaagatgaaagttacttttgctaaatgaagttatagttttcagtgtgaactgactggtaaattttattaactacttatttagacatttttagttctactcaaaattgtattatcatatgtcttctgtcatattgttggtgtttatacaaactgacaatctgtttcatttttttcatttgtcaaatgttttggaaaatatagttccttttaatacctttgcagagcattataatgaaagtattacaattagaggcacattgcatttttagcattttagatgaagatattctgtacaaccaaagtaaaaatttatcatttttctttaatatcctttgactctgagccttaatagctcttaaaattgtaatttctattttgtaacttttctgatctttataagaagttcatgtatttatactaaattctctatagatatatgaaagtatttaaagggacggtttgtaaatactgggaattcataccactaagatggacaaagttattcctaataataagaaagaagaaaatacgtttttgcttttgatatttaccttccttttctgccttttttggggtaaataaattgtttcaatacgttctattatatttagagctaaaatggacagtattaagaaaagctaatacagtcctgccattttccttaggaggaaagtaagtcccaataagctgaataatggctgagacaggtgccctggttcataactcaggtcttctccactccgctaccccttgttattccctcaaagggaagagactgaacatttctaatgaacaaataagaagtgccatcagtgtgctctagtgtgttttgttttgttggtttttttttttttttggaaagcaaactggggccacacctcaatgcttatcatacttccccaactggaaaagtgtggtcttctgaatcatcacaagttgcacattctgagccctctactacttggagcttctctatgcggatattgacaattacttcactgtgtggagccagttggcacaaaactgatcatgttcttgttcttatcaggctagaagactgcatacctcactcactaaacctgtcaaacttgtttcctttcttgttgccagtgactgtcattattttgcagcctccaagtcctaacctgctgatacagatcagatggtgactgaatagaagctgccccagtcctgggttcatgatgtacgcgtaagtattcagcttttctcagtaaaggttatcagtggggacagaggtttacaattcctgagacaggtagtacagatgttggctggtggagattgatttaaacattagagttttaatgtgtgttattgtattttatatta

SEQ ID NO: 32097 - DNA, 2300 bp, Homo sapien
cctgtaatcctggcacttggggaagccaaagcaggagaatgacttgaggccaggagtttgagaccagcctgggcaacatagtgagaccctatctctacatttcttaatttattttgtgaagaaaacaaccaacgtggtagtagttcttttttaacaacaacaacaaaaaattatttacaagtttatataattaagtagagcatactttaatttgtaacattttgtttatggtatgtttaaaaatattttaaaatatccatggaattatcaatttgttttgaataccgtatggtagacataatactaattggcagtatttgattttaataaataattcataaaatttttaatacataaaacagctgcatctgcattgctacttctcattgcaaagttttgtcattaacaaactttaattcagtaacatacagaattcagtttaagttgtagcttaaaaatttgtcagataccatcaagctattttcactttaaggtatacaaatatttatttgaaaaaaaaatgattttttaacaaagaaaatggagttttctattccacattaataaactctggctctcagagacagatgggagcaaaaaagattccaactcccagatagagttctggcatggattcacatagaacaattacactagtattcaaacttcatctgaaggcttaaaaacataaaattacaaaattagaatcttagcagtcactagtatcactttccataatctctactcctacccccaccccaagactagatcctttaatctcctctgccccttctagatgaataggcatccaggatccacctgaatgacagccaaatttgccagaccatgattcagagggcatttttacataggctcaagtgagaaatataaaataccctacaaatataaatgcctttgtgaaagtaatgctgatgtcattccccagcgtggacttcttactagtgttaggtattacccaaaactataaggagttttcactcttttcagaaaaagcaagcaagcaaacacacaaacacataacaccaacaaacaaaaactcccacaaaaatgggaattgtcaacatctctggttaaaatcacttccttatcctggacttctatgactaagaggcaggattgtgtaaagtgggtgttgttctgcattcttggacaaggttgttaacctcttggtatctgtttattcatctataaagttgaaataataatagtattcttcatggaatagacagaaggatcaattgggataatacagacaaagtcattggaattgtgcctgacacatagtaacaactcagtaatgttaagcactgctgtttcatttatgatgatgataatgaatacaatatgtaatgttaattaccaccaaaggcattaaatatcaagatcattaataactgaaatttaatatgctaagactactttaaaaggcctttggtatttcaatgttttaagaaactgagtttatttatgatataaaggaactaaaaatgccatttaaaagtgatttaataaaattttaggacaactattattacacatatacttattttagatctttggtaaatgcaaaatggctatcagtagatagtgtgaaatccacactttctggaagaagaaaattcagtaagtaaaagattttctcatatatctaatctaggtcattgaagctcaaataaaatttaaatactgtataaggacttgtcaagacactaaatcaaatgttcagtaaataccgataaaaattttaactttttaaaagtgaatattacagactgtagtcacttaacgcctggagactgtgtggttcataaaacagggccctaggctcgcttctggggactgtgggactgggactatggccagaaattaacatttgtgtcacacaaaaaacccacctgcagacataccatgcttacctccttcttgaactcccttctttcccgcctccagtctctggcccctacttaactttctccccacacccctacccccaccgcagcttccagaaccatcttctgggccttcccatcatcccccagcccaagaccaattcagcctttcttttgtgtgcgtgtctggttagctcctttccaaagaaccatgagttcccacatcagccagaattactgcaccgaagtggaagccgccgtcagcagcctggtccaccggcagctgcgggcttcccttacctacctctctctcatcctccatttctaccgcgacgacgtgaccctggagggcatgggccacttctgagagctggcccaggagaagcgaca

SEQ ID NO: 32098 - DNA, 2300 bp, Homo sapien
tgcactcggccaatatattatactttcttgtgttgttgccttaaaaattaattatcttcatttaaaatttgtcacaatagacactcatggttgagtaaacaaaactttattttcactaaatataggaatacatgttatacaagaatccattaaataaccacctcaggttttataaatttagatttatgctctttaagtcagatttatctcatctgctaaagacaacattcaatgagacagaaatcactaaccagagtaatgagagagcattcccacattacctttcccaggcatttgattaaaaaaagagaagattttaaaaaatcaaaccaagccgtcatcagagaaggtaacttaagagccagagaggtactatgttgtaaattaatctggcatttttgttttaaaagaaaatgtgaattctgaattgttagtcctcctacctatccttaatgtactataatggcattcttcaagaacaagcatcttaatgatcatggagaattagtctggcagcacctctatctcctgcttaaactcctactcctccccttacctccctatctcaccacgcttaaggaataaaacccatattctttattatgacttgcaaatccataaaaagcttgacttactcttcctattcattattcaaaacacagttcaggtgtcactcccaccaggtagccttcccttacatccccaggatggtggctccaggttgccccaggtttacacctgtcactacactttccacaggtgtaaaaattatgcatctgaatctcctactagactgtgagcccctcaaggactctttttcatctctgtggtcctggactggtggctggcttcatggaggtagtcatggtgtccagctgaacaaaaatgagatgtactatcaggatctggctgctacatgcttcttttttatgtcctatcatgtccttgcatgtagcctatgtttcaaccactcaataagttgggatttctagaacatgctattatgtgtctttccaagtggtgtactccaagtctgggatgcccttctctgacatttttttccctgatatattcttagaatgctgtaaaaactggctcacactttttgtgagactttttatccactgtattctcatagattgtgtgcctactgttttaagacaccatctcagtccggaaagtttcacaaagtcaacaaatacagtttgtttttagtttacattaattttgtcctgacacccccaaaagctaaattttattgctaattctatcttttttccctactcagatccatataaaggataagcttttatttcaattcaacaagtattcttaattgctttttaattacatatggaatatatgaatacattatatttgtgaagaaaatgaacccactatagatcaggctaatattttttccaatcatcatttccaattcttgtctctttccttctctgaggtaattcttattttgcgaatccttccagatattttcatatatttatttatctctttataaacatgtacatgaatttaaatacacttattagcacccattaaaaatgtgcagttttatttagtgtttcttttctttttagtggtattatattgaattatattcacttagtaaaataactattgattagattaaatagttccatttcgtataaagaatttctaaaacagaactgtttcttactctaaaacctacctccctctgtaaatcaatttctgcaaaagtatgtgcagagcctcagtgagaatttttggattaagcatgtttcaaatgagtactgctgtggcagaataattgtatcaaataaagacaatttacatttaagttatttgtcaaagactgatctgttagatacagtcggttttactgggaggagctctatgccatgaaaggatggatggaacttgagtcagaacactgactcacccatctgtggtggtattttgggggtggacctctcagaacaccaatccaagtaatatctattgttttttgttttttgttttttttctaaatatccaactcaaaggggatttacatttcttcctttaaatcacagatccatagctgtcatcacacttgttaaacaagtttccttttcattgttttttgctattttacccagcccttaaaatctcaactatcattgcggttagcacatttaccagagaagcactgatcaggacaaaagaagtgcagaacttttctttatatttatttacttcaacagccattatatcagcacattatgtataggtaagttgagatttgcttgcctaaa

SEQ ID NO: 32099 - DNA, 2300 bp, Homo sapien
tgaattattaatctaagtgcaaatggtaactcactaaagtttctagaataaaacatgggagaatgtctttgtgaaaagcaaagaattcttagaccacatacacgtatacatgaaacactaaacttaaaagcaaagattgataaattttaaattaaaattaagaaattctgttctttaaaagttactgtttaagcattccagtaatggcaaactaccttatattcaggccttctagagttaataattatacactttggaaaataatataaaaattaaccatatgaaggcagtggagagtgacaaaaaataccagaaactgaaggaaagccaatccaagaaaggaaggaactgtactgaatgatatttggaaatcttaatatttaaagacaacataatcatctatatagaaaattcaaagaatctaaagacagctattaattttaaaagtagctaaacaaatttgctgggcatgctacttactaataccaatcagtaacattcctacacactagcaataaataattagaaaatttaacaggaaaaatattattcatgactatgagaaaaacttcaaacagaggaataaatataaaaaagatgtgccttatatcactttatgagtaaaatgacaaaacaaaattaatgaataaatagaaagatacatcatgctgataaacagttaacaatataagatgttgaatctttccaaactattctgtgaaataaatagaatttctattgaaatctcaaaatctcaaaatattttcttgggacttaataatgggacttaataagctgatcctcaaagcatatggcagaatagaaagttaagaattaccaatataaatttgaagaagtgtttgagaaaacatatgctttcagaaatcatgacctactgtaatctgcagcaggggctggaaaactacaacccatggacctggttcaccatttgcttttataagtaaatactggaaaacagccatgcctgcatgtatttttttacttagcatttttggctgtttctgtgctgcaatgggaaaatttaatagttgcaatggagaccatatggcctacaaagcctcaaacgtttattgtctgggcactttacagaaaatgcttgctgactcctgatctatagtaattaaaactatttagtattgacagaagaaaaggtaaatagactattggaacagaatagagagttaagaaacatgcagattttgtatatgatataggaggcctcacacatccgtagagaaaagatgaactctgcaataaaaaagtcttggaaaacaggttattagtaagaaaaaataatttcaaattaagacaatataaaattaaattatcatttcatgtcattacaaaagtaaatggattcttgaagtttttaaagaactgaaatctctttacataatgaaatgtcaagctgcaccctggggacaggtaattaataaataggtgaacataactggttaatatccagtataataatacattaatatccagatcatataaggaactcacatataactataagaaaaaaagattagcaacccatttttttttccttaccatctgctgcctgttgatgaaaaactaaacttatgaacaggattctcaaaagtgaaaatccaaattccctcaaaatatgtgaaacgattattctcacaggtaattaaggaaaagcaaatgcaaaccacaatgaaatagaatttcatctgcatgagaatgatggcaatatttgccatattaaaattgacgtattgtaaaacgacatttgtcagaaacttttaactagttatagttagtttcaactgagaagagacaaggcagtataatggaattggtaaaatatagagttaggattacccctacatacttcaaagctgtttcttgggtgtgcctcttagctgaccaaactgggccgtaattttttctaaatcgccaagtcaaggaagtttgtcattcttgggttaactcctgtcttgaaactacagaaatgtgatggtcattaacactagtcagacaagtttcatcttatttgttctctacatcttacccagcccataaaaaccaagctccaacactggatgtagcacataagtcaaaagctgcgtcagaaggttctaacttttgtcatcactattaccagcattgtcatcgttatcgttatcttcgtcatcatcattaccaccgttatacctgatactgccataacaatcagaacattatgtacaggtaaaggggacttcactggggagagcaagttggcaaaatgtagcaagttgccattaagt

SEQ ID NO: 32100 - DNA, 2300 bp, Homo sapien
atggacaatggaagcttggagataatggccattttctgaaaaattagaccatgcttgaaaaaaagccattatggaggaaatcattatggaggaaatcaaatccaaaaattacatgcttgaattttcactcctttgaactattactccagccaataaaatccctgaccggatttctaaactcggaatgactgaattttctgtttttcatctgaacacatcatactaatgtagattgttagaatcacagcacagtggagtacacgaaagaaaccatgtcttctcacagtgacaaaagctgtcatgtgtacgaatattaaataaaacatactgatttttatatactgactcttctgtacagaaaaaaatcttgcattttttatacaatgttccggtaagtttattttaaaaattaggaaaggagaaaacagtgatgattatgtgagccaacagaattgtttagaatagtgccagatacttggtaaaaacttaatgttggctttttaaaatagatcgactcaatactaagctcaacatacaaagcataacttaacatctaattggatggcactttagaaaaatcctctgcttaagcctgaaggaaatgttaatgtttaaaaatctcaggccaggtgcagtggctcacgcctgtaatcccaacactttaggaggctgaggcaggtgaggtcacttgaggtcgagtttgagaccagcctggccaacatgttggaaccccatctctactaaaattacaaaaattagcggggtgtggtggtgggtgcctgtagtcccagccattcgggaggctgaggcaggaggttgcagtgagccaagatcatgccactgccctccacctgggcgacagactccatctccaaaacatttattaatttatatactgttttttcaaaagtgatgaggtggtttagaaacaccaaataaaaacatgggtaaaatcttggcccatcaattactacctttctaatcttgggcaagtttactagcctctctgagcccatttaaatgagtctgtatataaaagcacaaagtctctattgcatacaaagtgctcagtatttattcctattatttcaggaaaatacctttaatattacctaccagttttgtataatggttacagaaattcttaaactgtagctatcatcttgtctagcttactgatgaatacacaaaatgccaatgaagtgacttaccatgtatcactaaccggtttaattaaagacaatgacaaaactagaacccaggtttccttaaaagtactttttcctctctaccacaatgcagatttaaaacaaatcctcaggctttagttttgtcattgtaaataaaacttctgtgaatgcagggaaagatactacatgctggtatgaatatgaatgcagtataactatagtttattatatcctttaagagtaaagtgcctgtgttgttcttttcaggccaatatagattaaatgtaaaactgtactatgtgatctggtacacagtacaactgttgatactataaaaaaatcaaacattcaaatattcctaatgtttataaaggccaaattccaaaggccaaaactccaggtgtaactcaagaaaaaattcaaaaaaattatttcataaactgttttcttgagcggctctatttctatgttatagttggttaccactgggagaactggacagttaacttaaaatacagaactaatacaagagggttaaaagtccatttatgaagtaaagtagaaagcatgtacaaagtcgttcacttacagaagactaaaacaacaaatagaaaacctaaataaacgattctgtgatcagagtagactcaaaatgttatcaggtgtataaatacttaaccaaattattaacataactctgtgtatcttatgttagaaatagaagtaagcttttaatgcaacaggcctaggtcaatcatttctgctaaagtgtgcctcaaaaaaagcaaatggggttcctaaaattcctgaacaaaaagcatgcttttatgtccattattgcataataaaacaaacctgcaattggataagaaaaagatacaaaagataaccgtcaatctttaccaatttattttatacaaaacagtagcaatgtagaatatgggaatcgtcttccgctgccacgcacgcaagttgtgaacattccaagccaatgtatacaatttggaggggaaggctaaacaatagcatcaaccacgctactgaacataggaatttttcatttaaaaagattaaaaattagatagcaatgtcttcttaatattgctctcg

SEQ ID NO: 32101 - DNA, 2300 bp, Homo sapien
agttttgtgcttttacagtccacaccagcaggctctaaatgttttttttattatatagcacattgataattttttcatttaacttgcagtttgacataatttcagataagcataatagctacaagtgcagtgtgaagaattttcttttactctccaaacacattctgcagatgttagcattttgtcacatttgtctcattctgtgtgtctgtgtgtgtacgtgcatgtgtgcacacttttttcctgaaccatttgtaagttgtagacataatatatctttgtccctaaatacttaaatatgtgttataaggactttgacttaaccatagtacagtcaaaattagaaaaataacattgctacttactctgatttacaaactttattcagatttcaccagtttttccaattatgtccaatattgtgggctgtgttcagttatcatgcctctctaggtctgctttgatatgaaatagttcttactctttgtttcatgacagtgacatatttggatgccctttaatttgggtttgtctgatttttttcctcatgtaggttcagcttttccattttgcatagaacattacaaaagcattgttctattctcagagcattgttacaggaggtccatgatgttgatttgtctcattactggtgatgttaactttgattatctggttaatttggcctgtgaaacatttctccactgtaaagtcgttttccctttgtaattgtggagagtgcacatttttggtaaatgtgtatttataagttgtacatacgtatttgtatactaatttattgtacacattttaaagccctcagaaatattagaaattaaagaatgaggtaaaaatagagacattcttgcattttctttttatgcctcagtatatcttttcatgccttctgagatgtatactcctggctttgtagaccagatagcccagacttctgtttgtgtgtgtgtgtgtattttgagaaactcactcttatcgcccaggctggaatgcagtggcacaatcttggcttactgcaacctctgcttcccaggttcaagtgattcttgtccctgagccttctgagtagctggggttaaaggcatgtgccaccatgccctgctaatttttgtatttttagcagagcagggttttgccatgttggccaggctggtctcaaactcctggcgtcacgtgattggcctgcctcagcctcccaaagtgctgggattgcaggcatgagccaccacgactggccaattctttaccctgtattagttttatagaaattaatcttgtgtcttgattctgaaataaaagtaaagctttttatataaaagtaaaagctcctaggcgcttgtggcctcacacttagtaagtactcaaaaatacatgttcaatgatagtgatttttccctattaatttttaattttatttgcagatggagaacttaatgttctggatgatattttaactgaagtaccagaacaagatgatgaactgtataatccagagagtgaacaagataaaaatgagaaaaagggtatgtaagagttctattatttttgttgaaataacagtataaatagaggagattcaatttcttaaaaaaaatgactgtgcttttttgtgcttgttccttgaggcagttaacactaaatgtacataataaactggtatccatatgaatagggataatctgtttttttctaatatatgaaacttctcaaatatatggttttattcccatagttgaaagctatgttttcttttagattaactctggagaagaaatctctcagaagacttttaaagaaatgaggcctatccccccttcctgatgtatatattattgtcagtctttggtgaaataaatggaatactacaaatacttcttttttttttttttacattgtattttaaaggatcaaaaagaaaaagtgatcgaatggaatctactgataccaaacgacaaaagccttctgtccattctagacaactggtttctaagccactgagctcatctgttagcaataacaaaagaatagttagtacaaaaggaaagtcagccacagagtataaaaatgaggaatatcaaagatctgaaagaaacaagcgtctagatgctgatcggaaaattcgtctatcaagtagtgcctccagagaaccttataagaatcaacctgaaaaaacctgtgtccggaaaagggatcctgaaaggagggccaaatctcctacgccagatggttctgaggtagtaaatattattgcagatataaaacagaaagccattctttttgag

SEQ ID NO: 32102 - DNA, 2300 bp, Homo sapien
ggtggtcgtgcacagcttcattttatacattttagggatacatgagacatcaatcaccagcttgacttcttcctttggcttagtgatgttggggagattttcctttcacatatgtatcgcccagcttcaacaattgttaactcatgggtagacttgtttaatctattctcctacccatttcgctacacctgccaccagtttgataaatcccagataccatataatttcatttgcaaatatttattactattcttattattattttgagacagagtctagctctgttgtcctggttggggtgaaagtggcacaatctcagctcactgcaacctccgcctcccgggttcaagcaattctgccttagcctcccgagtagctgggactacaggcgcatgccatcatgcctggctaatttttgtatttttagcagagacggggtttcaccatattggtcaggctggtctcaaactcctgaccacaggtgatccgcccgcctgggcctcccgaagtgctgggattacaggtatgagccactgcatctggcctgcaaatattttcatatgaatcatgaaattataagaaattctttaaaaagcaaaacttattaaaactaaaaatacaaatagcaattcctcaggatcatcagatattatttaatgtgtgtgtgtgtgtgtgtttgtggcgtgtgcgtgttcgtatattcaaattagtgttcaattaaggtcctagaaatggggccactcctggtggcttcacacctgtaatcccgcactttgggaggccgaggtgggaggattgctggagcccaggatttagacactagcctgggcaagatggctaggtgttagccatcttgcggagatggtatatctccacaaaaaatgcaaaaaatgtgtcggatgtggtggagcatgcctgtagttccagctacctgggaggttaaggtgggaggatcacttgagcccaaggttgcagtgagccatgatcacaccactgcactccagcctgtgtcacagtgagaccacgtctcaaaaaaaaagaggtaccacattctagacttctagactacttgtctttccctgaatatgcagttagtttgccagtttgtcttcatatcacgaagttacttagttacctttttcagatttttctttcccttataactcagttatagttcaaggaagcaaaattagattgtttccgttggacaatgaatcttaagcaagtttctcttgcagattttaccacactatgtagttatgtatctactggtcatttattctgtagtttcgattcctcgatggtctgcttaaatcaattttgtgccccagggccttgataacatgtttaaattagttattaattacaaagacctattatgatacaattctttccccaattaaaaacaaaactaggccgggcgtggtagctcacgcctgtaatcccagcacttcatcctggccaacatggtgaaatcccgtctctactaaaaataaaaaaattaactgggcgtggtggcgggcgcctgtagtcccagctactcaggaggcagagccaggagaatcgcttgaacctgggaggcggaggttgcggtgagccgagatcgcgctgctgcactccaacctagcgacagagcgagactccgtctcaaaacaaacaaaaactagcaggcttttgtgactacaaacaagctggttgcatgctgcactgcctttgggtaagagtggaactccaactaagaaagtacatctggtaaacataagggattcacccagacttgtcctaaataagactccgattacccgaactgaatcaggagtcctttagagcgactctagctaagaaggcctgttaggccctgcactaagagtttcaggtgggaaaattgcgccatccagttataggccgtacagcgggaactccatgaacaacctgggtaacctaatccctgaataagactccttccaggtaccagtgggctgagggcggcagggcgacgcgctgacgtcacgtcacgttcctttgcacgtccccgcctccccgcccctctccgcactgtgacgttcccagagaggaacgaagcgtaaacagcgcagggcatttcgggagcgggattgtttcgcgcaggaagcaggctccattttagcgccgcccgccgtcgccatctgtttcccttccctcccccatacctagcccgagtctgagccctaacgagaaggctgggcctaggccgctggatgctggagtgaaaggaagggagaaagggaaaaagcgggaagagtcgagaaggctgagtgtta

SEQ ID NO: 32103 - DNA, 2300 bp, Homo sapien
cacagaatggcacagggaacacagaccaacacacaaaaagaagagtaactctttgaaaacattttcttcacactgtagtttaggacaaaagtattgcagaataaaatttatggttttagaaaaaacagcaacaaaaatttgaatgaaagacaaacttttgctttttcgaacttttggaagacaaaattatgactctaatgtttcattccttcttctttccttgccattcaaatttctactaaagtgtaagatatatcataaaatttgataatatacactgcaatgcccattgagcagactgaacaaaggccattaatatagcaaggaagacatatttttaatatctttagtctgacattcacttgtcctttatttacatatgcgtaatctcttaattttctacaaattgtagcttatactcacagagttttaaaaaaattcatgatagccctctcattttctgtatctacaattctaggttatatattaccctaagtatacaggtccataggcctatataaagaatttatttgaatttgaaatcttgattttgtgaaagaaacaaatgtcttgagattttgttaaaataagtctggcaagtcttggcccaaagttacactgagagggaatctgttttcctttgaaaacaaaagtattatcaatattttcataaaatgtgagtataaaatagaacatagtattattaaaccatattaacatttcattggcagagatttcactttgttaaaggctgtataagaacagcttaatctcataacccagaagtttttactgttattattgcctctttatttttggctaaagtgtaatttttaaatgagtatacagaaacctaatactatatattgaatgactttaagtaaataaatatccatgctattcatcaggataagtgacctagtgaccagaataaaaaggatatatgttggtagcccctagcacagtatgcctcagcacagaggtttcttgggttactgctagtgaatgattccaattcttggccgtctgatcccacacattacataaattccaactcctgcatctgtttaggtgagctgttggctaaatggatatgtaatgaaattaaacaatatttttaaggtgctttttaggatgggttataccccctctttttctcctcctttccttgcaacctgccctctactcattctttttatgcatatttttgagagcctgaatatgctaggaagagggtttcagtctgttaagaattcacaaccttgtggagttgagatacaattaataaaatttctagtataatgaggtaagtattatgataccatgaaagcacagaggagaaacacctactctgttttgtaaggattagggaaagcaatttagagattatacctaacacaaacacacagatatttgcatagtatgtgagcacacgtttaaaaaaatgtaattttcaccctagaaataagacagtagtgattcagcgtgagttgatatgcctgtctccactataatgaaagaaatataacgtcttaagtatgggttgacatttgcaaactaactgatttttctagaagaatgatgccacataatttaaaaatattaatgcttttctaatctctagtgtattttcaatggctaacatagttaaaaccaaagtgaaatttttattatgtacataatcgaatgcaaattgtgtcaggctagtttaaaaaatatgaatgtcagtcctggcttggcaatttaataactatttggtttttgaccaagtcatttaacttaattaaacctcagtttcttctctgtaaacaagagaaggtcaagcaagatagttttaaaatttctttccaaatttatacgtctgacttttctaaaaaatctggtttacactaatacttaaaagaaattatcttaaaacaataaattataaatttattttttgctcttgctccctgtaaaatttgtccttgtcctgctagtcacatatagtccccactacaccagccaagacttgtcagactggttctgttgagatcatcagtgacttatttcctcacttcaattcagcccacaaagtcattgatagagctggattcacacacttggatgtagacctcgaccttcacaggactcttcattgctggttggcaatgatgtatcggtgagttagttccctttttctttctagaagtcttaaggtaacttttagtttaaaacagtatgagccacaccaaggaatgtgtagatctacagtttattatttttttaaatatagaaacatatttttgagattttacata

SEQ ID NO: 32104 - DNA, 2300 bp, Homo sapien
acaaaaagacataagtaaaaaaatgagtgagaactcccactaataaaaagtgagagtctcaaaaggggggaatgaaggaagagaaggaccctctcagattattttatattgttttatgctcagtacctgttttaagaaaaaacaacaaagaagtaaaaccaaagacaggcagcctggctccaggcctgaaaccaggcctgggcctgcctgacctaaacccagtagttaaaaatcaactcataacttagaaaccgatgttattcagagattccagacattgtacagaagaacactgtaaaaccccctgccctgttctgtttctctctgaccagcagtgcatgcagcacctgtcacatacccactgcttgcttaaatcaatcacgaccatttcatgtgaaatctttagtgttgtgagcccttaaaaaggacaaaaattgcgcacttgaggagcttggattttaaggcagtagcttgccgatgctcccagctgaataaagcccttccttctacaacttggtgtctgagaagttttgtctgtggctcatcctgctacacatgcacagagaggcaactggaggctgaggagtttcctttgtctggttgctgtggcttgctctctggggtggaggggtaggtccacaagggacacagacctgagccccacccaggttttggcaccagatataaggttcttgaattggtttgatccctgagagcatgccaacagacaacacgaggcagtgcggagcagcgtgctgttttaatgagtgcctgggtgcaggtgggctgaggcctaaaatggcatcagccccaagtgaggatgggacagtggttttatagttctctgtaaagagtaagtgtcccaatctaacgtgactgctatgtagtatctggatggcctcttgatcttcaagggttcatgtctccagccagggtaggtgtcttctggccggctctcttcctgcttctgctatcttgctgacacacgctgctgatgcaagcagccttgcatcttgggactgggcctgagaagggaggagttactcatcccttcaagctttcaggccccagaagaatctttgaaccccctgctccgctggccaccctcctaaaggatcactgtggtgccaggcaggaatgagctgcttgggtatccagagagctcccagtacctttctgctacttcctctacccctatattttgcttggcttggttctctaatttgactcagcttcacataaagtcaggaacttctcctgcaaacagaacttcagcttctccagtggggatgtgtattctggagagggggatcaccctttcccacttccattgttggggcactcacagtgtttgggatgtctcccaggtcctgcaggagcagtacgcttcctgcagagggtgtgtggatcctctcagaattgctggtctgtccttgcagttgacctgcagctaaaattcacaatgcaagcctctgcatgctgctctgtctggagctgcaatctagtcctgcatcccatctgccatgatcactggaaaaccctcatttattttttaaagggtccagaaaatgctaatctatagagatagaaattagattagtggttgcctagggtaggatggatgcaaaatttcagagtggggggttagaggctattgtatagaatcttttggagataatactgattattgtagtgaaagtaaaattctgtgaatatactaggaaacattgaactgtacacactaattggtgagtcatatggtatatgaattatgtgtcaacaaagttttagaagacattacttgcaccacgatattaaaaaatggcgtttgagttgtataattacttcttctctctatgtcaagggcaccgaacaggcaggagcctctcacctgccactgttcttaacagtattataaaataattacataagacaggttacttacgtattctaggtcataaaaattattgcttgactagagtaattgtaaatataaaagaacaccaaacacactaaaataaatatgaggtcaactcaaattttagcagttatattttaacttgattgatttttcctcagatataagtatgagaaatgacagaaagaaacaacaactggaaaagaagcactgcataagaccaggatgtctctgaaatggatgtcagtctttctgctgatgcagctcagttgttactttagctctgggagttgtggaaaggtgctggtgtggcccacagaatacagccattggataaatatgaagacaatcctggaagagcttgttcagaggggtcatgagg

SEQ ID NO: 32105 - DNA, 2300 bp, Homo sapien
gtgtcttcagcttttctaggcacatagtgaaagctatcagtgaatctaccattctggggtctggaggatggtggccctcttctcacagctctactaggtggtgccccagtggcgacactgggttgggacttcaaccccacatttcccttctgactaccctagcagagtttctgcatgagggtcccgcccatgcaggaaacttctgcctggacatctaggtatttccatacatcctctgaaatctaagcacaggttcccaaaactcagttcttgacttctgtacacctgcaagctcaacaccccagaaaagctaccaaggcttggggcttgcaccctctgaagcaatggcctgagctataccttggccccttttagccatggctggagctgaaacagcttggatgaaggacatcatgtcctgaagctgcccagagcatggggggccctaggcctggcctgtgaaaccattttccttcctaggactccaggcctgtgatgggagggtctgccgtgaagttctctgatatgccccagaaacattttcccaattttcttgatgattagaatttggcttctcattacttacataaatttctgcagacaacttgaatttctgcccagaaaatggggttttcttttctactgcaaattttcccaatttgtgtgacccacctgtcaagatatatccataggtgtgaaggggtggccagcacctcaacacctgtggttatatctcatcaggtgggatgagagactgagaaaagaaatcagacacaaagacaaagtatagagaaagaaaagtgggcccagtggactggcgctcagcataccaaggacctgcactggcaccagtctctgagttccctcagtttttattgattattattttcattatctcagcaagaggaatacagtaggagagcagggtgataataaggagaagatcaacagaaaaacatgtgagcaaaagaatctatgtcacaattaagttcaaggggaggtactatgcctggatgtgcacgtaggccagatttacatttctctccacccaaacatctcagtggagtaaagaataacaaggcagcattgctgccaacatgtctcacctcccaccaaagggtggtttttctcctatctcagaactgaacaaatgtacaatcgggttttataccaagacattcagttcccaggggcaggcaggagacagtggccttcctctatctcaattgcaagaggcgttcctcttttactaatccacctcagcacagacccttcatgggtgtcgggctgggggacagtcaggtctctcatcccatgaggccatatttcagactatcacatggggagaaaccttggaaaatacatggctttccacggcagaagtccctgcgctttctgcagtgcattgtgcccctggcttatcaagactagagaatggcgatgacttttaccaagcatactgcttgtaaacattttgttaacaaggcacatcctgcacagccctagatcccttaaaccttgattccacacaacacatgtttttgtgagctcgaagttggggcaaagtggctgggcaaagttacaaattaccagcatctcagcaaagcaattgttcaaggtacaggtcaaaatggaatttcttatgccttccctttctacatagacacagtaacagtctgatctctctttcttttccctacatatcccctttttctttttgacaaaaccaccatcgtcatcatggcccattctcactggtcgctgtctctctggaactgctggatacacctgtagactaacaacagagagaacagacccacaaggattaatacaaaatttgcaatagtggaacttccaatggttttaacccaagtgacggggttaagatttgtgaggctatcagcagctttcaccatttcctcagtttctggcaccagatttaactgggattttgatgcctcaaaaatttgttcttttaattttgaaatatctaaggtaatattatcttctcttccttgtagatggtgtctaaccgtgtcccagtgatattcagattcattacaggctcgaggtttaatacaaaaatctgacatattccagtcacaagtcaatctcccatccaaatgacagtttgtctaagatcattaacttggtttgccaatttttttatctatttgggtctgagaattccacaattttgaagaattcttttgccaattattgacatattctgcagtttgaagacaggagtgtaaagcaattacagcagccacagcagtagctgcgactgcaataaggcc

SEQ ID NO: 32106 - DNA, 2300 bp, Homo sapien
taaagctgagtgttccatttgcgggccatttggacccgttatctaattcatactgcgaccaggctttatcgtataaaaaagacaaggcacttatggcagatatcttgcctgaggcctaaggtttgcagatttttaatgaggcaggctggagggctgttttttggaattgaggaccgggagtttcccataatgaagggtagctcgagagaacagggaaaaaggagaccatcctggacagctggagggagacgataaaaggagttatcgtctccgctgcctttttggttcctggaacgggatgaaatggcttagaggcatccccctaagaccagatgaccagcgagtgcctggcgcacgctggcgccttcttggatcagtgttggatttttggactggagaaaccaagagaggccatgtagattttgccctgttaaccgggctccaagggaaacttaccagtaggcgagatcagtggctgatgcgcatgcacagagaggcgactggaggctgaggagcttcctctgtctaattgctgtggcctgctctctggggtggagggataggtccacaagcgacacagacctgagcccctcctaggatttggcaccagatgtaaggttcttgaatcagtttgaaccccaacagcgcgccaacagacaacaggaggcggtgtggagcaacatgctgttttaatgaacgcctggttgcaggtgggctgaggcctaaaatggcatcagccccaagtgaggatgggacaggggttttgtagtcctctgtaaacagtaagtgtcccagtctgttgtgactgctatgtagtacctggatggcctatttcttgatcttcaggggtacatctcttccagccagggtaagtgtcttctggccggctctcttcctgcttctgctatcttgctgacacacgctgctgatgcaagtggtcttgcatcttggggctgggcctgagaagggaggagttactcatcccttcaagccttcaggtcctgaggagaatctttgaaccccctgcatcactggccaccctcctgatagatccctgtgatgccaggcaggaatgagccgcttgggtatccagagagctcccagtgcctttctgctacttcctctacccctgtattttgcttggcttggttctctaatttgactcagcttcacataaagtcaggaacttctcctgcaaacagaacttcagcttctccagtggggatgtgtattctggagagggggatcaccctttcccacttccattgttggggcactcacagtgtttgggatgtctcccaggtcctgcaggagcagtactcttcctgcagagggtgtgtggatcctctcagaattgctggtctgttcttgcagttgatctgcagctaaaattcacaatgcaagcctctgcatgctgctctgtctggagctgcaatctagtcctgcatcccatctgccatgatcactggaaaaccctcatttattttttaaagggtccagaaaatgctaatctatagagatagaaattagattagtggttgcctagggtaggatggatgcaaaatttcagagtggggggttagaggctattgtatagaatcttttggagataatactgattattgtagtggatgtaaaattctgtgaatatactaggaaacattgaactgtacacactaattggtgagtcatatggtatatgaattatgtgtcaacaaagttttagaagacattacttgcaccacgatattaaaaaatgccgtttgagttgtataattacttcttctctctatgtcaagggcaccgaacaggcaggagcctctcacttgccactgttcttaacagtattataaaataattacataagacaggttacttacatattctaggtcataaaaattattgcttgactagagtaattgtaaacataaaagaacaccaaacacactaaaataaatatgaggtcatcaatcttttgttggtctccttggcatgcacctattcagactgttagtattatgtatttacttcaaattttagcagttatattttaacttgattgatttttcctcagatataagtatgagaaatgacagaaagaaacaacaactggaaaagaagcattgcataagaccaggatgtctctgaaatggacgtcagtctttctgctgatacagctcagttgttactttagctctggaagctgtggaaaggtgctagtgtggcccacagaatacagccattggataaatatgaagacaatcctggaagagcttgttcagaggggtcatgaggtgact

SEQ ID NO: 32107 - DNA, 2300 bp, Homo sapien; identical to SEQ ID NO: 32103

SEQ ID NO: 32108 - DNA, 2300 bp, Homo sapien
taaagctgagtgttccatttgcgggccatttggacccgttatctaattcatactgcgaccaggctttatcgtataaaaaagacaaggcacttatggcagatatcttgcctgaggcctaaggtttgcagatttttaatgaggcaggctggagggctgttttttggaattgaggaccgggagtttcccataatgaagggtagctcgagagaacagggaaaaaggagaccatcctggacagctggagggagacgataaaaggagttatcgtctccgctgcctttttggttcctggaatgggatgaaatggcttagaggcatccccctaagaccagatgaccagcgagtgcctggcgcacgctggcgccttcttggatcagtgttggatttttggactggagaaaccaagagaggccatgtagattttgccctgttaaccgggctccaagggaaacttaccagtaggcgagatcagtggctgatgcgcatgcacagagaggcgactggaggctgaggagcttcctctgtctaattgctgtggcctgctctctggggtggaggggtaggtccacaagcgacacagacctgagcccctcctaggatttggcaccagatgtaaggttcttgaatcagtttgaaccccaacagcgcgccaacagacaacaggaggcggtgtggagcaacatgctgttttaatgaacgcctggttgcaggtgggctgaggcctaaaatggcatcagcccccagtgaggatgggacaggggttttgtagtcctctgtaaacagtaagtgtcccagtctgttgtgactgctatgtagtacctggatggcctatttcttgatcttcaggggtacatctcttccagccagggtaagtgtcttctggccggctctcttcctgcttctgctatcttgctgacacacgctgctgatgcaagtggtcttgcatcttggggctgggcctgagaagggaggagttactcatcccttcaagccttcaggccctgaggagaatctttgaaccccctgcatcactggccaccctcctgatagatccctgtgatgccaggcaggaatgagccgcttgggtatccagagagctcccagtgcctttctgctacttcctctacccctgtattttgcttggcttggttctctaatttgactcagcttcacataaagtcaggaacttctcctgccaacagaacttcagcttctccagtggggatgtgtattctggagagggggatcaccctttcccacttccattgttggggcactcacagtgtttgggatgtctcccaggtcctgcaggagcagtacgcttcctgcagagggtgtgtggatcctctcagaattgctggtctgttcttgcagttgatctgcagctaaaattcacaatgcaagcctctgcatgctgctctgtctggagctgcaatctagtcctgcatcccatctgccatgatcactggaaaaccctcatttattttttaaagggtccagaaaatgctaatctatagagatagaaattagattagtggttgcctagggtaggatggatgcaaaatttcagagtggggggttagaggctattgtatagaatcttttggagataatactgattattgtagtgaaagtaaaattctgtgaatatactaggaaacattgaactgtacacactaattggtgagtcatatggcatatgaattatgtgtcaacaaagttttagaagacattacttgcaccacgatattaaaaaatgccgtttgagttgtataattacttcttctctctatgtcaagggcaccgaacaggcaggagcctctcacttgccactgttcttaacagtattataaaataattacataagacaggttacttacatattctaggtcataaaaattattgcttgactagagtaattgtaaacataaaagaacaccaaacacactaaaataaatatgaggtcatcaatcttttgttggtctccttggcatgcacctattcagactgttagtattatgtatttacttcaaattttagcagttatattttaacttgattgatttttcctcagatataagtatgagaaatgacagaaagaaacaacaactggaaaagaagcattgcataagaccaggatgtctctgaaatggacgtcagtctttctgctgatacagctcagttgttactttagctctggaagctgtggaaaggtgctagtgtggcccacagaatacagccattggataaatatgaagacaatcctggaagagcttgttcagaggggtcatgaggtgact

SEQ ID NO: 32109 - DNA, 2300 bp, Homo sapien
tacaggctaggaggcctagaaggaaaaaatagttttgtaggccaggcccagcaccttgctgctttgtgcagtctcagtactcggtcccctgtgtcccagctgtggctaaaaggggccaaggtagacctcaagccatggtttcagtggggcaacccccaagccttggcagattattagctttgatgtgggattgagcctgtgggtacacagaaatcaataattgaggcttgggaacctctgtctagatttcagaagatgtatggaaatgcctggatgttcaggtagaagtttgcagtagggatgagaccatcacagagaaactctgctagggcagtatgaaaggaaaatgtgtggtgtgagcaaccccctgcagccccccaccccaacacacacacaaacagagtccccaccagagcactgcctagtggagctgggagaagatggccaccatcctccagaccctagaatgatatatccacaaacagtttggaccacccaactggaaaagccacagacactcaatgccagcccatgaaagcacccaagaggagggctgtaccctgcaaagccacaggggttgagctgcccaaggccatgggagcctacctcttacatcagtgtgacctgtatgtgagacatggagtcagagaatatcattttggaggtgactgccccttggattttactgccttacctggatttcggacttgcatgggacctgtagcccctatgtttcggccagtttctgccatttaggagtgttatttacccaatgcctgtatcctcattgtatctagaaagtaactaacttgcttttgatttttaaactcataggcagaaaatacttgccttatgtcagatgagactttggactgtggacttttgagttaatgctcaaatcaactaagactttggggaactgatgggagtgcatgatttgttttgaaatgtgaggacctgatatttggaaggggccaagggaagaatgatatgacttggctgtgtcctcacccaaatttcatcttgaattgtagctcccataattcccaaatgttgtgggaagaacttggtgagtggtaattgaatcatggtagcacatctttcccatgctattctcatgacggtgaataagtctcttgagatcttacagttttataaaggagagtttccctacacaggctcccttgcctgcttccatgtaatacatgactttacttctcatttgcctttcatcatgattgtgaggccaccccagccatgtgtaactgtgaatctattaaacctctttcctttataaattatccagtctcaggtatgtctttattaacagcatgacaacaggctagtacagtatcctaaaagtataaaatcctagaataaaatcaagagaatagaacataattgaactaaagagcttctgtgcaacaaaagtaagtatcaacagaataaacagatgacttacagaatgggagaatataattgcaagctactcatctgataaaggtctaatatcaaaaatctgtaaggaacttaaacaaattgacaaaccatacacaagcaactccattaaaaaaatgggcaagggacatcaagagagaattctcaaaagaatatatacacagggatgtgttcaagatggtcaactagatgcagtcaggatgtgcaactgccaccaggggaacaccaggttttttatcatatcatcataatttgaacagatctttggagagaaaatgctgaatgtggatggagaaaaggaatagtcactgaggctgaagcagaagaaggctgagaacactgaatggggtgccttaatacagctgattctctgccctgaacagtttctagggaagacctgagtgaaaggactagtagatagctccctctcactgtagacatctggaatcctggctagatggggctccataccttcagggacatgtggactggcagaggggtctcccagagattacacagagatgaagctgcagacaaaaagccagggacctttgtgcataggtcacctctggtggagcccaaccataagtgcccacataccatgcacatctatttctaataggttctggccttagctaaccaatggggagagaggagaacctactttcaaatggaactgtgacacatatgttctgcaggaataccggcccaccagaaccctcaaccccatggcccctctctggctgccccatagaagcttgtacacagtacagcctctgtttgccagtttgagtgctttgctccatctgaatgcattctggcactttggaagcccttcaggt

SEQ ID NO: 32110 - DNA, 2300 bp, Homo sapien
caaaaactctattgtcaacacttaaatcattgtgacattgattgacattgatatgtaccaagttagagaaagttagaaagaaagatagcattttaacaagttgtctaagaaatgggcttttttgtttcttatgctgacagttgtattctagctctgagtcctgtgagaatgtgctggtgtggccagtgaaatacagtctttatatcaatttaataatgatacttgatgaacttgctcagaaacaccaagaggtaactgtgcttgtcaccttcagcttccatcctcattgattccaacaatttgctgttaaatttgaggtttatcccacatcttttactgagaatgaacttgatttcatttttatgaaattgatcaagatatggacatacaagtttccaaagagtacattttggcatatgattcaaagatacaaaaaacacatattatgaatgttctgatactgttcaaaagctctgtgagtatgctgttttgaacaagaaacttataaggaacaacaagattccagaatttatgtcattcttgcagatgtcatttctcattagtgagctgctatctgaacagcttaatctgttaaacatttgttatacatttggtctactatcatccatttacaactggcagtatgtaccaagaactctgtggaggactttcattacctccttctgatgtagctgttgtcatgtcagaacttagtaccaaaatacatttacagaaagatgaaaaatcttttgcattttcttcattttaactttgcatttgataattttaacaaaaagaagtgtgatcagttttacagtgaagtattaggtaagttagtggttaatttattcccttttccctccaatatgtggaaggaaactttcctttctttgtgtctgttagagtgtgttaatgaattaaaatagaaaataaccttttttgttatttgaaagatgaggtttggcaagttggtggagacactgaaactctcatacattgttggtgagaatagaaaattattcacccactgtgaaaaagtctagcaattcctcaaaagtttacacatatatttaccacataattcaataattgcctttctaggcatatacccaagaaaaataaaaacatgtctacagaaagcatgtacatcaatgttaatcaacgctattcataatggccaaaagtggaagaaaaacaatgtccgtacactgataaatgaatgaataaataaattgtgtttataagtagcatctgatactatttggcaataaaaatgtgaacgctatttataatggccaaaagtggaagaaaatcaatgtccatccactgaaaaatgaataaataatttctgcttataagtagcatctgataaaaagcaataaaaatgaaatccttatatacactattctatggatggtcctttaaaaacattaaactaaataaaagtagccagccacaaaagaccacatattatatagtttcatttatttttaaaaagatcctgaataggcatatttgtagaggcagaaattagattactggttgcccagtacagtgtgggtgcagaaattcaggtggggagatgacagttaatatacaggattttttttttttttagataaaactgattgctatgttggatgcacaagtctgtgaatttactaggaaatatttaattttaaataatcattcatgaatcatatggtatgtgaattatacttcaacaaagttttacaaaatattccttgaaccaagatattcaaaaattctatttgcattgtataattacttcatctctcattctgtgtcaaggggcctgcaggactctctcacttgccactgttcttgacactattataaaatacattatataaaacacgatatttgcaaggtcattaaacttaggtggatgacaccaaatataaacataaaagaaacatcaaacatccttgagtaaatatgaagtaatcgaactttgtctccttgccatccatgtactcaggatgctcatataatgtatttactttgaattgaaggagttatgttttaacttgattgatttatctctgtatataagtatgagaaagaaacagtgactggaaaagaattatcacattgcacaaggatggctctgaaatggactacagttctgctgatacaactcagtttttactttagctctgggagttgtggaaaggtgctggtatgggccgcagaatacagcctttggatgaatatgaagacaatcctgaaagaacttgttcagagaggtcatgaggtgactgtactggcatcttcag

SEQ ID NO: 32111 - DNA, 2300 bp, Homo sapien
gggaaaaaaggcaatggagaggaccctttagaatgaactcctgaagtataattaggattctaaaagacaacctccaaggagaaaaaaaagaaaaaatgttcagaataaatcaaggactatataccgaaaggagatccaggactcaagaggacataccagttccactggagaagaagctcaaaattggagaggcattcagtgggcctctgttgctaccttagcttcaagttcaggcaagttttatggtgtcctgagttttgtctgaggccccacatgttcaagtgtcaagttgttattgatgaaaagagtcgaacactttaaaatatttaaagaggtttattctgagccaaatatgagtcagtaatggcctgtgatttatccctccagagaccctaagaacatgtcatcatggtgctcaggctacacagttttaatgcaatttagagtgacattagacatcaatccatacatgtaggttatatattgacttggtctggataggcaggacaactgggagtggggcttccaggtcataggcaaattcaaggattttctattggcaattggttgagttatattgttgtctaagttatagaattaacagacaagaatgtctgggttaagataaagggctgttaataccaaggtgttatcatgcagataaagctgtcaagcaacaggcttcagagagaatagattgtaaatgtttcttatcaaaattagtgagtctgttctattggttttaaagtctgcgttgatggtagtgctagtgagtttttcctgaattcagaaaggggggagggtataatgaggcatatcctatcccaccaccccacttctcatcattgcctcaactagtttttgagattaactttgaaatgctctttgctgagagtaagggtccgtttagatggttggggattcctaaaattttattttttgttcacatctacatacagttgttgaaaatttgaacagtaactacaggaaaaataacccagttagatgatattgattctgaaaactgctctaagttttgtgcataatattttacctaatgtcattatcaaacttctgcttattaagacagaaaccacaaccatgtcttttctcctacacattttttcctatctcagatattatcagtaaattcaaattttaaattaatttcttgcatttaactattaacaatttatgtttcattctattaggttgacatgtctcagtaactaatatataatttttatcgttttccctgttttaaactcttacctttacataccactctgtgttgagatgcaagagtttcttgctaaagaaaaggttgatcttgtgactatcctttaaaacttgagtaaataattatttgcctataaattatgattcaaactcataattttttatttaaaattatgttctccaatttcaaactaactttcttctgtaacgtcctgctctgaactttctctgtgaccactactcactggaatgattttcaaatatcctatacttttgtatgcttctatcgattgtgaaatgcttcctttggcaacagtaaatcctatcaaagctttcatctcacctcctaagtcaaatgccttattaaagcttttattatttcatattaaagcaattgtgcattttcccctctgaaatactgaacactttgtacttattatataaaattagtcaaaatagttacccaaactctctaagtatattctcagtaaacctttgtattgtccttgtgagcaagggatgtgaaacatgtgctgtcctaaaccatctgatgccttggacttagtgtggaatgaatgtaagtgtgattgtgtgcatgtttctgcacatgaattattaaatctaaagacttgaaaaatttttttctttatcatcaatccaggtaataaaagtatatttatgtattttatttctaagttctagagggttggaacaacttttccctgatacattgcatttttttgataccttcagtacatgttaaactggcaaccaccagtgaactttactcttaaaatattaatttttaacttctgtgcttatattgtcatttcaactccttgcttagtaactacaaaaccattgcagatcagtgtgtgagggaactgccatcatgaggtctgacaagtcagctttggtatttctgctcctgcagctcttctgtgttggctgtggattctgtgggaaagtcctggtgtggccctgtgacatgagccattggcttaatgtcaaggtcattctagaagagctcatagtgagaggccatgaggtaacagtattga

SEQ ID NO: 32112 - DNA, 2300 bp, Homo sapien
acaatgtttaaaaaattgcaagaactgtagatatctaaattcacataattttcatattttgtttttttattatttttaatattttatgaatcttacaataacttaacaacttctactgtcttcttcaaaaggttatattggttgtgatttttgtgacatgactataaatactttgacaattttcctgtcaagtaatatcccctccctttgaagtttggcaaaccttgtagctgtctcaacagaaacgatatagtggaaataatgcagcttatcttacaaagttctgttggaaacacaaagtgttctctctctctttctccctctctctttggatcttttgtttgtatgtttctttttctctctacacctcctcaactccatctgtagtccccgtaataaatgacaatttggtagagagacacagatatatgcccaagaaatcctggtagcccactagcactttgagcccttcaacttgaatcattaagtatgtaagtgaatgatcttcagataattatagaccgaggcaccgtaggaaagtagctacctaagaaactctgtggaaggaacacataattgagctcaaccaacacccaaactctgagcgatgataataaaatgattacagttgttttaaggcctgacatttggaaacaatttgtcatgcagtgatatataactggaataataaatctacatattttaaattatacatttgtaataaaattacaattaatatatagctacatgagtggaaaatagggaatattatattttgaaaatatctgtacctcaaatagaagactcagcataacatggtggttaagagctggcactctggatccagatgcccttcattcaagtctctgagaaaccactacataatgatgtggggttggacaagttacttggactttatttgcttcaacttcctcaccaatgaaatggcattggtggtcatagtattatcaacctcatggggttgctgaaaggatgaattcattaatatttcaagcacaaaaaacaattgtatatacagcaaagtaaaatttttttgtaacattgaatgtggcaaagtttttagatatgacaccaggagcaggagcaaccaaaataaaattgataaattaggtttcatcaaattaaaatttttcacacatcaaagaacaccttcaataaagtcaaaagagaaaccagagtttgaagtatctatttgcaagttacatacctgataagtgacttacttatataaaaaaaaataaagaaagcttacagctcaatgttaaaaagacaaataacataatcaaaaaatgtttaaaaatctaaacaggaattttaccagggaatatgcaaatgtccaataagatcatgaaaaaaatgttttatgttggattacatagttaagagaaatatataacatcttcccaatcacaagtaacttttcctttgtgctcatagtcagggaaataaattctcatggctaaacagaaaagctgcctggaataaatacaagtgatttagcagagctgtaacaatataaaattaaagataagtaaacaaataacactagtcttcctaagaatccatactagggattaaaatattataaatgaagagtctggtttccatattttttaacagtatctttcccactactctgtaaagatgctattttaattcttattatatatactaagtcaaacacacatgaaggaagagaaagaccctctcatattattttatattgttttatcctcagtacctgttttaagaaaaaaacaaataagtgaaatcaaagataggcagcccggcgccaggcccaaaaccagccctgggcctgcctggcctaaacctagtagttaaaaatcaactcataacttagaaaccgatgttactcatagattccagacattatatagaagaacattgtgaaactccctgccctgttctgtttctctctgaccaccggtgcatgcagcccctgtcaagtaccgcctgcttgctcaaatcaatcacgaccctttcatgtgaaatctttagtgttgtgagcccttaaaagggacagaaattgtgcatttggggagcttggattttaaggcagtagcttgctgatgctcccagctgaataagtcccttctttctacaactcggtgtcttgagttttgtctgcggctcctcctgttacatttcttggctccctgaccgggaagcaacgtgactgacagacagctgaggcagccccttaggcaacttaagcctgccttgtggagtgcccctgtgggggactccagccagcctga

SEQ ID NO: 32113 - DNA, 2300 bp, Homo sapien
cctgacctcgtgatccgcccgcctcggcctcccaaagtgctgggattacaggcgtgagccaccgcgcccggccggtttctaaggcatataaaaagttatgtttacacaatgctatagcatattaagtctgcaataatattaagtctaaaaaaatacatgccttaatttaaaaacacttaattgctaaaaagtgctaatgatcatctgagtcttcagtcagtgcaacttttgttgatgaagattctcatatcaatgttgatggttgctaactcattttggtggtggccgctagtacttagcatggctgtggcaatttcttaaaaataagacaacaatggcatttgccacatacattaacccaccctttcacaaaagatatttttagcatgcaatgctgtcagatagcattttacccatagaagatcttctttcaaaattggaattaatcctctcaaactctaacgctgctttataaagtaagtttaagtaatattctaaatctcctgttgtcattcaacaatgttcataacatcttcaccaggagtagattccatctcaggaaacaagtttctttgcccctccaaaagtagtaactcctcacttatttgttttatcatgagatttcatcaattctgttacatcattaagttccacttctaattatagttatctttctagttttattatatttgcagttacttattccattaaagttttgttataggaccaacagtttcatatgcttactgtccaataatagtccaattacactgagacgtcagatttggcagcaaagaaggagtttaataattgcagggcactgagcaaggagataagaagagaaccctaaatccagctcctcaaggagttctgggttggaggttttaaggagatcatagatggtgataggctggaaaatttgggtaattgattagtcagggtaatagggtaaagtcatcagaacaagaaactacattatttgctgagtcagttccttgtggggtcctctagatcagctggcatcagtgaagtctttcagatcagctgacatcagtgagatccttcagaccagccgagtcagtagttttagcagtatgctggacctgaaggaatacctcaaaaggaaagttgatcatttcataatgtttaagttaatatttatagaaggattaagaggaactatagtcttgtaacagggtctgcataattctaggacaacagccaaataactgtgaggaagtgagtcggagaacaagctaacctaatgattaatgctgaatgtactacaagcttggtttacttttctctttttctttctttatctttgattactttaacaaagtttaaaaagatagtgtcatcttgaaactctcaatatcttacatgatggttgtaagaatcaacatgtatacgctatatcataaatgaacctttaaaatattatgttacataaaagaagccagtcacaaaataccacatattgtatgattctatgcattaaaaattgtccagaataggcaaatctatagagatagaaattcaattagcaattacctaggacaggggaaatgcagaaactaggggtggagagaaaaaggctaaggactatagggcttattttggggagataaaagggctctccaactgattgttatggtagatgcacaattctgtgaatatactatgaaacattaaattttacacaataattgataaatagtatgatatttaaattacatgtcaacaaagtttacaaaaatatgtggaccatgtttagtcatttaatctttagttttgtgtcaaatggactgcagaaacaagatctgtcactgctactgttctggacactcttctaaaatatattgcataagacagatggcatgtccatacaagatccttgatattagctgaaggatagcactcataaacataaaagggaaattaatcacatctgtgtgaacagatcatttaccttcatttgtctctttgccatccacatgctcagactgttgatttaatgatattgtatgtactttgacttataagggttacattttaacttcttggctaatttatctttggacataaccatgagaaatgacagaaaggaacagcaactggaaaacaagcattgcattgcaccaggatgtctgtgaaatggacttcagtaattttgctaatacaactgagcttttgctttagctctgggaattgtggaaaggtgctggtgtgggcagcagaatacagccattggatgaatataaagacaatcctggatgagcttattcagagaggtcatg

SEQ ID NO: 32114 - DNA, 2300 bp, Homo sapien
aatacttttctaatttcttatgcctgtcttactttaatctcttaatcctgttatcttcataacctgaggatgtatgtcacctcaggatcactgtgataattgtgttaactgtacaaattgcttgtaaaacatgtgtgtttgaacaatatgaaatcagtgcaccttgaaaaagaacagaataacagcaattttgagggaacaagggaaaacaaccgtaaggtctgactccctgtgggatcacacaaaaacagccgtattttcctgctttcagagagcctataaatggacttgcaagtagggaagatatcgctaaattcttagcctagcaagaaatattaatattagtactctgggaaaggaatgcattcctggggggaggtctaaaaccagccactctgggaatgtctgtcttatgtggttgagataaggactgaggtatgccctggtctcctgcagtaccctcaggcttattagggtggggaaaatctccaccctggtaaatttgtggtcagaccagttctctgctctcgaaccctgttttctgttgtttaagatgtttatcaatacatgcaccactgaatatagacccttatcagtagttctgctttgccttttgtcctgttccctcagaagcatgtgatctttgttctgccttttgccctttgaagcatgtgatctttgtacctactccctgttcttacaccccctcaccccaccttttgaaacccttaatagaaaacttgctagtttgaggctatgctgggcatcacggtcctaacaataggtgatgtcacccccggtagcccagctgtaaaattcctctctttatactctttctctatttctcagctggccaacacttatggaaaatggaaagaacctacattgaaatattgaacatgggttcccctgatacacacacacacacacacacacatatatatatacacatgcatatacatactacgtatatatatacaccatggaatactactaagctgtaaaaagaaacaaactaatggcattaacagcaacttgcatgaagtgggagagcattattctaagtgaagaaattcaggaatagaaaactgaacatcatcaattgtcacttctaagtcagatctaagctattaggatgcaaaggcataaggatgatgtaatgggatctaaggattcagatgggaggccgggagggggtgagagatacaagactatacattcagtgcaaggtacacttctcacatgatatgtgcaacaaaacctcagaaattaccactaaaaaacgtacgcatctaatcaaacaccacctgttcccaaataactattgaagtaattaaaaatatcagaataaaatcaaccagacaaatatttttacatatctggaaaaaatagaatttgctcatgaaaccaaagatgtggcaaaacagttcaattttacagtaggaagcaggtaagagtggctatatttctaattccacataatttccactgagaaatgacatgagctcttaaaacagtaaacatttggccatcaattttagcaaaaaatgtgacaatgaagctgcatgcagtgtaaaagtaaaggaatactacttatctcaaaatatcaaaaggaagagagagactttatatacaatttaactatgtaatagtttctttagcaacagttaaaacaacagaatcctgttcaaaatgaagccaaattattctgaggatgtgactactgatactgtcagtagacttcttaatgttcttgtgtttatgtaaaatgtgtgaaatatagttaagctgagtaaattttttcatgtaacttgtgaattcaaacaacaaatctcaatataagtgcaacaaatttcaatatgagctcaaatggctttatattattttttaattttcctagtattttcttcattgccacaaaatatttctaaccattacctgggtggtaaatctctgaaaaacaaatttttacttgacaaggtagatttgaaaattttttttttttttttttttttgtcacaggaagaaagaaatcttgcataacaatcttttctttcttgctggaataaactgaagttgtcctatctatctggttttccagcttcaaatgtcagacataactaatctctttttcccttcttcccttttctagcaaacttccagaaacaaaacagacaaaactttgtgatgataaatatcacagttgccacacaggccagcagaaacccaatcacatccaaagagtggtactggaaccaggtgaggtcatgggctgcaactcgaaggtgtttggctccttt

SEQ ID NO: 32115 - DNA, 2300 bp, Homo sapien
gttctggagacagccatatttacaataagaatgaaatttattattcacacatgcaaacacaaaatcattcatccttttctttattcacttgctttccaaaacctctattgtcaatacttaaatcattgtgacattgattgatattgatatgtaccaagttagagaaagttataaagaaagatagcattttaacaagttgtctaagaaatgggcttttttgtttcttatgctgacagttgtattttagccctgaatcctgcgagaatgtgctggtgtggccgatgaaatacagtctttgtatcaatttaatgttgatacttgatgaacttgctcagaacaccatgaggtaactgtgcttgtcaccttcagcttccatcctcattgattccaacaatctgctgttaaatttgaggtttatcccacatcttttactcagaaggaacttgatttcatatttatgaaattgatcaagatgtggacatataagtttccaaagagtacattgttggcatatgattcaaagatgcaaaaactacatatcatgaatgttctgatactgttcaaaagctcattgagtatgctgttttgaacaagaaaattatgaggaacaacaagattccagaatttatgtcattcttgcagatgtcagttctcagtagtgagctgttatctgaacagcttagtctgttaaacatttgttatacatttggtctactatcatccatttacaactggcagtatgtaccaagaactctgtggaggacttacattacctccttctgatgtaactgttgtcatatcagaacttagtaccaaaacacatttgtagaaaggtgaaaaatctgttgcattttcttcattttgactttgcatttgagatttttaacaaaaagaagtgagattagttttacagtgaagtattaggtaagttattatttaatttattcacttttccctccaatatgtggaaggaaaccttccttttttgggtctgttggagtgtgtttataaattaaaataaaaaataacttttttggttatgtgaaagacaagggtgggcaaggttgtggagacattgaaaccctcatacattgttggtgagaatagaaaattattcactcactctgaaaaagtctagcaattcctcaaaaggttatatttacatttaccacataattcagtaattgcctttctaggcatatccccaagaaaaataaaaacatgtccacagaattcatgcacatcaatgttaatcaatgctattcataatggccaaaagtggaagaaaatcaatatctatcaacttataaatgaataaataaattgtgtttataaatagcatctgatacaatttggcaataaaaatgaagtccttatttacactattctacggatggtcctttaaaaacattaaactaaataaaagaagccagccacaaaagaccacatactatattgttccgtttacttttaaaaagatcctgaataggtgtgtttctagaggcagaaattagattactggttgcctagtgcagggtggatgcagaaatttggtggggagatgagaactaatacacaggagttttttgtttttttagataaaactgattgttacgttggatgcacaagtctgtgaatttactaggaaatacttaattttaaatactaattgatgaatcatatggtatttgaattatactccaacaaagatttacaagatattcattgaaccacgatattcaaaaatgctgtttgcattgtacaatcatttcatctcttattctgtgtcaagggctctgcaggactctctcacttgccactgttcttgacactattataaagtaggttacataaaacagggtacttgcaaggtcattaatcttaggtggatgacagtgaatataaacataaaagaaacataaaacatccttgagtaaatatgaagtaatcgaactttgtttgtctccttgccatccatgtactcaggatgctcctataatatatttactttggattggaggagttatattttaacttgattgatttatctctgtatataagtatgagaaagaaacagtgactggaaaagaatgatcgcattgcaccaggatgactctgaaatggacttcagttcttctgctgatacatctcagttgttactttagctctgggagttgtggaaaagtgctggtgtgggccgcagaatacagccattggatgaatatgaagacaatcctgaaagagcttgttcagagaggtcatgaggtgactgtactggcatcttcagcttccattctttt

SEQ ID NO: 32116 - DNA, 2300 bp, Homo sapien
tctggagacagccacatttacaataagaatgaaatttattattcacacatgcaaacacaaaatcattcatccttttctttattcacttgctttccaaaacctctattgtcaatacttaaatcattgtgacattgattgatattgatatgtaccaagttagagaaagttataaagaaagatagcattttaacaagttgtctaagaaatggacttttttgtttcttatgctgacagttgtattctagctctgagtcctgttagaatgtgctggtgtggccgatgaaatagtctttgtatcaatttaatgttgatagttgatgaacttgctcagaacaccgtgaggtaactgtgcttgtcaccttcagcttccatcctcattgattccaacaatctgctgttaaatttgaggtttatcccacatcttttactcagaaggaacttgatttcatttttatgaagttgatcaagatgtggacatataagtttccaaagagtacattgttgacatatgattcaaagatgcaaaaactacatatcatgaatgttctgatactgttcaaaagctctgtgagtatgctgttttgaacaagaaaattatgaggaacaacaagattccagaatttatatcattcttgcaaatgtaagttctcagtagtgagctgctatctgaacaccttaatctgttaaacatttgttatacatttggtctacaatcatcaatttacaactggcagtatgtaccaagaactctgtggaggacttacattacctccttctgatgtaactgttgtcatatcagaacttagtaccaatatacatttgtagaaaggtgaaaaatctgttgcattttcttcattttgactttgcatttgagatttttaacagaaagaagtgggatcagttgtacagtgaagtattaggtaagttagtacttaatttattcacttttccctccaatatgtggaaggaaaccttcctttttggggtctgttagagtgtgtttataaattgaagtaaaaaataacctttttggttatgtgaaagacaagggtgggcaaggttgtggagacattgaaaccctcatacattgttggtgagaatagaaaattattcacccactctgaaaaagtctagcaattcctcaaaagattacacttacatttaccacataattcagtaattgcctttctaggcatatccccaagaaaaataaaaacatgtccacagaaatcatgcacatcaatgttaaacaatgctattcataatgaccaaaagtggaagtaaatcagtatccatcaactattaaatgaataaataaattgtgtttataaatagcatctgataactatttggcaataaaaatgaagtccttatttacactattctatggatggtcctttaaaaacattaaactaagtaaaggaagccagccacaaaagaccacatattatatcgttccatttacttttagaaagagcctgaataggtgtatttctagaggcagaaattagattactggttgcccagtgcagggcgggtgcagaaatttggtggggagatgagagctaatacacaggagttttttgtttttttagataaaactgattgttatgttggatgcacaagtctgtgaatttacaaggaaatacttaattttaaatactaattgatgaatcatatggtatttgaattatacttcaacaaagttttacaagatattccttgaaccacgatattcaaaaacgctatttgcattgtacgatcacttcatctcttactctgtgtcaagggccctgcaggactctctcacttgccactattcttgacactattataaaataggttacataaaacagggtacttgcaaggtcattaatcttaggtggatgacagcgaatataaacataaaagaaacatcaaacatccttgagtaaatatgaagtaatcaaactttgtctccttgtcatccatgtactcaggatgctcctataatatatttactttggattgaaggagttatgttttaacttgattgatttatctctgtatataagtatgagaaagaaacagtgacttgaaaagaatgattgcattgcaccaggatggctctgaagtggacttcagttcttctgctgatacatctcggttgttactttagctctgggagttgtggaaaggtgctggtgtggaccggtgaatacagccattggatgaatatgaagacaatcctgaaagagcttgttcagagaggtcatgaggtgactgtactggcatcttcagcttccattctttttgatccc

SEQ ID NO: 32117 - DNA, 2300 bp, Homo sapien
tggagagtcttgcattaatgttgttggctactaactcatcagagtagtgactgctagtagttggcgtgactgtggcactttcttaagggtaagaaaacaatggcatatgccacatccactaacccttcttttcacaaaagatttctgtttagcatacatttttgtttgatagcaattttcccatagtggtacttctttcaaaactggaatcaatcctctgaaagtctaatgctgctttattaagtaaatttaagtcatattctaaatctattgttgtcatttcagcaatgttcacataatcttcaccaggagtagattcaatctcaagaaacaactttcttttctcttccataagaagtaactcctcatgtatttgttttatcacgagattgcagcagtttacttacgtcttcaagttccacttctaatttgagttatctttctatttccaccacatctgcagttatttcctccactgaagtctttgttatagggccaacaggttcatatgcccactctgcaataatagaccaattacaatgagacattatgttttgcaacaaagaaagagtataataattggagggcactgagaaggaagatagttggaggccctcaaacttacctcctcaaggaaatctgggctggagtttttaaggggttaatggagggtgatggactgaaaaattggagtcatagattagtcaggataatgaagataaaatcagtaggagttggaaactgcattctttggtgagtcagctccttgtggggtccttgagagcagctggcatcagggaggtccctcagaccagctgagtcagtagtttcatcagtatgctggacctgaaggaatacctcaaagagaaaaccacatttcaaaatgtttaagttattatctatagaacagttaagatgaactttaatcttgtaacaatgtctgcataattctaagacaatagccaaaaaactattaggaagtgagtcagagagcaagctaatgtaataattaatactgaatgtactacaggcttggtttactttttttttttttttcccctccctttgtccttcattaattcaacaaagtctataggaatagtttcatcttgaaactctctaaatcatacatgatggttgtaagaatcaacacgtaaatgctatatcataaatgaacctttaaaatattatgctaagtaaaataagccagccataaaatatcacatattgtgtgattccatgtatttaaaaaatgtccagaataggcaaatctatagagacagaaattcaagtagcagttgcccaggataggacaaatgcagaaagaaggggtagggagtaaaaggctaaagcttatagggtttatttttaggagataagagttctctaaaattgactcttacggtagaagcacaattctgtgaatatactatgaaacattaaattttacacaataattgataatttgtatgatatctgaattatacgtcaacaaatttacaaaagtttttgaaccacatttagctattttatctttagttctgtgtcaaagagactgcaggaacatgagcctctcactgctactcttatgcacactattctgaaatatattacatgagtcaggtgatgagtccatccaagatcattgatattagctgaattacagcacttaaaaatctagggctgggtgcggtggctcacgcctgtaatcccagcactttgggaggccaaggagggcagatcacaaggtcaggggttcgagaccatcctgccgaatacagtgaaaccccatctctactaaaaatacagaaaaattagctgggtgcggtggcaggtgcctgtctgtagtcccagctactcaggaggctgaggcaggagagtggtgtgaacctgggaggaggagcttgcagtgagctctcaaaaaaaaaaaaatccaaaaagaacattaaacgcacttgtgtaaacaggtcatctaccttttatttgtctctttgtcatccacatgctcagactgttaatataatgtatttactttgaagtgtaaaagttacattttaacttcttgactgatttatactggatgtcaccatgagaaatgacagaaaggagcagcaactggaaaacaagcattgcattgcatcaggatgtctatgaaatggacttcagctcttctgctgatacagctgagctgttactttagctctgggagttgtggaaaggtgctggtgtggcccacagaattcagccactggatgaatataaagacaatcctggatgaacttgtccagagaggtcatgag

SEQ ID NO: 32118 - DNA, 2300 bp, Homo sapien
ctccaggcatgttgtaggcaagccccactgtgtaagttattttatctgattatgtccaaaaaaggaaagaaacatgctcactgaagcccacagcatgtatatgtatatgtatatgtcttttgctggttacaaaagacaagggtgttttagggtcgaccttgcctgtttatctgtgcttgaaggttgtgcagcttcaggctgcccttttgttaaaaagaattttaccaacggaccttgttctaactatctgcctaactggtttcttgctttctcctctctcaatagcacctgaataaaatactatattttagttgtctaaaactggacctgattccctgccaataaataaatagaagaaaataacatcagtgaatcatgacatcctagtgaatcatgacaattattttaaagtttcttgccaagtcactatgaaccagactgacaccagaaaggcaaaaattttgtgcacaccataacatcttctgcagagaaacttcaatggaaatacactcaaggaattttatgattactctgttaaactttgaacagtactttataaaagtaattgttttaatgaaacagttgatgtttccatacagattatctttggtgatgggagagcttagaagagacatttttatgatattactaaaaatatagaatttataatttcagaagatttattaacatgaaaaggatcactctgcttattcacagacatatgcatacaaacataatattttcacagagatcgctttacttgaattacttgatccgatattatccaatgtgcgttacacaattttgtattgtgttagcatgcttttggcaggctgctattcatatggattccttagttggtaaggggacgtgatacattttgatgtggcaatctatcccagtggttaatacaataggctgtgggagtcagagatccttaagactgctaccagcagttcctatcttttatttattcttatttttatagatttaggggttcaagtgcagttgtcctgtttgggtacattgtgtagtggtgaaatctgaggttttagtatacccatcactcaagtagtgtacactgtatttccattgtacccaataagtaatattttcttattttgctgtaggaacatggcaaattattcaatctctttgggcagtggtttctttttctttgatgtgggagtaattataaaagatccataattggataatttttaaaataaggaagaaatgaaattaacgtgttaaagagtttgcgtaatgtctgacataacaaggacttaataaacgctagcagttgttgaaggctgaatctagatgtcaagtagctgtttttcatgcaggctagatagtttttgaacagcacttttggtagatgtatgcttgacttagtaattctcttaaatagctcctattcactactagcattacctataatctcttgcacatattttattttattcatttatttataatattttcttgaggattaacaaactatttttgtaaacatattactaaagtagtaatataatactatatgtgttatacatattatttataagtattatttgaatttataaatatttgaatttataaatatttatagtaatatatttatacatattatttgacaatcttatatattgtaactgttattataatgtttaattgtgataaatggaattatattcatgcattaaaaatttaaaaacttacagcattaacatctttaaatttctgaatgagttttggtcctatctgaggtttcaatacctaggcctgaatgtagagttgagatgtacagaagctttatccaatttaatagtaaaaatgtaacaattatgaaacacacaaaaaagggttggagtatcaagttcaaaaggaggattagacagcaggaatcataactaaaacactaaaattaaaacaacagatttgagaagtaagacacattacccataaatctgtaaatatcctaaaatatggagctactatgactagtatcactttctagaaagaaggcttttaaggatattaatggtttgcctcaaaattgagaaataattttgtctttcctttttttctttaaaagcagagaaaaacatttgcttcacatctcatcaaatcttctgcatcaagccacatcatgttaaacaaccttctgctgttctcccttcagataagtctcataggaaccactcttggtgggaatgttttgatttggccaatggaaggtagtcattggctaaatgttaagataattatagatgagctcattaaaaaggagcata

SEQ ID NO: 32119 - DNA, 2300 bp, Homo sapien
ggtgatgactctcaatgagcatgctgccttcaagcgtctgtttaacaaagcacatcttgcaccgcccttaatccattcaaccctgagtggacacagcacatgtttcagagagcacagggttgggggtaaggtcacagatcaacaggatcccaaggcagaagaatttttcttagtacagaacaaaatgaaaagtctcccatgtctacctctttctacacagacacggcaaccatccgatttctcaatcctttccccacctttcccccctttctattccacaaaactgccattgtcatcatggcccgttctcaatgagctgttgggtacacctcccagacggggtggtggccgggcagaggggctcctcacttcccagtaggggcggccgggcagaggcgcccctcacctcccggacggggtggctggccgggcggggggctgaccccccccctccctcccggatggggcggctggccaggcggggggctgaccccccccacctccctcctggatggggcggctggccgggcagaggggctcctcacttcccagtaggggcggccgggcagaggcgcccctcacctcccggacggggcggctggccaggcggggggctgacccccccacctccctcccggacggggtggctgccgggcggaggggctcctcacttctcagacggggcggctgctgggcggaggggctcctcacttctcagacagggcggttgccaggcagagggtctcctcacttctcagacggggcggccgggcagagacgctcctcacatcccggacagggcgacagggcagaggcgctccccacatctcagacgatgggcagccgggcagagacgctcctcacttcctagatgagatggtggccgggaagaggcgctcctcacttcctagatgggatggcggctgggcagagatgctcctcactttccagactgggcagccaggcagaggggctcctcacatcccagacgatgggcggccaggcagagacgcttctcacttcccagacggggtggcggccgggcagaggctgcaatctcggcactttgggaggccaaggcaggctgctgggaggtggatgttgtagcgagccgagatcacgccactgcactccagcctgggcaccattgagcactgagtgaaggagactccgtctgcaatcccggcacctcgggaggccgaggctggcggatcactcgcggttaggagctggagaccagcccggccaacacagcgaaaccccgtctccacccaaaaaatacgaaaaccagtcaggcgtggcggcgcgcctgcaatcgcaggcactcggtaggctgaggcaggagaatcaggcagggaggttgcagtgagccgagatggcagcagtacagtccagcttcggctcggcatcagagggagaccgtggaaagaggagagggagagggagagggagagggagagggagagcggcagcatcttttaagaagaaaatatgctttacatttctttaatacatttataagttaaactgatggtctaaaggaatgtgctagtttccctctggtcttcctgactttcccaggccttcataggtataactcaggggcaagagcttggtggttgtagttgtgtgtaagtttgagacgagtgctcttaaaaaatggattgatttccactcatttcttgtttatgtgattctgcataccaaaagaagaaaaaaccaagagttgtggaaatgattagagtatttgtgtttctgatgccaaagtaattaatcatttcatctttaatatgtttgacatttaatgatattagaaactcacgtttattccagatggaaacatactgacacatgcacaaacacacacaaaaccaatttttatttctgttatgaccaaaattgttagaagacattcttataagatatagagaagcaacaattttgatccactaacccttcatgttctttccctctgcatttctcagacactttgaagcttgcagagagcttaaaatctaaacagcctgtgcttgtgctgacttatggccaccaccctgaaccacttcctggcttcctggctttgctagctgttgaaacagtggaacttgcctcatgtgtgtgtatgtgtgtgtgtgtgattgtgggtgtgggtagtttaacctttttatatcttagctgcctgtaaactcagtgattgctacgttcagatcaaaccttgaacttttttttttctggtgccaggagccttcctgtgctccccattgcctgccagaaccaccaccgtttcccatggttactct

SEQ ID NO: 32120 - DNA, 2300 bp, Homo sapien
cttgatccagagaaagtgtgtgctacagaaaaagcccaatagtcacaaaaaagccacagtaattgttttgggaactctgtcacacagaagtgccagctttacacttgttttcagtgtttcagagtataacagcagtatgtctgtctgcatatctgcccacattctttttgtttgacattattataatacttaataaatgtacatattttcaagatatctgcccaaattctgagggtcaagataaacattaaaaaccggtccttatctgagatccatttttttttttgacattgactcaaacattttgtaactcagtctgtacccattactcatggagaagaatgaggtttcagggccatcttgcctgttgttttgtttttatcagtaagtgaattcttaacattagaaagattttctaagaataaatgtgtattgaacatctgtggttgccagaattacatgagttaggagcatttgtgacatccctgcaaccaattgtttacaagtgaaaaacagacagatgtattgaggttaaatctgtttatattagcttgtgctcattttctgatttttttggactaaaaaatgttttcgctaaacaataaaggaaacttcatagattcttgtcattaaaaaaataaagtgaagctatgctgcaaggttaaaaattatattctgtattaaatttgtatatatatacttaatttttaaaggtacatagtaggcatatgaatgagtaaatttgtacatttaatgattgtttttcaacacatattttatttaactcaaataatatgacagactgcataaaacaaagtaaaatgaaaatctaaatttgggtccctggttactccttttctaccttaattttctattatgaaaagccccatttttcagaaaccacttaacacctcttattttgcataaggctagatattgctttctataacaactatagcccccttaacttcttatatttcttgaataaatcagccacttttattcagtaaatacatattcaatgcctagcctactagatgccagaaaaaaatgctaattacagagtaagaccctgttttcaagctatttataatttaaaaagtactctggacaagcaaacattgatttacaacacagtaaaataaatactagttaggagaaagttcaaagtttaaaagtcactaagagaaacatagagtcttgtaagagtgagcctctcaaaggaaatgtaatctaacagtaattaatagagaaataagaaataacagggttggaggtgttgatggggtggagcaaaggataattttcttaagtgacagagtaggtgcagaaaaatgaaaagaaaggtaatgcatttgtggattccacaaacccttggccatttatttttctaattctcttgtgtaaattccaagtgttggtagctatcattacctgaaaaattcacagtatgctattttgtggttgggagcagagagaagtcaggtttctaaaataataatcgaaaggtgagtgatgtttacattctttctttagctgtcatctgctttttaaaattttcaggtctgcttaagagttaaaggcaaagagtttaaataggtgttttccaattgacatgttaagatacaacccaatgacttctttggcaggtcttaataaactgagctaggtctgattgagggtccttgctgtcttatttctttcctcattggcttctctttcttcactccaataagtttattcttttgaaagttaaccatagtcatgctattatttgtcaatgagtgaataagggattctcccttcccagtctctcttcccaggcctcttctttctcatcttttccttttctccctccttcttccccaacccctgacggcagacttgggaatttgaatatgagccaaataattaaaaaaataacagcaggatatttctacatctccatgaatgaacatgactctgtgtggttactgcagctgcaggtatgcatttacatctacattaactattgcatcatggacttcatgaagccaagcccccaaattaatctccacctccttctctggcattcaggatataaactcaccagaaacattccaaatgcagaagtggttctcatctttttttgcagcttaagatctgccttggtatttgaagagatataaactagatcaatttctttcacaggatcaactaaacaggttgtacttttttattattaatatcaatacttagattttagatatataaaatatagaatgaaaattatgtattacaaagctcttaaaaataaaata

SEQ ID NO: 32121 - DNA, 2300 bp, Homo sapien
gtgatttttgtacattgattttgtatcctgagactttgctgaagttgtatatcagcttaaggagattttgggctgagatgatgggattttctaaatatacaatcatgtcatctgcaaacagggacaatttgacttcctcttttcctaattgaatgccctttatttccttctcttgcctgattgcccaggccagaacttccaacactgttgaataggagtggtgagagagggcatccctgtctcgtgacagttttcaaagggagtgcttccagtttttgtccattcggtatgatactggctgtgggtttgtcataaatagcccttattattttgagatatgtctcatcaatcccgaatttattgagagtttttagcatgaagggctattgaattttgtcaaaggccttttctgcatcttttgagataaccatgtggtttttgtccttggttctgtttatatgctgtattacgtttattgatttttgtatgttgaaccagccttgcatcccagggatgaagcccacttgatcatggtggataagctttttgatgtgctgctggatttggtttgccagtattttattgaggatttttgcatcgatgttcatcagggatattggtctaaaattctttttctgttgtgtctctgccaggcattgatatcaggatgatgatggcctcataaaatgagttagggaggatttcctctttttctattgattggaatagtttcagaaggaatggtaccagctcctccttgtacctctggtagaattcggctgtgaatccatctggtcctggccttttttttggttggtaggtatagcttgattttgagttaggagtaaaataaatcagttttcctgggtacacttctgggaaaagacaaaaccaaggtactgtaatacagctgatgcttgtctcagcctcttaaatgaatcacagtgaataggaaacactagtaagttgttgaaatttatgtgatgtagtcagtaaggaaaacactaactaaagagaactttaatatggaaaagtacatctcttctgatccccaatctgaaattaaccagtctgaaatgtgtgttaacccagaataatgcccttttcatatgactgtgaaaaggctgtaaatatcattactatttttttatttcctaaaatatatagtatgattcttttcctgtaaaaaagcaaagtcgcagtcaacaacaatttttaaaaaccctctctattacagatattttcctcaggatatagtatttttctacattgtataatgatagttaacataaaggaacagagtctgggataggagagaggcattttcatttctttcctttatttacttttaaaaaacaggaaatcagaggtatggcataattttccaaaatcttttaaaattaaaattaatgaataaatattacttctaattagtcaatgttataatttgttaaataaatactatcacaaccaatatgcctaaaagaaagcaaacaaaaaattgtctgctgtagcttaaatatcaccaaaacacataggacagttggatatccttctttgaaaaaaagatcagagcatatacagtataagttaatccataaagcagatagtcacaataaataatagaggacaagctgcattttaaaaggtaaataaatgatgaattcttttaatggcctggtacactgatagaaattggaacgtttctaagaccctattttgtccccaggatttccattataggaattgaatttttcaaaagatatacagagaattttattaatatgttcctgtcaaattatcccttcaacataaaatcatgtttttataatagccataaatttggaaatttttgtattttaatttgcaataatgccactttatttcttgtgtaatctgttatcatagcatgaatcactccctgttgaaaattctcagaatttcctgggaaaggaattggacagaaaattagtttcctatttgggagaattcttagaatttaaataaacctattggttgaactgaaaccacaaaattagcattttctaattaccacatttaaatagcgtaaagcaaagagatcggccatcatcttggtcatcaacacaacttgcttctctccagacttgggcttaaggtactgcgtttacatacagcaaaattgctatcattttacattatctaatctctttcttccactgtttactaagtatatttgtaccatttccatatgtttgcaaatattaaaacttcttatgattttctggcaccttaaaaatccttttgcaaattctgatacc

SEQ ID NO: 32122 - DNA, 2300 bp, Homo sapien
tccacatcctctccagcacctgttgtttcctgactttttaatgatcgccattctaactggtgtgagatggtatctcattgtggttttgatttgcatttctctgatggccagtgatgatgagcattttttcatgtgatttttggctgtataaatgtcttcttttgagaagtgtttgttcatatcctttgcccactttttgatggggttgtttgtttttttcttgtaaatttgttggagttcattgtagattctggatattagccctttgtcagatgagtagattgcaaaaattttctctcattctgcaggttgcctgttcactctgatggtagtttcttttgctgtgcagaagttctttagtttaattagatcccatttgtcaattttggcttttgttgccattgcttttggtcttttacacatgaagtccttgcccatgcctatgtcctgaatggtattgcctaggttttcttctagggtttttatggttttaggtctgacatgtaagtctttaatccaccttgaattaatttttgtataaggtgtaaggaagggacccggtttcagctttctacatatggctagccagttttcccagcaccatttattaaatagggaatcctttccccattgcttgtttttgtcagctttgtcaaagatcagatagttgtagacatgcggcattatttctgagggctctttcctgttccattggtcttggtatcagttttggtaccaagtaccatgctgttttggttactgtagccttgtagtatagtttgaagtcaggtagcatgatgcctccagctttgttcttttggcttaggatttacttggcaatgtggcctcttttttggttccatatgaactttaaagtagtttttttcaattctgtgaagaaagtcattggtagcttaatggggatggcattgaatctataaattaccttgggcagtatggccattttcatgatattgattcttcctacccatgagcatggaatgttcttccatttgtttgtatcctcttttatttccttgagcagtggtttgtagttctccttggagaggtccttctcatcccttgtaagttggattcctagggattttattctctttgaagcaattttgaatgggagttcactcatgatttggctctctgtttgtctgttattggtgtatatgaatgcttgtgatttttgcacattgattttgtatcctgagactttgctgaagttgcttatcagcttaaggagactttgggctgagacgatggggttttctagatacacagtcatgtcatctgcaaacagggacaatttgacttcctcttttcctaattgaatgacctttatttccttctcctgcctaattgccctggccagaacttccaacactatgttgaataggagtggtgagagagggcatccctgtcttgtgccaatttttaacgggaatgcttccagtttttgtccattcagtatgatattggcagtgggtttgtcatagatagctcttattattttgagatatgtcccatcaatacctaaattattgagagtttttagcatgaagtgttgttgaattttgtcaaaggccttttctgcatctattgagataatcatgtggtttttgtctttggttttgtttatatgctggattacatttattgattttcgtatgttgaaccagccttgcatcccagggatgaagcccacttgatcatggtggataagctttttgatgtgttgcataaatctttccatacatatttataacttctttatgccttttgaaaaattcaatactgtaaatgggacttttttaaaagtggggatagagttgttagctgaaaaatctgaatagctggcaatgaagtttggaatttgaaaaatgagaatcgcaagccagaatggattttgacctccttcatgtgatataacttctatttagtatttattctatttattttctaaatgcagatatttttgttatatattatctctcttttttttttgttttataaaaagtaaccttacctacataagaaagtatatccaattgaccaatcttccaccattccattttttctacattcacaggacttagtagccatgaaggtcctcatcctcgcctgcctggtggctcttgctcttgcaagggaggtatgtgcacaagaaaaaattcctaaacaatcaataaatagtggactatatgcttatttgtagagaataacatcaccaacattttttactgtataaataatgaagaatttcatgagaattctcttggcttctatca

SEQ ID NO: 32123 - DNA, 2300 bp, Homo sapien
tattaagatgtatcaatatttcttaccatgtagtttgctgtttgttagtgcctttgggctattagtttgctttatgttcactagaacatgaataccttagatctactagaacagtacctagtattgttggataaatgaagtggtgaagaaaaccagaggtaagaaaggagaagagagggagaagaaagaaagaagaaaagaagaaaatcatttgactttccccaagtaatcgaagcagtttatttttaaaatcagatatagttcagtagttactgaaccatgggccaggcacaatggctcatgactgcaatcccagcactacttggaggctaaggcagaaggatttttgtggtcaaaagttcaagaccagcatgggcaacatagcaagaccaagtctccaccaaaaacaatttaaattaaattaaccaagagtgataacacatgtctgtagtcccagctaaacatgaggctgaggttgtaggaccacttgagcccaggagttccaggcatctgtgaactatgatctcaccaatgcactcaagactgtgctatgcagcaagaccccatctctggaaaaataaaatagttactgaaccctatgtaacttttttccactcagaatgtaaagagattgtgtttgttttacacatgagaagaaactttgtatctataatgcttataaatctcatgacaaaagaataagaataatatctatctaatttaatttgaattatttatttgccttaagaaatgatttatattttcttgtatattacccagagagtaatcataatttccagtaaggctgttccaatacagcataaaaatttacctaataaatacttccttaaaaaatctgatacaaaattaaaccacaaattatctttactggttaaagcctaaggataactaatgcattcaagagacaaatatgtggttgtttttttttttatgtttttgtggagatacgggtctcactatgttgcctaggctattcttgaacttctatgctcaagcaatcctcctgcctcggcctcccaaagtgctgggattacagacatgagccactgagaccagccttgtttcaaacttcacagtacccaaagaatcacctggagataatgttaaaatgcaaacgccttaggacaaccccaagattctgactcagcaagtttgcgaaggtggactaagaatttacatttccacaggctccagctgatgctgtctgtgatgttcccatatggcacactctgaggaacaatgcactaggctgtataacttacctcaactttatatataagtttttgatattcgtttcttagtacattgagttatccaaccagcagtgagtagggtaatttttacacaaattttcctaggaatgtaatgaaaacattttttccttcactctagtgtaatcatgtcaacacatggctgctatggaaaaatatgtagccttaaaaactccaggaaattaaattgaatttccaaatacatatattcagtcatatgtgagatatgtatcagtgagcacttagagtcatttcaccataaatataataattttttatcatatagtacccaaaagattactgaatttggcaaatgtttacgttcactttgtaacttaaaatattctaaagtcaatagaagatggtaaaagtatgagataaataatgatttgaagaaaaactcttgaagtatatgaagactgtaattttattatgccagttaccacgagttatcagagaacatgtaaaatcttgataacatggtaagtattatttgtgtcatagagttgttccaccttggacacatacttgtggaaacatctttatcactgcaattatttctatgcctggtttcctccagcatgcttttctgtcatctgactcactcagcgctagactaacagtgggattaacatgcagtgggtacagttgtttcctggttactttgtcttcacaatcatctattgcaaaatcactttgttacggttatttttatcatttgtagagacagattttgggcattacttttagtttccataatgtgatctcataattgccattatttaacaaaaacaaatgggggacttcagagtgtttaaatacattggccctctagggtagcacatcatctcttgaagcttcacttcaacttcactacttctgtagtctcatcttgagtaaaaggtaatatgttcatgtataatcgaatatgttgtcttaatctagagtgttgcttcctaaaatcttttgaaaactaattataaaaatgtgtatttatgtaatgataat

SEQ ID NO: 32124 - DNA, 2300 bp, Homo sapien
aaaaataattaaaaaaaaattagtcaggagcagtggtgcatatctgtagctctagctatttaggagtctgaggggcggttcaattgagcgctgtagttccagacttcagtaagctatgagtgcgccactgcactcaagcctgggtgatgaatgcagactatgtatctataaaaaaaatagtcactgactcctatgtaattctttttcattgagaatgtaaagagaatggctttgttttgccccagagaagagaccttgtatctctgatgtttagaaatttcatgccaaaagaacaagaataataatataatttacttgaattatatatttgtgagttatggtctcactctccaagaacaataggccattttagaagactgatggaccagaacatagctttatattttataattaagtaaaacagttatcttgtcctctacaagcaagcgtcatgttctttgaaaaggccatgcctttcaattacaagggaaatatcaatagctactgccttatcacagttgtggcaatacactggtatgtgaattatatattatatataaattacatgtgcctaataatattaggtacaataacatatattgttgtatattacctagagaataaccataatttccaatgggactgttcaaattagcataaaacatttacctaataaatatttcctttaaaaaccacacaaattcattttattttattttattattttactttaagttctaggatacatgtgcagaatatgcaggttttttgcacaggtaaacgtgtgctatggtggtttgctgtatctattaagccgtcgtctggattttaagccccgcatgcattagctatttgccctgaggctctccctccctccccagccaccagccctgatgtgtgttgttccctttcctgtatcagactcaaattaaaaacataatctctattagtgggatcaatctaaagacaatgcgtttacaaatctgttatatagtttttcaaactctaaagtacacaaataatgttctggacatgttcttaaaattcaggttccaggtgtacaccccaagattctgactcagtaattttggaaaagtagactaagaatttgcatttcaacaggtatgagctgatgctgattgtgatggtagtatgtgggacatcctgaggaacaatggactgagctgtacaacttatctgaacttagaagttagtttttaatactcggttcttagcacattgaattaaacaaccggtagtgagtaggtgatcttttatacatgtttgtctattaatttaattaaaattctatttttctctttctgtctagtgtacttatttcaataaatgacctctgtgaagatatatgggcccctgaaaactccagggaagtaaattcaaatttctaaacataagaaatcagttttatgtgagagatatgtgaccaagcacctagaaacgtttgacattaaatatgagaatacttttatcatatggcatccaaaagatgactgaattttggccaatgtttacattcattttattacttaaaatattctaagtcaatgtaagcaggtaaaaatacaagataaatgatgatttgtaggaaaacttttgaagtgtagaatgactccaattttattatgccaattatcactatttactagagaacgtgtaaaatttttcataacatggtaagtattatttttgacatagcgttgttccatcttggacatatatttgttgaaaagtagtagatggtattctacagaaacatctttatcactgcaatcatttctatgcctggtttcctccagcgtgcttttccgttgtctgactcactcagggctagactaacactgggattagcatgtgatgggtccattcgctttccggttgccttgtcttcacaatgatctattgcagaatcacctggttaagtttatttttagaatttgtagagacagattttgggcattactttccgtctcgatcatatgatctcataattgatgttattttgaaaaacaaaagggagatttcaaaaaacaaaagggagatttcaacgtgtttaaatacatcagccatctaggaaaggacatctcttgagacttcacttcagcttcactgacttctggattctcctcttgagtaaaaggtaacatgttcaagtacaatctaatattatatattagcataagcttttgtttgctaaaatcaatagtaacccacttatgaaaatgtatattatctatgataatttcttataaagaaataattaccatttattggcatctgaa

SEQ ID NO: 32125 - DNA, 2300 bp, Homo sapien
ctgaagttagaaatctgaggaaagaacaaggtacacttcaatggaacctaagtattagagggtgtcaaaatatgaattttcaagtaatttcttgcacaaccaaactgttcaagttagcatacaatttattttactctttctaaaataaagctgcctattttaagccataaaacaaatctatatctgttaagtgtcatgagttcccagcttgtatcgtcatttactactgtgtaatagtagaaaaggcacttgacctctctggagctctttctccttctctactttctcatcctcttcccactcctcctcttctttctatgaagttaatagaaaattggtcacaaaagaatactaatacttcaacctatccactaaattcaaatgaatgtttcaaaaacaaaattggttatggcatcacagtttatcacatgattttattatagaaggatagaagtagaaaaataaacatataagaagaacagagaaaagcacaatgcctgtctctatcagcaaataaaatatttgtatgttggtagcttttgagctacatagaacatattcatataaaaaacaatccaatgtttcatttttcagtttccactctcttattcaccaatgatagacttttcttgcctttcataaaaaagatatataaaccaaaatgagttgatactttaatatagcatattaattatagagaagtttacccttcactcattttaaagatgtcataaagctaaaataactaatttagcatgtcatcatccaaagaatgcctccattctatttaatcataaatgtggctaagtcaatttttacacatattcttgaattatgaaattaagatattaattattttctcattttcttcttttccaagggagctgattcacatgcaaaggtaagacattttcatttactggaaaacttgataattaatcatatattgaatttttaatcttttctttttatttcatagagacatcatgggtataaaagaaaattccatgtaagtgttcttctgataatgtgcactctgaataagttttcttctctgactatttattctcctagaataattgatagttatctctcaaatatatttatatcattaattgctaaagtgtacattgatttcatttattcttgttacagaggtaaaaggtcacaaaaatcttgtgttctaacagcatttcaacggaaactcaattacactctgaataagtcaattttcaattattctttgagagcttaagtatctttctcttataaataattacattgacctaaagaatagttcctaattctatgaataattcctaattctatgaagtataacatatgcctaatgaagcatagaggctacccatgtaatgtggtttctatcttataatatttgaggatgataaagtctttaaattaaacttactgtgctaaattagacagaaaattttatttaacatttttctaaatgtatgtataaaaatatcatattattttgacctctaatatcagtatgaataggggttcaaaagttctgcttactaatatagcaagtatatgtgttaaaaaagcactaagtaaaatgatgcataaaaaggaatgaggactgtttgtgttaacagcagtgggtatgaaagaatgtaggagttgtaagagaaagtaagctcattaaaagaataagatgaagaaacaccacctaagttggaaacggtaactttctcctccccgttatactcaatgttgggcaaaatagtaacttggaggtaatgttgttaagaagatttaaaacctgtttggagaggttgcctataatcagtgttccaacatttattattgccacaaaaatatcaacacacagtaaatactttatcatttttacttgcttttaaacatttttctgaaagaagaaaaatgtaactaaaaatttgaaaacatttatgtagataacacacgaggtcataacaactttaacaatctaagctttcagtgacagtttttgtgaagcatttttactgtcattgcctctattctctgcaatttgctctctccttttgtgtgtatgcaggaaaagcatcattcacatcgaggctatagatcaaattatctgtatgacaattgatatcttcagtaatcacggggcatgattatggaggtaagctgactctagttacttttctttctagaagtatcaacactgacagttaaaacaaggaaaaattaaaaaaaagccattaagccaacaatcattccagtttaagaaatgtagcgtgggttagctctttgaagtgtgttgattt

SEQ ID NO: 32126 - DNA, 2300 bp, Homo sapien
agaaaaacgaactagggaagaaatgagaggaggcagagaagaaaagaagaaaggaaggaaaccgcttgacattttgtaattaattaaagcagggtatattttttaaatcagacatagttcagtagttactgaaccatgagatggtgcagtggctcatgactgtaatcccagcactctggaaggcttaggcacgaggaccacctgaaatcaaaagttcaagaacaatgttgacaaaattgtgaaacccatctctataaaaaataaaattaaaaatttaggctggtgcagtcgtgcgtacctgtgtctctagctacttaggagtatgaggggaggtttgcttgagccctgtagttccagactgcagttagctatgattgcaccactgcactccagcctgggtgatgaatgcagcctatgtacctattaaaaaaaaatagtcactgaatcctatgtaactttgtttcattgagaatgtaaagagaatgggtttgttttgtgccagagaagagaccttatatctctgatgcttagaaatttcatgccaaaagaacaatttaaatctaatatacttgaattacatatttgcctaaataaataatttacatttttgtatattacctatagaataccataatttctaataggactgttcaaattagcatagatgatttatctaagaaatatttcctttaaaaactcacacacaaattcattttattttattttattttactttcctattttactttaagttctgggatacgtgtgcagaacatgcagatttgttgcattggtaaacgtgtgccatggtggtttgctgcacctatcaacccatcatctaggttttaagccccacatgcattagctatttgccctgatgctctccctcccttccccaccaccaggccctggtgggcgttgtttccttccctgaatcagacacaaatttaaaacacaatttctaattagtgggatcaagctaaagaccatgcgtttataaatctcttaagtagtttttctatctttaaagtacacaaagagtttcctggacatgttcttaaaattccggttccaggtgtacaccacaagattctgactcagtaagtttggaaaagtagaataagaatctgcatttcaacagctactagctgatgctgatcatgatggtcgcatgtggcaccctctgaggaacaatggactgggctgtataacttatctgaactttagaaaagagtttttaatactcagttcttagcacatcaaattctccaaccggtagagagtaggtgaatgcttatacatgtttgcctatgaattaaattaaaattctgtttttctctttctgtctaatatagttatttcaacaaatggcctctataaatatatatgaacctcagaaaactccagggaagtaaattcaaatttctaaacataagaaatcagttttatgtgagagatatgtgaccaagcacctagaatcttttgacattaaatatgagaatgtttttatcatatgatatccaaaagatgattgaattttggcaaatgtttacattcactttattacttaaaacactcaaagtcaatgtaaaggtaaaaatacaagataaataatgatttgtaggaaaacttttgaagtatagaatgactccaattttattatgccaattatcactatttactagagaatgtgtaaaattttgataacatggtaagtattatttttgacatagcgttgttccatcttggacatatatttgttgaaaagtagtagatggtattctacagaaacatctttatcactgcaatcatttctatgcctggtttcctccagcgtgcttttccgttgtctgactcactcagggctagactaacactgggattagcatgtgatgggtccattcgctttccggttgctttgtcttcacaatgatctattgtaaaatcacctggttaagtttatttttagaatttgtagagacagattttgggcattactttccgtctcaatcatatgatctcctaattgatgctatttagaaaaacaaaagggagatttcaacgtgtttaaatacatcagccatatagaaaaggacatctcttgagacttcacttcagcttcactgacttcttgactctcctcttgagtaaaaggtaatatgttcaagtacaatctaatattatatattagcataagcttttgtttgctaaaatcaatagtaacccacttatgaaaatgtatattatctatttaaatctagtttacttgaattgcgtatttgcctaaataaataatttac

SEQ ID NO: 32127 - DNA, 2300 bp, Homo sapien
aatatactcatgctccctctagtttaacatagacaatatagttacaacacatatttgtattattgtttactaattctatcatttgtatcacttctaggactatttgtattgattgattatttttcttcactgcaagtcatgttttctttctttgttacacgcctggtaattctttattggctgacagaccttgtgattagcttgtttgagccctgaatttttttattcatttaaatatcattgagctatgttctaggtcatagtaaagttgcttttaaacaattttcactttagacttgctttaaagctttactaggaaatgcagaacagaaaattcattcatttataggtaaacttaacacattactcaagcaatacctttctaagtattctaaccatgccatgtatactacaaggtatttccactctggctgatggtaacatgatctattcccagtcctgtttgtgctccaggcattataccatctgcttctttctgatgttctttccccagcctcatagagttttcttgcattcattcctgctaatcaaaactcagcagataattaaagataaccctctttagatctccagaattccttccctgtgcaattccttcctatctttgaaatcttttcctcttcagtattaggtattaattttagaggcttccatccattaatctcaactatatctcttcaattaagggaattgcttattctatttaaacgcttcctttctctgttgcaatttgtacattttttcctcataataaggtgagataattattatagggctcatctcactcttttcccttctcttgggaatcaccatcctgcatttcttattgtataagacaggaaaatttttatatcatttattttgttatttgtctagttactgaaaacaggagttaaggtaaatgcagtccctgatacgcaattctggccaaaaactgaattccagagtaaaagtgttttgaggttttcacaaggccctaaaagtcctgcgttatttggctccttttgtttctctgacctcaggttaaccagatttactcaaccccagccacactcttctatttgttatttttaaacatgccacgcatgatcctattttaaggcctgcactaggttgctcttctcccagcattcttcctggtttatacatttacttctttacatttttactcttttgctcagggaggatttcctagctatgctatctaatattgaaaaccccttccctaacaaaacttcttatttctttttccaattccgttttccccttagtatttatcactatcaaaccaactatagattacttaattatcatgtttattagtctccctttcagttaaaccataaactccataaagcatggaacttttcttttttcatgactctattttatgtgttcaaaagagttcatggcatatagtaggttctcagtaaatctttgttcagtcaaatatagttatatattagcacctatctacatataaatttttatattttcttttaattaaatgtaaaaaaccatacaccaactgtataaggaattgtgtttgtatgagaatcacaggatattttcacagctttgtccaattttaagctgatgttttaaaacagaaatttatcaggcatttccaatgagaatttgagagacggaaattcttgctcacacaaaatgaggagtcacaaagacacaagaattcatgttgtgctcaggaaagggtctgaatgaggcataaagagtaacaagaaatggggcacaaatattagctatgggaaatttgataacaggagacaaggaaataaaaaaatacttatcttaaatcaaaaaactatttcatgaatgaggctacatacaaaatacagccaattattaagtattataacatcctcatttcctgttatcatgttctaaatcaaactgtcctaaagcactccttggaatttgtggaacaaaaatcaagaaaaaaatttctaaccattctgacttctcagaattcaagtgcctttttagatattttaaagcacagaattaccctattatggaggaacaaggtttaaatagtattaaaataacccactgcagattttccactgtgtagtccactggtcttctatttgggaaacaaggtaatatcttcatatattatttttcttgtattaggtgctaataaaaaatattttaaagcttattactcttctgtacaataaaaatgcaattatttttaaaggtgtcaatatcaacacaccataaattgcttaagaaatatttttatttatgacaaa

SEQ ID NO: 32128 - DNA, 2300 bp, Homo sapien
tgcaaattaaaaatagaagtaaaccaagatgttgcagcaacctaagacagaatgcagcctgtgacaaataaatccaacagtatatataaatatatggcatagcctcaccaatgcgggtaggagtaaaggagtaagctaggaaacttcaggaaacatcatcttgactggatgttgtaacaacaaaaaaaataatatttgctaatttcattgagacattctctttgacttataggctatctaaaagcatgatgcttcgtttcctcatttttggtaatttttaagatatatttctgttattgacacatagcttaattacattggactgacaaaatacttcttattatttctatttttaaaaatgtattcaggtgtgttttatggccctaaatatggtctatcttggcatatgttccatgtgactttcagaagaatgtgtattctattgttgttcagtggagtgatctatgaatgtcaattagagcaaattggttgatagtgttgttcaaatcattttttttctcttactggtttactccctcagtttttgtctgagaaaatatttctccttcacttttgaggaatatatttcctggacctagaattatgtgttgacagtattatttcattacatttaagattttactattttcttctttcttgcatggtttctgacatgcaaattacataccgtaattcttaaccttatttttctgtagataatcagtctttttttttctgttgctgtcttcaagatttctctttgtctttggttcccagcagtttcaatacaatatgctgtatatgtgtgtgtatgtgtgtgtgtgtgtagaatttattcctaatgttctcagggtatcttgcattggtgcttttagtttctgcccataattttggaaagtttttgaccactatttctttaaacgtgttctgctttgctcttttttctcctaggattacaaatgttagagaatttgctatttttcaatttgtgtttcaatttggtgatttctacgacatatcctcagggtctctaatcctttcctaggttgtgtcaagtctatcgattagccagtcaaatgaattctttttctctgttagtaaatttttatttatagcatttctagttattgttacagtttccttctctgtgctgaaattatctatgtgatcttgaatctcatctatctttttcttcagaatatttagtataataatcagttatgttaaattccctgctcgagagtttcaacatctgtgtaacaactgactcttgttctgattattgcttttttaaaaatcttcagaccttgcttatacctttctgtgtgtcttgtgatttttttattgaatgcctgatttatggtatagtcattagataaacatgagcccactttctttctacgagggccttagtataggggggttgtgttaatctagtccacaagagaggaaattaaatacttagacaaaaggattttgtcactcctgacaaacaacactgaacctagtatatgacctaagaaggtatccagctaaattacttcacgttactctgatgtatgacgtgtgcactgacaaccattagtatgcctcaattattctttgatataacatattactagtgttgttaggttgtcagtaataaattcacaggatagaagggttctttcagcttctaatatttgtttccattagctaattcatgtttataatgctaatacaggaagagaaaccacaccattgtttaaaaatatatttatgttattctattacatgcttaacataaaatgaagtaatgcataacctttcttcatcataatttccaattgatgtcaaaacaaagtcaagtaatgaatatttgcaaagtcaatttaggaattaagcttaatgtagttcctaaatttgtctttattgtcattttatgggaataatttccctatttttatggttctctgaaatgaaggaagtaattcacagccaaatcagtcaaattcataggtttttaaattatttttctcagagtcaatgctaatttgtttcaaaatgaaagagtaaacattaagttagggacttataaatatccctggaaagaaagggagtgaggcacattgtccacgtcaagaccaagagctgcatccactagtttgcaccctggaaacaaggtatgcttttttttatgttaagatgttcccattttaaaaatttctctagtgggtgcagcgcaccagcatggcacatgtatacatatgtaactaacctgcacaatgtgcacatgtaccctaaaacttaaataaaataaa

SEQ ID NO: 32129 - DNA, 2300 bp, Homo sapien
gtatgcttttttttatgttaagatgttcccattttaaaaatttctctagtgggtgcagcgcaccagcatggcacatgtatacatatgtaactaacctgcacaatgtgcacatgtaccctaaaacttaaataaaataaataaataaataaataaataaataaataaataaaaagaaaatgcacaaaccataacaaaaataaaataaaaataaaaatttttctaccagatttcagtcagatggactttaatagcatacttgtaaatgcatggcatatttatattatttcatagtttccagagattgatgacacaatctagtctgtataaatctagtccacctcacacctgagttctcactttaacactgtatgaggcaagacttagcaaagaaatttttttttccctacattcagactggactcaagaattcacataaaccctagaaaaaacagatcagttctgttcataaagcctcatgtgcttctgaagaactgaaaaatagggtcaggtaagtctgtctcatttaacatgctatttcaagaaaaagataaagaaggaaaaggataatgaaacactttttattaaattgtgtgtcagtgaaaacctgatgtacaatatcaaagatcactaaagcaaaggtcactcagtatgtggtcaaagccatgttgaacaggtaagcagcttagccaagattaaaaatatgtttcgaggaatatgatgatttttttccagcctagattttgtaaggattaggtaggaaagaatccacaatcttatcaaaaaaaacttggaagttcattatattactagaatatacatagtatataagcaatacattctcacttcacaaaaaatagactacagaaaatgaaagaaaaatatacaaataattataaaaacaaactgatcttctaattcataactcattaaatattttaccaatactcatgttcttatctactacttttttattttaaattagtttcctgtcatatataaagttggtgctctttttatagtgctacaagtctctagagtaggaatattattcttgtttctatttgctgttttagttatttatttgtatttatttacttattttataattttaacttctattttagattcaggggctacatgtgcaggtttgttacatgggtatattgcatgatgctgaggtttggggtatggatggatcccttcacccaggtattgagcatagtacctaataggtagtttttcagcccacttcctctccttcctccctccactagtattccccagtgtctcatattgccatctttatgtccacatgtacttaatgtttagctcccagttataagggagaacacgaatatttggttttctgttcctgcattattaatttacttatgacaatgacctccaactgtattcatgttactgaaaaggacatgattttattctctttatggcttatctttgcaatatttaatatttaaatattcatttagcaatatattatgaacctaatatgattattcttaacaaaactttttgttgggatttaatatttttcacattatgagattctaaataatgctataagtgtccttgtatatgcaatttttcggtacaagtggagatattttggctttgaagaaataagaagccatacactttaataatcaatcagttggagaatggttttaggttctctgaagaaaactgagcctaatcaagacacacacctgagaatatgccttctccactattcttcagaaatagagaaaaaaaattacgatcaagtttaagattagaaatttttctaagtaggtgataccaatctcccactgaattcataaaaacaaaacattaagaagcacccatagaatggtgacatttaagcaattttatttcctggtaagacctccaaaataaattaattgcaaaatatgtccctggggagctaaatgagttgacatctacttttagacatttcagttggaagtcaattaactgttgaacggtatctgctaatatatatttatattggctttagtgacattcctgttaaggtatacagacagtagttaaatagcagggccaactattctgttaagggtcttcctagacagactaaaaaagccatgtattctttcgtttctctctaaaagaagaaaaatataatttaaaaatacattgcgtattttctaaaacaataaatttatagtgttaatattcatagggtcaatcaaaatgaagcttctcctttgggcctgcattgtatgtgttgcttttgcaaggaaggtaagtaaatg

SEQ ID NO: 32130 - DNA, 2300 bp, Homo sapien
ttaggaaagaggttattagctaagccattgtctgaaacccactgaatcactggtcctttttgaacaatgattggtcctttttttctaaagatgagttttaaaatttaagagaagtgccaagcagtagagctgagagaggaaaagaacacagatctcgcatggttcagatttttctttttaggtccaggagtaaggtaagatatcaaatctttgcttttatagtttgaagaaccaaaatcagtgaaatctgcaggatagactatcaagttcaccctaaatgcttgattaggtcaatgatttgaagcagggaaaaaagtttcacatctagaagacaagagaaatatacttaaacaggttacaccataaatcaatatcacagttcagttttataatctattgccataaattacaaaaacattgactcagttgcttagttctagtatattattctgttattagactactaagtggaaattatctggtattggactggtattgtcaaatctctattgaagtacttttcaacatagacattaaaattgctgcagtaataagtccctagttggttagccttagtcatgacctcccatggtctgatgggcctgctcctctccttgtagggcagcactaggaggagatcatcttgttctttaatgcattcaaccacatcatatgtctccaaatgagtattttgttcaagctaaaaggacaagcaaacaatcttggtttttataaacagcttgtctgagagaaaataaagagttatatcagaaatttacaaacataactttttaaattttaaattgcaaaatgtaagtaaatactatagaattcacccagctattcctttgattgaacaatactaattattttgtcatgaattttaagtaatgtctttataaagctaaagatcacaacttattttctagatatatcatacgaaaatgaaaattataattcttcttggattcctgggagccacattgtcagccccagtaagtgattttatggcactactagtcccactgtgttaaaccttcaacaatcccttctttttactatttctgatttttttttcatttttacttttagcttatcccacagcgtctcatgtctgccagcaatagcaatgaggttagtttaaataattaaaacaatctcctcctttttttaatggaaatcaagtgggaagagatagaagtcgtcatttaatttatactgtgttcctcaccactagcttttatgtatatccaagcacatttctaatgtccatgtttgattatataacaggttacctctaaaatattattctgcttcccttgattgattgttaattcttcaaaggcggatacaatattgtttatatctttttgttctaataacacctcacacaggtgtatataggtgtttaaaaacataaaatgactaaaccactggaatgtgctaacgttgtgcaatctcatacccaacagaggagaggttgttaaatcccaaccttgttttaaatctaacttctaatcactgtaatttaatgtaagcctagtgagaaaatgtcccacttctaacaagaaattgagcaaccagctatgacttgtgctatatttgcagtaaacattgttcctactcattttagtgtgtagtaatcttgatttcatattatttttctttttctagttacttcttaatcttaataatggtcaacttttgccactacaacttcaggtacctccatttcaataattactttatggggaatatttacctattgctcatttatgttattttgtaagaaaacaaaatgtttcctgatcctattttggaaatctcagtttttaacattatgaatttgtctcatatgttctagtggccatttgcttgaagattaaagtaaaaactgtaatttgaacaacacttatttattgagaacttggtatatgccaggcactaattctcacaactatgagatagttaaaagtaattattttacaaaaagtcatgcccagttaaccagtaacagcaggttggcaggtttagggttaaggtaggggaaaatacagacggtttaaaaccagtgtggcatatgcagatgttgggctcttttatcaaccttatcctgccccatatttctcatggccatcgggaatttagcatttgcttcgtattatttgcttggttcaaaatgaatcaagatgctgtccttttttatgttgcaacattggaactatagaaattgtttgtattttgcctctttcttgctcaggactaatttttaaattctttttggcatgaagggaacatgc

SEQ ID NO: 32131 - DNA, 2300 bp, Homo sapien
cattgactcagttgcttagttctagtatattattctgttattagactactaagtggaaattatctggtattggactggtattgtcaaatctctattgaagtacttttcaacatagacattaaaattgctgcagtaataagtccctagttggttagccttagtcatgacctcccatggtctgatgggcctgctcctctccttgtagggcagcactaggaggagatcatcttgttctttaatgcattcaaccacatcatatgtctccaaatgagtattttgttcaagctaaaaggacaagcaaacaatcttggtttttataaacagcttgtctgagagaaaataaagagttatatcagaaatttacaaacataactttttaaattttaaattgcaaaatgtaagtaaatactatagaattcacccagctattcctttgattgaacaatactaattattttgtcatgaattttaagtaatgtctttataaagctaaagatcacaacttattttctagatatatcatacgaaaatgaaaattataattcttcttggattcctgggagccacattgtcagccccagtaagtgattttatggcactactagtcccactgtgttaaaccttcaacaatcccttctttttactatttctgatttttttttcatttttacttttagcttatcccacagcgtctcatgtctgccagcaatagcaatgaggttagtttaaataattaaaacaatctcctcctttttttaatggaaatcaagtgggaagagatagaagtcgtcatttaatttatactgtgttcctcaccactagcttttatgtatatccaagcacatttctaatgtccatgtttgattatataacaggttacctctaaaatattattctgcttcccttgattgattgttaattcttcaaaggcggatacaatattgtttatatctttttgttctaataacacctcacacaggtgtatataggtgtttaaaaacataaaatgactaaaccactggaatgtgctaacgttgtgcaatctcatacccaacagaggagaggttgttaaatcccaaccttgttttaaatctaacttctaatcactgtaatttaatgtaagcctagtgagaaaatgtcccacttctaacaagaaattgagcaaccagctatgacttgtgctatatttgcagtaaacattgttcctactcattttagtgtgtagtaatcttgatttcatattatttttctttttctagttacttcttaatcttaataatggtcaacttttgccactacaacttcaggtacctccatttcaataattactttatggggaatatttacctattgctcatttatgttattttgtaagaaaacaaaatgtttcctgatcctattttggaaatctcagtttttaacattatgaatttgtctcatatgttctagtggccatttgcttgaagattaaagtaaaaactgtaatttgaacaacacttatttattgagaacttggtatatgccaggcactaattctcacaactatgagatagttaaaagtaattattttacaaaaagtcatgcccagttaaccagtaacagcaggttggcaggtttagggttaaggtaggggaaaatacagacggtttaaaaccagtgtggcatatgcagatgttgggctcttttatcaaccttatcctgccccatatttctcatggccatcgggaatttagcatttgcttcgtattatttgcttggttcaaaatgaatcaagatgctgtccttttttatgttgcaacattggaactatagaaattgtttgtattttgcctctttcttgctcaggactaatttttaaattctttttggcatgaagggaacatgctttctttcctttgtgtctttttagggcccacttaattcatggattccacctttctctggaattttacaacagcagcagcaggctcaaattccaggactctcccagttctctttatcagctctagaccagtttgctggactgctcccaaatcagatacccttaacaggagaggccagttttgcccaaggagcccaggcaggccaagttgatcccttacagcttcaaacaccgcctcagacacaaccaggccccagtcacgtaagtcaggcctctttcattttgttctgaggagagagaactgcatgtttaatctgacaatgaatatgaatcagctttgaaataggcaggggtttttgaacaatattttttctcattatatgtttctaccatcgctgtaagttctttcttttatttt

SEQ ID NO: 32132 - DNA, 2300 bp, Homo sapien
taatgcattttttactgtggcttttattttaaaatttttgaaagccacattaaggatcattatagcattactgtggaagatagcttgaagacaaaaatactgcggacagggactctatataagaggctactgtaacactctagtaaagaatgagaaactaaactaaggaaaagacaaaaaagatggaagatatttattccagagcattataagaaggaaaaagttaatgaccatttgatgtggaagagaaagcacaagaaaaaaataggatgagtcttagattgattgcttggataactgagtgattgatggtcatcagctgaaagattaaataaaagtgaggagcatattaagagggaaaaagagtaagctaggttttgaataggttgggtttgatgcttattcagttggatacaagattctgggtaattagagaagagttttagctgaaggcatagcttaaggagtcagaagtagattactttataagagaaagtgaagactaagaagataaattgtcaagtataataaatcagagaaaaagaatcagaaaataagacttatggtttctattaaaagaaaaagaacatgaaaaattggcttacagaagccaaggaagagaaaaatagatttccagatgggcatagtcacagttaaatgtcaaaagaattgaagtaacacaaggacagaaaatcatttatggttttcacaattcagtggcaattgccaacctccattagagctatttcagataaaagaaattgaagtagaataaattgaacgacaggttttaggtaaggaaatggataatacacacacacacacacacacacacacacacacacacacacacctgtcatccccatccctggggaaatgtactatgagccccaaattggtcaaaatatgtacaataacataacaggtttaatatattaagtttctgattcaggcagttttctttaaatcattgagataagattaaacgttgagttataggtgaaggaagtagtttaatgtttctctggctttgtgctgatttttctaaccttctgttaacagtgacagtataaggcaccagttataaatgtgggttttagaaccaaattgctggtgctcaattcaatatctgccagagactagctgtaatacccagactgattactaatattctctgcttctcagtctcaaaatgggatggtgttgatcatagtactttcctcttaaggtggttgtttgggagatttaattatattatatatataaagcatttaaatttgtgcttcagcacttaaagtcctcaaaaaaacttacctgctattatttttctgagttgccttgagaactgaattctagaaaaaataaaaagaagaaaagggactttgatgcactactactacaatctggactatataacctcttttgaagtagaaatcgaactcaataacagaatattcttaaaagctctcgaattagttaaagctcaaattttatgactcttgaaaaaggcatatacaatatgcacgcatatttaaggtaattcttgaatgttttgtgggccctagtttctgttcccgcacttaataatgataccttttctgctgtaagtgaatttttagttgagaaatagagtatagtgttccataaggtaaacaagatgctgtggtgctccaaaaatacaattcactcatctacgaagctctaatcctgataataaaatgaagaagttgaaagaagaatcatgcaaaagattttaatcccatcttaaacaatttttagattttttattttcttaagattccagcactatcaaatatgctttgcaataggttataatcaataccagtaaaatgcttagaggtattttaaattgtgggaagtaaaggaaaaaattgtgagagtagacaatggagcaacaacatgtaaagtgataaacttcaaatatacaagacacaaaatttggagaaaaaaaccacaaaagattttggtatttggtagtttctaggaaactaaacattggttattccccaatttcaacatattgagatagttgatgagtaataactgatcctaggggagaggcctttaagccacagatttctccattccattatacctttgagtatataaaacagctacaatattccagggccagtcacttgccatttctcataacagcgtcagagagaaagaactgactgaaacgtttgaggtaagaaaggtcttaaatatcattgtaaactaagattgtatatctattttgtaaatatagatatatagcatctctccatatatttttc

SEQ ID NO: 32133 - DNA, 2300 bp, Homo sapien
acactctcagtttggaggccttgttcagcaccatcgcagcttccttggagatttcagagcatgcgagttctgatcctccttttgcttttctttcgaaaacgcaagagcattgcatagctccattatagaatccatctaattcatctactccagtcactcaaaacactttcactaaggttgccttagatcagtagatatgggaaatatccaatgttaccagtactcaagtaaattttagactatgaggtccacaagaacagagatgtttacctgctttggttactaatttatccctactacctgaaacagtatctgaaataaggtatgtgctcaaagaataatgtccaggacctgaaatattgtatgtgctcaaataataatgtacagttttgcaaagccccacaaaagctacattagtatttgaagtgaatgggtgacaccatggtaaacatgtttttatcttggtgggagaaaagattactagcactctcagatgttcttaaaatatattttcctgtgaaaacaatgtcttcagaagtgttctgagtctctgctacttgtaaattaaataattcaatactcaactgaaaatcattatcactcttattactctaaataaatggctgagaaattactatgtgaaatagaacaccttcaaaatttgaggaatgaccggatcatgatctttcaaccacggaccctgataatcaaaggaaaacactgtgactaaatagttcagatagaatggctggtgttattactttaccaacttggtttagccattttaaattctgtcatctctttttgaaccacaaaaaccaactattctgagaaacagaaaatttcatattactattttactctgtgtaatccaaataagtattctagggtttagaatattgttcctaactttctaagacatgcaatacttctaagaaacagacaggaatatagacataactacaatgctgatattatttcttgtttgtgttctggcagtcctacattaattcctgtaagttcctcaatctggtcaggtcttcacagccaaaataagtcacagttaacattatttctttagaaaagcaagtaaaagaaaatatgctttcctgaattatctaagcaaaattttgtttagctattttttgccaaaatattctcaatgtcagtgggtttgtgatttatgctctaagtcaaaatgactttccttaaaacagaacaattatctccaattcaataatttaataatttttttttcaaaatggttcacctatattattgaaatttaaaatcttaaaaaaagtttattcataagaggataataaatcactaagtatgtagtcaatgcatacgggagaaaatgtgctgcagcccaaacgcaaatgattccccactatatactgattaaaatgtttcatatatgggtttgacttttataaggaggtgctcttgggtatgtgtgagatggccaattatttaatttttaaaaatcaataattgtaattctggaaggaagaagaccaaccacagtcaatgccagatgtagtatcacttgaaatccaggttcttaaactaaaagaaacaattaaaatgtgaaagtattgtggctatttttcatttcaacagcagttttaagtttaaatagataggataagttgaataagaatacaattaatatttttaaaaattcttctatatttctttataaacaaaaaaagattatttaaaaagatatgaatacttttttcaagctttatgagtgatgactctacatccttctctgcatttcttttttattttattttattttattttattttattttattttatttttattatactttaagttttagggtacatgtgcacattgtgcaggttagttacatatgtatacatgtgccatgctggtgcactgcacccactaactcgtcatctagcattaggtatatctcccaatgctatccctccccactccccccaccccaccacagactgacccaaaggtgaccctgctatcatcatcttattgggtaaaaagtaggagggaaatagaatagcgtgactcaaggtactaataccctttaattggtcttcagttatttttcttgggtcttctctacagctgacaggccaactcaacctactgccaaccaagacctgactggcacgaggaaaggtaatgctgctgaaacacttggagaaagtgatccttttcacagtagttagttgggacatcaccatagttatttcagaatcacattttcttccttttagttattgttaagtttgaatatgacc

SEQ ID NO: 32134 - DNA, 2300 bp, Homo sapien
gacttcaaactatactacaaggctacagtaaccaaaacagcatggtactggtaccaaaacagagatatagatcaatggaacacaacagagccctcagaaataatgccgcatatctacaactatctgatctttgacaaacctgagaaaaacaagcaatggggaaaggattccctatttaataaatggtgctgggaaaactggctagccatatgtagaaagctgaaactggatcccttccttacaccttatacaaaaatcaattcaagatggattaaagatttaaacgttaaacctaaaaccataaaaaccctagaagaaaacctaggcattaccattcaggacataggcgtgggcaaggacttcatgtccaaaacaccaaaagcaatggcaacaaaagacaaaattgacaaatgagatctaattaaactaaagagcttctgcacagcaaaagaaactaccatcagagtgaacaggcaacctacaacatgggagaaaattttcgcatcctactcatctgacaaagggctaatatccagaatctacaatgaactcaaacaaatttacaagaaaaaaacaaacaaccccatcaaaaagtgggcgaaggacatgaacagacacttctcaaaagaagacatttatgcagccaaaaaacacatgaagaaatgctcatcatcactggccatcagagaaatgcaaatcaaaaccactatgagatatcatctcacaccagttagaatggcaatcattaaaaagtcaggaaacaacaggtgctggagaggatgtggagaaataggaacacttttacactgttggtgggactgtaaactagttcaaccattgtggaagtcagtgtggcgattcctcagggatctagaactagaaataccatttgacccagccatcccattactgggtatatacccaaatgagtataaatcatgctgctataaagacacatgcacacgtatgtttattgcggcactattcacaatagcaaagacttggaaccaacccaaatgtccaacaatgatagactggattaagaaaatgtggcacatatacaccatggaatactatgcagccataaaaaatgatgagttcatatcctttgtagggacatggatgaaattggaaaccatcattctcagtaaactatcgcaagaacaaaaaaccaaacaccgcatattctcactcatagatgggaattgaacaatgagatcacatggacacaggaaggggaatatcacactctggggactgtggtggggttgggggaggggggagggatagtattgggagatatacctaatgctagatgacacattagtgggtgcagcgcaccagcatggcacatgtatacatatgtaactaacctgcacaatgtgcacatgtaccctaaaacttagagtataataaaaaaaataaaataaaataaaataaaaataaatgaaaaaaaaaaaaacaaaaaacaaaaaaagaaaaaaaaaaaaaaaagacccaaacaggccaataactattagttattatctctactgaaaaagtgggacttcctgttatgaataagggaactaactgaattccctgctacctaattaccttctgtagctatacttactgacaaaaacaccattaatttttttagataccaattttttttaatactatgaatcttaagggaaaatggcttcacctcaaaaatactctgttacttgcttggaagatagacgactttaagctgatgctgataaacttgtggcttccaaagttttccttactaattctaaacccaaaaggtgcctggcagtctctgctatgtctgtttcaagtaaccctagctctatatcaggagacattttccttataaacagaaacatggtaaatcttaagttccctgcaattgaaatgcttggctgtgaatttgatttcataatcagagcggactctatagtcttttcattcaatattcctgcaattagataaccaatcgcagcctagaaacaacctccaaggagacccagtgacattgctcccatagttgatgcaacaatcaccatgatgacccaagctttaatcactctgatgaacactgctctcctgcctagagataccactgagtccagaagcaagacctgtgagagtgcacagtgccacttcgccccatggctgaagatggtttgcccaaaatttattctcatcctccaacagaaagcagtaaaacaccaactgcagcaaccattttctttggggctgacaatgctattcccaaatcagaaacaactattacttcagaaggagaccac

SEQ ID NO: 32135 - DNA, 2300 bp, Homo sapien
atctagaagaagtacatactttccataggtccaaagaaactatcattattgttctattttaggggaaatgagtgtaatacaataggaaagcagacttcaaatatgttgctgcatgactcaacttaaatctgctagtctacctatattagggaaatattttccatctgtcacataaatctctgcactaacaataatttttctttaccgtcactttgaattttctgggaccagagacattagctcctttaggtattgttctagtaagtactcagtcaagatcttttaaagccatataagttaattaaagattaactggagtaactgttcctttttcttaacagacgtgtgcttccatttgtttgtgttcctcaaattctttgttggtcacaacccactcagaaattgtccgttggttttgccagcgttcatcctaagtccctcagagccagtgatccattacaatgtagatcacacctcgacttcaaacatttggctgatgaatatgttggcatcaaaacaagaaagaagagacattcatcttttgacacactgaattactgtcaaagaaagaagtgaaaatttctatgttaattaggaatagaaccattttcactgacgtttgggcatgtaatcattcagcaacatattaagggctaagattagcaaaccaggaatatattgtattacacttaattatgtcatcagaatttttaaaggcagtgaaactccaacaaagtaaatgaaattaagtacagtcattcaaaactaacatcaactctgaaagtgtgacttcttaatttctacatcacctatgactcacaaaaattttaaaacactaatcatttagatatgctgtaacttcagcaacttgcactctgtcttacacccacaggtagctaataaatgttagtaggaaagataaaaggaaaagggaaggaaggaaggaaggaagggagggagagagggagggagggaaaggaaagacggagggaaaggaaggaaggaaagaaggaaggtcctaatctccatgacttagaaattataaatataaacattttaaatatatatttttaaatgaagaaattgagacacaataaggcaaaatatcttgtctcatataacccaacaaggaagtattgttactgtgctttgaagtggaatgaactattaagttcacttgattcatctctctgatgtactgtaacacaatgttagtaaagtgtatggtgattgttaagattagggaggtaatatggaatactggttaaaaaaatcacttaggccttgaagtgggctgacttaaggtcaagttccgctcagctaattagcatctctgtataaaactgagatgataatagaactcattttaacctgccacatggaatatgctagaggctcaataaataatagctgttattatgattatataataatgtattaaaacgagagtataagatcatccagcataggaaaaattatcctcagtgcctagatttatcaaaaagacaaggctataaatttccattagacatccacttcaaagtaaaaatatctgtataattttcccataatcaaatctttgcatgtcatcatattttcatttaattaaaactctcaagttaataacaacagggaccacatgatttttaaaacacggttgttctcagttcttcactgacaaaagggaacttcctatagaaaatacaaaagatggcccattaaataaaatagaaaatacaaaagatggcccattaaaattactcgggatagaaaaagttggtgctttttctttaaaataaagaggaaatggtgcgccacaggccccagattgtttccctgaagtgagaggatattatttgttgaatctgtttccccaggaaacaacaaatattgaacaggtcaatgcttttcagaaatgagacccaaaaaatgcggaaaaagactgccaaattggcaagaacaactttcctatctttgtttgaagagcatcagcccagaagttattttatttccaagtagcctttcttttactgccaacagaaatcttttgcaatatataagaactgaagtttcttgtctcttttcacctttattttctgtctttcaactggcaagagtcattttgaccagcaggttaatcaactctaagacagatcctcacgcaaaggtatgtacctggaaatattaactgaagaaattttttctcagacttttcatgagctttttataggacattcattatcaccaaaaacataagcaccttcaccttatgtaaaattgtaagtcgttaaacatatcaa

SEQ ID NO: 32136 - DNA, 2300 bp, Homo sapien
ttgacaaactgaattatcatcaaagaaagaagtggaaatttctatgttaattaggaatagaaccatcttcactgatgttggggcatgtaatcattcagcaacatattaagggctaagattagcaaaccaggagtatattgtattacacttaattaagtcatcagaattttttaaaggcagtgaaactccaacaaagtaaatgaaattaagaagagtcattcaaaactaacatcaactctggaagtgcagcttctttattgctatcccacctcacaaaggatttttaaaacactaagcacttagatatgctgtaaattcagcaacttgcactatgtcttgtacccagcagatattcaataaatgtaggagggagggagggaaggaaggaaggagggcaggagggaaggagggaaggagagaggggagggaggggagggaggggaggggaggggagaaaggaaggttggttgtaaacttcatgacctaaaaattataaatatacacatttttcaaatgaagaaattgaaacacaatgagataaaatagcttgtctcatataacccagcaaagaattgttggtatttggctttgaagtagaattacctgactattaagttcacttgattcatctctacagtgtactgtaacataaagttagttaagtgtatggtgattattaagatttggggagcaacatggaatgctggttaaaaactcactcaggcccctgtagggagacttaggtcttcactcagtgggaagacttaggtcaagccccacttagctagttagcatctatgtcatctatgtgtacaacagagataacaatagaactcattttatcctgccacgtggaatatgctaaaggtttaataagtaatagctgttattattaaataataatgtgtcaaaactacagattataggatcatctagcttaggaaaaattatgctcaaagcctagatttatcaaaaaaacaaggctgtaattttccattagacatccacttcaaagtcaagatatccgtataattttgccataatcaaaaattttgcttgtcattatatttttatttaattaaatgtctcaagttaataatggcaaggaccacatgatttttaaaacacagttgttctcatttagttcttcactggcaaaaggaacttcctaaaaaatgcatatataaggtcttgtaaatagtctactaacttaagataatcacaaagaaatgaaatatagttaagactgagaaactgcatgaaccttctgactattatccctcttccaccactagatttttctttcctgcttttttgaaacttagatccaaatcttaatagcagcactcattttcatcatccttcagaaacatctactcaatgaagacaactgtgaaaaaccatacataggataagatatatacaaactttcaagcacaaaacaataatacaatttcattatttcaaccaaaaaatagaaacatgaaacccacaacatatagcaaagtgatcaaaacagtcaagtgaaattttagatattctttacattactggccatgcatcgtacctgcgtgcatgtgtgtgtgtgtggtatttagcaatatttatttaattaggcacttttaattttaattatcatttttgttcccctaggttctcctgatcatgttagaattcagtttaaaaatatttgtatttcgcacatatggaggcctttgaaataaaatagaaaatatgatgagactagcaaataacaaaagatggcccattaaatcacttggaacagaaaaaactcgtgccagcttttcctttgaaataaagaggaaatggtgcaccacaggccccagattgtttttctgaggtgataggatattatgatttgttgtatctgtttcctcaggaaacagcaaatgttgaacaggtcaatgcttttcaggaatgaaaaaaaatccagaaaaagactgccaaattggcaagaacaactttcctatctttgaagagcatcaactcggaagttattttatttccgaatagcctttctcttattgccaacagaaatccattacaatatataagagctaagatttcttgtcccttttcacctttatttgccgtctttcaactggcaagagtcattttgaccagcagattaatcaactgtaagacagatcctcacacaaaggtaggtacttggaaatataaactgaatatttttactttgaatattgaaatttttctcaaagataacattttcaacgataacattttatgggcttttcatagaacattcattatcagca

SEQ ID NO: 32137 - DNA, 2300 bp, Homo sapien
tttgtaaatgacagtgttgagacataattggattaaatagctggtcatataaaacacagctaataggaggggagttgacatttcagcttaggccacctgacttgaatgctacacacaatcactaaactaccttataatgaaagactcttacattttattggctgcagctgacagaaaacatatatttttacataataacccagtacacccatatgtataaccatataatatatcctgaaaagtattaatatataatgcaatctgatatttacttctattctgctctatccatcctctaaattctgtttgctactccctaaatagatttcatgtattactgatgagttgcattcaagcgtcaatgagtgctactattaaaaatatagtaattacttcagtggttcaaataattggatttgagagacaaagcagcgtaatgaagggaaaagttcaagctctcaaatatggcaaatttaaggtcaattcctttcccagctattttagtgaatttgagcaacttacgtgactcctctctaatttattatctaatcagtgatctgataataataacataaattgcaagggtttgttgtgagcatgaggagagctaatctacataaagtgattagcacatagtctaggacatggtaaggattcaacaaattatggctattagaaaataaagcataacatcttctagcatatggtaatttcctctcaaatgaatagattttatttcctatgagtaaatttctcagtacctgccttcattttatacataaaattgtgtaatttactacatccttttgccataaattgaaaatagattgtgtaatacctcccatctttggtagacaagtgtacattgaatttatccatctgatttagataatgggataacaccacatacttacagaatacaacatatattggagaatttattatccattaagcagtccagatattcattattagcttcagaaaaatgtattaagtaatttctatatatttaacattttaagtagctcaaatgcatgtatacagtatctttaaaattacacatctgggaaataaatatgaaattgaaaataagaaactagaaggattctatttcctaattatctcccaccactagatatcttctgttatttccaaaattaagacaaagaatttatttcaactgcctcctttttccattctttaaattccttcttcccaaataagcttcttctcaaataaaccaactcttactatacatatatatatgtcagttctgatacatatgtatagacacattaaaactccagtatctatagcctttaacaacagtggttcccaaacaaagcttcactttgcaataacttggggagttttttaattcttgtgttcttttgcagcaacgtgcatgcaggtggaagccattatcctaagcaaacgaattcaaggagagaaaaccaaatactgcaagttctaatttagaaatgagagctaaacattgagtatacgggaacatacagaagggaacaatagacaccagggcctacttgatggtgtagagcaggaggagggtgaggatcaaaaaactacctgttgagtactgtgctcactacctgggtgatgaaataatttatacaactagccccagaaacacacaaattgctcatgtaacaaacctacacaggtacccctgaacctaaaataaaagttggaaggaaaaaactaacataaataaaattaataaaatttttaaaacaaaattaaattactttgtctgtcttctgccccataacttttgataaattgttctggggtaaggtctgagaagtggaattttttaaagcttcccagatagttgtgatgtgcagtcaagtttgaaaaccactgtacttgagcattctgtgtgctgccccagggcctgctaggacagtgattggatcacagttctatagatgaagctgccaaactggcaactgcaactattatttctttgtttcagtaaagaatatcaatacagaactttaccctctctcaacctttctcttaactccaataaaaatccagacagaggtatttaagaagaaaggcttttctatcaaagttctttctcttcttggacttttaaattgtggctacctaaattgagtatctggcaagagtaagattaagcagtaatttgttccaaagaagaatcttctaccaaggtaggtatatagaaatataaatgtaagaattttcacttcggaattctagcttttgctcatattctcaagaatatcatcctcatggcttttaatggaaat

SEQ ID NO: 32138 - DNA, 2300 bp, Homo sapien
gtcctttgcagggacatggatgaagctggaaaccatcattctcagcaaactaacacaggaacagaaaaccaaacactgcatgttctcactcacaagtgggagttaaacaatgagaacacgtggacacagggagggaaacatcacacaccagggcctgttggcaggtggggggctgggggagggatagcactaggagaaatacctaatgtaggtgacaggttgatgggtgcagcaaaccaccatggcacatgtatacctatgtaacaaacctgcacattctgcacatgtatcccaagagaatataatttttaaaaaattaaaataataaatgcataagtgttactcatttattgaaaaataaaacctgaaatgtactggattcagtcataatatgtccagatattcttatatttttccaatatttaaagaaaattaaatttgttatctccaggcattatttaggactgaggataattagacaatttttgaaattctatcaatttttgaggtcattacaacttatcactaattgggtaatagcaaggtgatatgaaaatttttctattgaagtcatgtacttagaaaagcttgttcagatcaataaaaattatattctacagtcaattttaactataacaagtatattgtaaatgcatatcactagttgctagcaaaaaaagatgaaaagaaattaatattatagcccatatttactaactcattgctatctcaaaaactgtccctaactttccactaatggcagcataatagctgagggtgttccattcaaaagaaccatgtcagaacttttaacttatctactttcagtctgacaactttgtaaagtagatgtcacacctaattagcagatagaaaaactgaggctcaaagaagttagctaacctgtcaaaaattacatggctactaagtggagaagcaaggaatcaaacccaaagaatgtaagccctcagagactgtatgtgcaaaagaacaaactgactagctagaagtggaatcacaccttcaaaactgtattccagattaacgattttacatagtagaaatatctaattttgaagatctctattaaaatgattcttaagttcttttttaagttattaagtttctttttaaaaataaatatttataaaatgactagtctagctatcaaaatatcactaccatgggggaaatgggagaaaattttctgggataaaagaaactagagacataacaagtcactgcaacacacggcccttagttgagtcctggtaggaacaaaatgactaaaaatatttttgccaaaatttgagtataaactcaattttagattatatgtttgaattattaatattgttataggttgatggtgttgtgttataaaagaaaggctttttagagagaaatgctgaaatagagagtagctgttacaatttctgtagtttaccttaagatacttcagcaaaacaactaagatatatagcaaaatgttaagaattatgaaaaccagggaatgagtatatagttctactaccctcctcacttttctatatgtttgaatatttttcaagacaaaaagtcaaaaattgtttttaattacttgtatttaaaaattcagtgttgattttttggctttaaatactgccctgcaccagtacttggcaccacagtattttttttaaatcctctgtcctttattaacttgtcttattgacaaggaaatatggtgttccatcacattaactgtcagaaggcaatcactctgcttactttgagagcccaacaggaaagagtggatgatctgttcctgttgggaggacctgggccatggttgtttgtttctccgtaagcgccttcaattactgttccactactcatcaagcacataagttactcattgagaacctctgatcgtcactgtgctcatcaggaagaaattgatgcacaaagaactactgtcaatctcagcaaaccacaactattcttttctttaaaagtaaattccttgacacaaatgaccttatcttaaatctaatagatttcctatttccaaaaagctcgactggagtgttataaaacctgaaaattctcttgtgctttctcttcttttgcttctagttaccatcctcaaaggattggctaaaagcaagcaactggattgaacaccctaagaagaaagattcacactgcaccaggtatgtggatactttagataggttctaatataaactaaacagctttcaagtaatatacatatattaagtaatagcaatagttgttctaatacagttattctcctc

SEQ ID NO: 32139 - DNA, 2300 bp, Homo sapien
tagatgcccagtgtcacggagtccctctcttgcaatgacctggttgaatatttcatattcccccaacaaaacctaagctctttaagggcagggtttttgtcccttccattaattgttttatcccagacactgacacaatgttggtgaacaaagagtgaatctatgttaaatgagagctggaaaaatgaattgattgaataaaagaaacaatgaatttgcctgtgaaagcccatgagaacctaaagttgctttccttccacatccttcagcactatgtctcattgctcctctcactatcagccactttaacatgctagtctgtcttgtggattatacttattctccaaatccacctaaagcccaatctcttctctaaaatcttccctcaactcaatcttgctctgtttccccacagtatatgcctttaccatttattcgtcaacattcgatgaccatatgatgctttaaaatattacaaacatgaaagacaagaaatataagatgcggccccaggaactctccatctagttcaagagaaacaaaaagtcaagaaataataaaaaagccatataaagtaatatctgaccaagtgccaaaatcagtgatagaaacaaaccaaaaaaagctataggtagttaaaattagatatcatctccaaccctgtcttccactgctatcctcaccccatcttgttccagtgacagaaagcaatgtcactacttcaaatctagacctttgatcagcctgggtgctctccttgcgttcttcataaattttttttttattcttcaaatccaaactcaaggatgatctcctcttttaagcttttcctgtccttttgcccccaacaaaattcaccacactctttcttacacctgaatactcctatatttgcacatacttgttgatcttgtatttctcctcctacataatgttccccattcctaacagagtatcagagtaacaaacattgattatatagattaattgaacagttagagagaagctttgaaaaaaaaatgtatcatctcagttaattttccattcatagacactctataggttttttttgtttttcttttttaaaggtcaaatcccaaatcctggtgcgacacaggctcatcattgaaatggtctcagaaattgattaacagacctccacctccctttggggcatatctcaaaaattccaggtgaagcccacagcttcatggtaaaatgttaagtagcacttaactgttcttcttgtaaaagaaatctcagttgattccctgtgttttgcttaggttatagtatcattttccctgtttaatataaagcaagccattcaccatttggccataaatgtacatatcctctgatacattacttaaatgtacataccctctgatacattacttaaatgtacataccctctgatacattacttaaatgtacatatcctctgatacattacttaaatgtacatatcctctgatacattacttctaagaataacacctacgaaaatactcccatatgtgtgaaaaaaaggttttataagaatggtgcttgtgatacctttgtaattacaaaataaactggaaatggattaaatgttcatcaaaatgtgatataatgatgtgtacccattaaataaataaaataaacctgtatgtactaacacataaagttgtccattatttgttaagtaaacataagttccagagcaatctacatagtagacttcattttttaaaccttgtacagagccctatattttgatgtttgatttatgtattcatacttacatgataaaacacgtacatctgagaaatcatttgggaagaagaaggaggtgaagaagcatttaaattattttattgtctgcatctttttttaattacataaggcctgtctccttgaaacaccttctattcaaatggtagacattgggtaacataatgtctgcagctaataacccacctaatgaagtgttgggaaatgaaaaaaaaacaaatgatttaacagacagctaaatcctgattggtctctcagtttccaatctcctggaactgagtttaaatttcttctacaaacacatacatcattgaagggtaaaatttttcaccagagtaaacttgagaaaccaactggaccttgagtattgtacattttgcctcgtggacccaaaggtaacattaattgaccatgtttcaagtagaacttttgtttttaaagtatcattttctcttaaaaggaaaaaaaatacatggaagagtaacacttttttgttgttgtaggtagcaatctgaaacatg

SEQ ID NO: 32140 - DNA, 2300 bp, Homo sapien
agataaacatctggaagtcagtaagccagaatggagtgtgacatttaaaaaaggaagaagcaacagtgtgtatgatatattggatatttggctcaaaagcaaagcagaacataagaatcctaccaaaacatcattattagtgtgtcatgatcacgcttataaactttacaagacacacacatacacactatttgccagttttttagccaactaggaagctcgttcctatggattcagcatcaacttccacagagaaaatgtcctccatcaggtccctcctctacctccttggagcttatgaacctagctgccagcactcctcctcctccagcacacacacacacacacacacacacacacacacacacacagttcttgtggtctcatatttcatgtagtttctcctaccaaaaggacaatcaactcattcattcagcacccaataaatggcagctgctgcatcttcaccatctcaccaatctttaagacaagctcaggctgggcgtggtggctcacgcctgtaatcccagcactttgggatgccaacacaggaggatcacctgaggtcggtagtttcagaccaacctggccaacatggggaaaccctgtctctactaaaaatacaaaaaaagttagccgggcatggtggcgcaggcctgtaatcgtagctgctcaggaggctgaggcagtagagtcgcctgaacccaggaggcggaggttgtagtgagctgagatcacaccactgcactccagcctgggcaacacagcgagactccgtctcaaaaaaaaaaaagactagcttgtggtcattaattattatccttacataacagaagaaggaactggggctcaaaagagattaagggactgcatcaagcaccagagacagcatgaaaaataatacttttcatttcaataacattttgctgtttgcaaaacacattcacattcttcatttctttgcatcctaaagataattctggtatcagtggaacacagaggttttcaggagcagcttctaagataacattatttgaagctgttaggcctacatttgggtatggatacagctttctctcaaaataccagcttcctcaatgttccctgtaattgacaagatccctacttccctaaagagtgtactgactcatcccttcttcagaactaatcttaaatgcttatccctaccatatctgaaatcacaactttggaaagacaaggatgggcagagaagtaacaaaagcagctaatattcaatccacatccaagatattatctgttcacggagaaaaaccaatctgtgttgacgttaaccttttaagtgatcgaaatatgtcttattaacctggcttgatactaatgcctgggaatgtgtctatctgaagagtgaactgacacttgtgcccattgatttggttcatagagaatgttctgatttacgtccccgtccccacagattttttttaaaatgcaccaaacgtttacctgaagtaaacctgattcttgcaaagggtccaactgtagtttcttacaaaagcttggctatctctaatcaattatctccagatatgaaaatatctaggaaattcaaggaagaaatcacacacattaattttccatctaacattttagtgttttcttttaaactctgtgtgtgctggggggaaggacagtagtctcttttactacaacaaacaggagggtgaaaacctgaagaatgctagcattgggtcactagctttatctgcagataaaacctgcacaaaacaggttttgttttgcacctattttacatatattttccccagctcaccaaaataattgtcttcagagcctatgtccattattcctttactgccttccctgctatcaagttctctgaataagtacaggggctgcagtacaattaaaaataatgagaccctactgggccaatgtccctgcacgcaataaaagggtgtggactaattgcaggagcagagattcccgccccaactcccccccgccacccctcgccattttgcttcactttgattggtggattggcactttaaataaaggtttctaatcttccctgaatgagaagtacagagcaagtcccacgcacagtcctgaaaaaaattttaatcttcttttcttagaactatcttggttggcatcatcaggccctgagagcacagtgcatgtcagcatctaaggtaaaatgggattttatgatttccatgtgtttcctgtaaattctttttttcctatctcctgacagcttttataaagaggatttatcttcatttgtcaccagt

SEQ ID NO: 32141 - DNA, 1670 bp, Homo sapien
gaattcactcattcaatagcttggctggattttagaaacatgaattatttcatgacaactaaccacccttgtggccaagagaacaagggtaaatagaggaaagtgatcaaaagtgaggtttagtggcaactcccaacaacctatatgggtaaggccaaaatcaaaaattaccctctacatgaatgggcacaggataggccaggtcatccagcatcagaactcccatttcacttccaagaacacactgtaggtcactgtcccgtaagtgtcctaccatttgcaaattcatctcaatgtgcacacaatatgataaatactactcagtttctacaaaatcagacaaaggcaagcaggtacttgaagcagatttaactttgcacatcttggatacacatagagttaaaagatagtcctagcttcatttaaagtcaaatattctagcacatttttattatttgtggcacgaaatatgtggagcagagaggcactgagaaatacaatgctatttggcccaaaaggaatgacacagcacttctctgtccttggaagaacagcaccatgggcaaccactggattaacttatatacacaatcataccaagtaggaacaggttttgccatcaagttcattcattcttggtttttaaatcccaacattaaaataagcaaacattgccacaacaaatgttttctcttgtgaagccataagagaacaggagaatccaagttaagcaaagatagcaaagcttgctcttgtcaattaaaagtgcaattggcctatctatttgaaagtgaaatctttattatggaaagtcagatttcaggaaaaaaatccataacataactgtttcagtaaattactcaggtcctattttcattaagttgtattatcataatagctgagagttcatttgccattgtacccaactcatctaaaattctgaatccccagtgactggattatatttgacttcaaaaagaacactatgtcctgctagccttatgtaatacaaagtaaatcaagtcactgagttttcacccatggatataacattccagttcattttaattacatataaaatgtatattaagtaaatatatatattagcctgccttttgatgaaggcaactgacttatgacaatagcatacagttaatattcgcctttgttcctgaaatatctttgttataaacatagtttctatactttgaaagccaaattcaccaagggaagcatcttctaaatcttactgctgtaagctcattttcctggactgttattatacgtaataagagacttgacttgacagctcctataataacacattctaaattttaaattcgatgtgtgttttttaccttaaactcttgtgatgacaaaaccattttcctcaaagctgattggttatgcaggtctacaacagtgcttaaatggaaccttgctgtgccaagctttctgacaaggaggaatctttttattttgagcctttttgatactgaacatgatatctgagtgaagaatttttgttttattattaagaaataaatgtatcttgcttcttgagatctccctggcttcagcaatttgtagttatttccactatagaccattaagaatatatttcaaaggcaagctaacaaagttcaagtaaaaattattttttatatatt

SEQ ID NO: 32142 - DNA, 2300 bp, Homo sapien
aaaaaaaagcaagattggaagaatgaaaatatcaaatatagagcttttctttaggttagtaattatgagttaaataatctttgctgttataaaaaaggaaacttttggagaagttttaatttgttcccaaggatttactcaacttgctttgggaaggcagtctagccttgagtttatttttcaagaattaaaaaggtatccagctgactattaattactatttttttttgagtgattgaataagtcagttatttagaaacttcagttgggggtgaggatcttttagagtggttgatagttgttttgacctcctgaccacaaactaaaataatgtgctttcaggtctgtttctttttttaataaactgtccatgtgatgccagtatattttccctaaactcaagtagttgctaagtcctactgatagtagaaattaaaataggaataaacttggacagtatagtaatattgcgtatgacagtgcctgacactttgttcttacagactttcaatacatactctgaagaagtgcaatcatgtgctagcctttaatgtctctttcatcctgtcatttcgtatttctagctttgaagtctgcttgccttacttatgattctgaagtactcctaattacctcttaaaattctaggagtcccttcaaaaattagagctgagaaccagaagtaacacggatttgatgctgttgtgtaaccagcatattcttggaaccaaccttgcctaagagacaggaaattccagcatgttggagtgggagtgcagggggtgctctgtccaaaagctcagttaaaaaaaatgacattaattaagtgaaaaaaattttacacaaaatactgcagtgattcagtttgcttttgaggcatctcaaaaatcatcttatgggtttgcaattctgaaaggtgtaactagacagaaggtccgtcttaatgctatcaaattaaaatatggcaacttatttatctggtatatacccgcttctttttttttttttttttttttcgagatagagtctccctctgtcacccaggctagagtgcagtggtgccatctcggcttactgcagcctcttgcatccaagattcaagcgattctcctgccccagcctcccgcatagctgggattacaggccctcaccatgtccagctcatttttgtatttttagtagagacggggtttcaccatgttggccaggctggtcttgaattcctgaccccaagtgatccacctgcctcggcctcccagagtgcagggtttacaggtgtgaggcactgcgcccagccaagtatctaccagcttctaattccaattccatgtttgagcttataaaataactgaaagtaatcaaaatatattttgtaagatatatacaaaatacagattttgtgagatatatacaaaatacagattttgtgagatatatacaaaatacagattttgtgagatatatacaaaatacagattttgtgagatatatacaaaatacagattttgtgagatatatacaaaatacagattttgtgagatatatacaaaatacagattttgtgagatatatacaaaatacatattttgtgagatatatacaaaatatatatttaaatctggtagcttggttaattaaggactagtataaaaaattaacataagatacacttgggaccttaaaggactttcatttctctccccttccttcatctctcctccttcacttaccttcatttattattctaggcatgacaagtgtcagatgtctgatttgaagactaatatgaatatatctaggtaataaaatggaaaatccctatttcaacattcttaatggaatccttccttgaaattattattagtcttctggtttaaacatttatatagtgtaaatgcaaaataaaaatgattgtatcaaattatggtttttatttggatgctttgcaagaaaatacttaaatgtgagtcatacatttttccagttcagcatttaaacttcagacttcaaccacagttgtgattgtttttagtttgttagctgcctggagtgttattttaagaaagcagaagcaccatcatttgcacactccttatagatcacacaccttaaccctgactttttttgctccagtttttcagaagaagtgaagtcaagatgaagaaccatttgcttttctggggagtcctggcggtttttattaaggctgttcatgtgaaaggtatgtgatatttagaaaatgatcccagatcaaaggaaaaatataggacagatctgtttttcagttttaaacatttatg

SEQ ID NO: 32143 - DNA, 2300 bp, Homo sapien
ctcaaataatttgcaataaaaatgaaaaatttttatttatgtgcctaaatgcaacagtgtttaaataatgaaaatttaacatttaaagtaaggaaataactacaattccagcatagatgtcatattctttaagcaatattcccaaaacagcaatctaaaggttatctcttatccttctgttctcttacagcaccgggtttacatcatacactgccttgtattccagtaatctgtatgagtgtcttcttttctacctgattatacagtccttaactggctgattcatcactattgtctgtagcattctacaacaaacagtaagcagttaatatctgctaaatgacaaaatgtactaaaatttacattaaaaaataaattcatgcttaccatcagaacataacttttgcccacaactttctaatttaattttattttctaaaatcttgtaaaaatttcaaaatgtttcggacacctttaggcacttggaaaatgtttatttcaaagtatcacttttctaacattttgcattatttttattaacctaatgacactatactttctgaaaagaaattgtcaccattggctgggcgcggtgactcacgcctgtaatcaatcccagcactttgggaggccgaggcgggcgtatcacgaggtcaggagatggagaccatcctggccaacatgatgaaaccccgtctctactaaaaatacaaaaattagctgggagtggtggcgcgtgcctgtaatgccagctactcgggaggctgagggaggagaatcacttgaaccagggggtcggaggttgcagtgggccgagattgccactgcactccagcctggcaacagagcgagcctccgtctcaaaaaaaaaaaaagaaaaaaagaaaaagaaaaaagaaacaaaaaacaaaagaaaaagaaattgtcaccattaattttattttatttatttatttatttattttgagacagagtctctgtctgtcgcccaggctagagtgcagtggtgcgatatcggcttactgccacctccgcctcccgggttcaagtgattctcctgcctcaacctcccgagtagctgggattacaggtacccgccaccacgccccgctaattttttgtatttgtagtagagactgggtttccccatgttggccaggctggttttgcactcctgacctcaagtgatccacccacttcggcctcccaaagtgcttaggattatgggcatgagccaccgcgcccagccatgtcaccattaattttagcaacgtatcaaaagttcagcttccaactacctacattaaaaggtataataatactaaccctgaaccttacatatgtaatgcctaaaaacttacaccctgaattactctaacattacagggcagacttccttgagaagagtcagaccctgcagcggggctctgccttcccactgtcagcctcggggtcatctagctttatcgatccccatggagcgggtcaccgagccctgtgagcagggagagggcgatggggatgagtaaacccgagccggaggcccggcctgcgctctcgcccggaaacctcccgtgggattctggagtccagcggcgctgcctgaggctgtggtacccagaaatatggtattgggggtgggggtgaaatgagaggaaagcaatctgattaacttccagcctgataagcagaaaagagaaaacaagggagcaggaaaactacgctagcactagactgccggtcgcaagcgccgggtacacacgcagttaaacctcaatggaacgcccccgggacttctccggggcgtaaagcgcagcgccctctattggccatcgggacctcgcctggaggtgccgtcaggattccgtcccccagccactcccaggcactcgagagtaagcgcattagcccgagaaagcgttctgtggaacggaacttccttatcctatcgtttccacacggaaagattttaattcaccggaatcgactggcgttaaagggcacagtgaaaaggaagttggtatcaacgtgatctcgactaagggaccgagcggaagtcctcaatcgtacgccacgcggagagcatgctgggggccggaaggaagaggaaattccagtagccgatcaggagtctgcaaactccggtggtaggggagcgcgctgctgtttagagccacgagttaccggagcgcctgattcctgcgccgaagtcagtggtggccgaaagtccggagtcgctgtaaaacctgagattgtgagccatggtggggagatcccggcggcgcggagcagctaagtgg

SEQ ID NO: 32144 - DNA, 2300 bp, Homo sapien
cttcacaaatttgcaggtcattctcgtgcagggaaatgttaatcttttctgtatcgttccaattttagtttatgtgctgctgaagtgagtactactaataattattgatttatgtatttatttgagatgaagttttgctcttattgcccaagctaaagtgcagtggtgctatctcggctcactgcaacctctgccttctggtttcaagcgattctcctgcctcagtctcccaagtagctgggattacaggcactcgccaccacgcccagctaatttttttgtattttaagtagagacggggtttcccctttttggtcaggctggtctcgaactgctgacctcgtgatccacccgcctcggcctcccaaagtgctgggattacaggcgtgagccaccgcacctggccgtaataattattatttaccccaatgttaagttgtattttaaacgctttatttctatttcttatttagccctcacagtatctatgaataacataatcattttacagagctggacaaataacttactcaaataggtagtaggactgggatcaacaggtcagggaaatgccagaaaccgaaaagctaagaaattttctaagactgaagctatcctgtaaacatttcccttttgaatgcttcttgttaaaagactcagtgaaaagtagtattgtaagtctcatggtaattgcgagtagtaatttcaaaagtgatttacagagaataacaacagtaataaaaatgtttacttttcctttcaaagaagtacaacttcctctacacagggaagggctgaacagagaagaggaaaaagcaggtgggcaaaatgttacacaacagtgatttttaattatgagtcaacatggcttctatgccagcattaaacacaaggctaatcagctaggaatccaggataaagaaccatgagagtaactggaaattgtctttattgccgaaagaaatgtttacttaagggaattactggatcagtaatcattgattcgaattctcaaagcaacggtggctaattactagcgagacacgggcactgtgaaagagaaaactgtcgacctgtaattgacatttgtcgtataaattctaagctgtttgatttaaaatgcactcatgcgcacccgcggcactagaaaaccagggaattaaagtcaaagcaaatacaggatttcagtacagcgcacaagacgggaacaaaagaggtggtggaaggaagacacccacctttggtttctcacataaagagctcaatactccaaacagtgaatcaacggttgaagttgcagtgtgtgaaaggcaaatggtacagtttaatacccgggggcagggaggtgcttttttaaaattagctttcgcctcttcttcaacccagatctttgtgccttcgtgctaccgataaagttggcggttacacgacaaaacgccgccaggtatttcgccaggtcttccacttttcaagcactagacacacctgaccgccttacagggcccagcgggggcgggtaaggaagaggcccagggcccgagggtcgggaggcagtcagcccagccggagggaagcggaaggtggggagtgggaagaggaggacgctgccccctaggggagccgagtcacaggctgggggccggggcgggaggggctggaggaggcggccggtagcgaggccgcgccgtcgggcggggcggtccctccagctggcttggaccctggcggggcgggctgtgggccgagcggcggagcccaggcgccagcccgtggccgagaagaaaggtggcggtggcggcggcggcgcagcggacgggacggggcggcggctcctcgccctgaccctctgctcccccgcccaggcccgggcgcgaatcggaggctgcggcgaaggaaggagtgagcatggctgagaccccgccgccgcccaccgctggtgccgaaagttgcagcgaggagccggcgaggggcggggagtggcggccggaggagccgcgccgcgctcccgccgggggcacggaccgagagggcgaggcggggccgccgccggcctcccccgccgggcagtcggagcccgactcgccggtggccgcccccttcttcctgctgtaccccggcgatggaggcgccggcttcggagtgcgcccgccgccgcagcagcagcgctcctggaggaccccgccgtcccccggctcaccgctgcccttcctgctgctgagctacccgagcggcggcggcggcagcagcggcagcggcaagcaccgtgagtggcggaggggcatggggacgcccgcggggaa

SEQ ID NO: 32145 - DNA, 2300 bp, Homo sapien
tcgtttgaaatcgggaggcggaggttgcagtgagcagaggtcatgccactgcactccagcctgggcgacagagcgagactccgtctcaaaaacaaaaaaacaccatacatttgctagtatcctaaggtagagactgagatcacgctcatgaaactttagctttaagtcctctagtcccgatcttgatcatgcttaagcaacagtattaactgataagagtaacaaaatactgttattttctacaataattaataacataaagataacctttaacaatgagggagtccagtcaactgaaattcaggtaattcccacaattgatactgttcaatagttgaaaagttcctctacatcaaaccttgtaccataactgttacagagaaatgacagtcttctttctatagtagcatgcttaatatgtagattacacagaaagaaaacatttttggtgcaaacaaaaaaagaggcggtgtttaaagtacaaagtagaaggattcctcagaaaacaaaagcaaagtctccttgagaagattcttatctttgcctcctctgtataggaagactcacttctgccatgagctgacaatccatctgcacattagtgcagaccactccaacacacaaactatggcttcactaagacagtcaatggtcagtgtctgcccactgacttattactcagtaagtaataaggaggtgtgaacactgggcaacctccagctgaatcacatagacccttcctgttaacctgtcacccaccatcacagttttggatctcttgttagatttaaagagcatgggtttagcagaaaagcaatctgggtcaactgcattccttctcttaagctgttacttgggataaatcgagcttccgcatctgaaaaagtggcattcagtttggcgcacacaaacttattaaccatgattatcacaacacatgcacataggaaataatcaataaatattatcttttcctaggagatggatcggggcagaaaaggtgagtcagggtttcttggcagggcagagcagctaaaagatttgtacttgtgctttaaaaatatagggtgtatggtgggaaaggtccttccctcatcgcttcaggcaagtttctgtctccctttccagaactcatacagcaaagtatttggcgcttacagcatgccttgtatcgtcagccacattttcatactgtaagagcttgtatttgaaaatcagatttaacattcctctaagagtccttatattcattgacgactctagggccctactcgtttgccagcacagtaaacagttcactaataaaaaatacagcacggagtgtgggtcagctgcattcagagcgctcgcgtgtgccagtggctttaaaagtggaggcctcttcccgacaaccgatataaccctgggaggtagccttccaaagccacacattcccttcttgtcttctcatgcaccgctccgatttctctttccaatccgggggacggatctgtcatatttaccggcatggaaggaacgctcgtaaaaaattagttactagtattactaaggccgcactggcggcggcggcggcgcagcagccacacctactcagctgccgcggcgccgggagcccgaaaaaggcgggtcagaggggccacggggtctccgggcgccgccccctcttagactccttcggggaaggttcccagcccgggacccgggacagggccagggcgccccgggtggaggggggcaggcaggccgcttctcgcccccgcccaagcacgtgggaggccggcgaagaccagcgcccagcccaagacgggagagagaccaggccaggcaggagccgcggcctggggagacgcggaggtagaatccggcgcccgaaccgcggtcgtcccgctgcctcctcaccgggcgcctcgggagaacagcttcccgagggtagcccctaaagcccccgcctcccggccacccggctcgggtcaccccgcgggaggcggagctccgcgggggccgggccggccctccccagccgaatgctcccttccccgcgggcgtccccatgcccctccgccactcacggtgcttgccgctgccgctgctgccgccgccgccgctcgggtagctcagcagcaggaagggcagcggtgagccgggggacggcggggtcctccaggagcgctgctgctgcggcggcgggcgcactccgaagccggcgcctccatcgccggggtacagcaggaagaagggggcggccaccggcgagtcgggctccgactgcccggcgggggaggccggcggcggccccgcct

SEQ ID NO: 32146 - DNA, 2300 bp, Homo sapien
cacctcttagtgaatatctgttgaatgaatgaatgaatgaatggctctgagtctagatgtagggtaatgatgagagagaatgagatagaaataaaaccaggagtattttgctttccttagtaacttactgattttccccaattataaataagcctatatatatgccttcttacattgtaccagtataccctccttcttttttttattttgagacagggtagagtgcagtggtatgatctcggctcactgcagcctctgcctcctggcctcacgtgattcttccacctcagtctcccaagtagctaggaccacatgtgcgcgcaaccataccttgctaatttttgtttttgtagagatggagttttgccatgttgcccaggctggtttcaaactcctgagctcaagccattcacctgcctcagcctcccaaagtgctgggattacaggcacatgccaccacatctgactaatttttgtatttttagtagagatgaggtttcaccatgttggccaggctggtctcgaactcctgacctcaggtgatttgcccgccttggcctcccaaagtgctggtattataggcatgagccaccgcgcccagccatccgccctgtcttcgtaacaatatgaaaatgccagtttctctacagaatttgattattagcatttttttctttcagttcagtctcaaattatgatgaagcatttgagattttaacaatattcaaggagaatttttttagttttcagaaattaggtaaatcaagatgtccctctgataacaatccctagaaaggaatagtctcaggtcatatttcttgaatttgtatgttcctccttaaaattggaacccttcaatacaaaaacaaacaaacactttctttcaattgtccaaaacattttcaaagaaaattcttattcttctctttgtaatttatgtagttcataaagcaagtacctgcccttttgctaccaaggtataaatgcctcattggataatatagggccgtgtgtgtgtgtgtgtgtgtgtgtgtgtgtgtgtgtgtgtgtgtgtattaagaaaatataattgtcttcagtatcttatcgaatgggaggattttaaaaatataacatggtttaatctgcttagaaacatatttcatgcttaaggctgggcatggtggctcacgcctgtaatcccagcactttgggaggctgaggtgggaggatcatgaggtcagaagttcaagaccagcctggccaagatggtgaaaccccgtctctactaaaaatacaaaaattagctgggcgtggtggtgggtgcctgtaatcccagctactcgggaggctgaggcagagaattgcttggacctgggagctgagatcacgccactgcactccagcctgggctacagagcaagactctgtctcaaaaaagaaaaaagaaaaaaaaagaaacgtattttatgcttaatacagaaacttgataaatacaacaaaatcaaaaaggggggaaattgccattaattgggaaagattttacttttttaacttgaagttttttttttgcatttctgcctaacctaaaaggtcaggtttttgtaccttggagaaggaaattataaatgcccaagaataagatatttaaattgaaaatctactttagcttttctttttatctttttgttttttttccctctgagaacctcaattttttatgctttagcttttcttaaaacataacatttagcatagtaaagaattttaatagctatgtagataagaatgaaagaggtgaattatatgcttgttaaattaatctaactgcctcttttaccatctttactatagattattatccggtattaattgtcatccttttattcagtccttgatcccaaagtaagaagaattgatgaggatatgtgcattgtgttatgtctgatcacagtttgactagcacagtctggaagtgggttgtacaggatgagagagagaagcctaattgctctcccagcatcagcagcatctataaagcatcctgggaattgcttgccctacgttcagagcagctggtcacatgagcctgaattttcagttcagttcattagtcagccattttggtcaacaccctgcttactgcgcacggccaatcctatgagaactcagcatcccagctcatctgagcagatcctggaagtgatttctgcagctcaggattttttttttaagctacattgaaaatataggtttattttttgttcaggtttttcttttatattttttttctgcacaaaggaggaggatttttcacttac

SEQ ID NO: 32147 - DNA, 2300 bp, Homo sapien
agggatcatggttcttgctctggggttttcttttgtcattttaacactgaggcatcccagcctcccttcctggaagatggagtatttgcactgttgccttttcttttgtccctgtttttgtataaaaatgacaatactctccgtcggactgtattttagcccaaaaaacaaaactaaacccctttttctttgatactccaggttcatagagccaagcctatcaatttttttcttgttctttgttttttggttggggaaagggttttctaagaaatactgaattttccttacctaaaagtagtccaggttaaacaagtcaaactttaaatgtaatacccattgctttaaaatattctagcaaagaaaataaggtctggaagatggtggtaggggatagatgaaacaagactgaaaagtgttgacaatttatgaagttctggaaattcattctgctcttctgtttgacattttccacagtaaggagtttttaaaaatactagctttctcttattttttactctaacaacttccttttgcttgtctttgacaagtcctggctcaggaggagaaaagctgcacaaccagtctttgtgtatgtgtgtgcaaatctctgtgtgttcacttgtgaatacagtttcattaggggagggttcacctttgttatgtattatcagtacataataaatatatatgttttcttttatttttttagagacagggtttcactctgtcacccaggctggagttcagtggtggcaatcatagcttaccacagcctctaccttctgggctgaagcaatcggcctcccaagtagctgggactacaggcccacgccatcacacccagctttatttattttttgtatagacggggtctccctatgttgcccaggctggtctggaactcttgggctccagtgatcctctcacttcagcctcccaaagcgctgggattataggcatgagccaccacgccaggcctatatttcattttaaaacaacgaagttctccttcctcacatacctcaaattcggggggtaccaaatctctgatattatcccaacgatttttttataaccaaggtatcacaattcctttcagaaagggttctttagccactcacaccacgggtttcggtggcacagcgcagggcagcacagacttgtgctacagctctcggccctacccagagcaggatggccctaacctaatttttttgtttgtttgtttggagatggcgtctcactctgtcgcccaggctgcagtgcggtggcacgatcttggctcactgcaacctccgcctcctgggttcaagcgattctcctgcctcagcctcctgagtagctgggattacgggcacccgtcaccacacccggctaatttttgtgtttttagtagagacacagtttcaccatgttggccaggctggtcttgaactgctgacctcaggtgatccgccctacctcggcctactaaagtgctgggattacaggcgggagccaccgcgtccgacctaattttttgtattttagtagagacgggatttcaccgtgttgcctaggttggtctcgaactcctgacctcaggcagtccacccgcctctgcctgccaaagtgctaggattacaagaatgagtcactacgaatgagtcactgcgccaggcccctagcctcacttactttgggcctcagtttccaccgcctgaaaaaagagcagttcgattgcacccacttccccgggccccgcccaaaccatgggcagccccgcccaaaccatgggcagccccgcccaaaccatgggcagccccgcccaaaccatgggcagccccgcccaaaccatgggcagccccgcccaaaccatgggcagccccgcccaaaccatgggcagccccgcccaaaccatgggcagccccgcccaaaccatgggcagccccgcccaaaccatgggcagccccgcccaaaccatgggcagccccgcccaagggcggagactgggcggagcgtcgcgctctcctccacctccttccgactctcggaggccccccacccagtgcccgcggcgcatgtgccaggcacaccccacccccaaccggccctggattccacttccgttccaccatcgctgctggagcagctgccttcaggccctgcgccgcctccggagtccatggccggcacgcgctgggtactcggggcgctgctccggggctgcggctgtaactgcagcagctgccggcgcaccggcgccgcctgcctgcccttctactccgccgctggctctatcccgtcgggcgtctcgg

SEQ ID NO: 32148 - DNA, 2300 bp, Homo sapien
cagggagcagtttggaaatgtgtgccagtcatttgaaggatgcccctggcaggagagaactttagaactggaagatattttagagatcatgtaatgatagaaggctcccattttaaatgggctaaaactgaggctatgacaggtcaactcactctttccaaagataatcagtaatctggtaatgcaagtcttactttcagaagacccttacaagaatcatacagggctgggcgtggtggctcacgcctgtaattccagcatattgggaggccaaggcaggcagatcacgaggtcaggagtttgagaccagcctggccaacatagtaaaaccccgtctctactaaaaattcaaaaattagccaggtgtggtggcacaggcctgtaatcccagctacttaggaggctgaggcagaattgtttgaacccaggaggcagaagttgcagtgagcctagtccagaagttgcaccactggactccagcctgggtgacagagtgagactccgtctcaaaaaaaaaaaaaaaaaaaagaattatacagtaagtcagtaccatatcaatatttggagcacagggttttataccataaatctattattttcattcagataaatcctcctctttcttctttttggggaatcttttaaaaaatttttaatttaatttgaagttccaggatacatgtgcaggacgtgcaggtttgttacataggtaaacgtgtgtgccatggtggtgtgctgaacctatcaacttatcacctaggtattaagctctgcatgcattagctatttatcctgatctggtaatcttttgagtctgtaagttttctcattccagtaacctctgctgttcctgagatagtgcaagattctagtattttcttctattaaaaaattttttttttgagacggagtctaactctgtcacccaggctggagtgtagtggcatgatcttggctcactgcaacctctgcttcctgggttggagcaattctcctgcctcagcctcccgagtagctgggattacaagtgtgtgccaccatgcccggctaatttttgtatttttagtagagacggggtttggccatggtcttgaactttggctggtcttgaactcctgacctcaggtgatccacccacctcggcctcccagagtgctgggattacaggcatgagccactgcgcccggcctaaaacgtttttttttttttttttttttttttttttttttttttttaccactttaccaacgtgccaaataatagtgcatatatgcagtataatacatttcatatctgcacctacttcaaagtgtattctgccctttgggataagccaaaggtgagctaatatctgcacatgatttgttttgctcagattctctttgaaaacttgtagatttgatgggtgttgtgagtaaagaagacggacatctcttcgatacccgtatttccctcctaaattggtaatgctgtggtgacatattcaaggtatgtgaaggattcttaaacagaatataaaggcttgccctgggccccataaccctgtgagaataaaagtccctttgtaagtgggtctgaatagcttctagcttctaggatgttctgtgcattagaatgcttacaagctttggccccctaagtggttacaccgatgaccaccctatcatgctgggttccgtggtgaactgagagatgccattacctttcaccgcccttggccggacactcacggtgggcctaactccggtggtaattccatccctcactgcgggaccttgacatccccgagctgaagcccacttcctccctgacctctggagcccagctgagcggctccgagagctctgccatgactcctaaccgggtggacaggggggccgggcagccgcggcgcacacgctgggcgtcgtccctagcagcagaggagaccagaaggtgagagtccccatgccgcagccggagggccggggtgggcttgcaccgctatcgcgagagctcgtgaggtgggggcggcggggagctggggaggggctcgcggagagcctgccccgcctccctttccttcccctcccctggagtgattcaagacgagcgctacccacttccgccccctccccctgccattggaactagctgagccgaactagttgcggccaccgagcagccggctctcggcacctcctcctccgcctccctgtctcctgttccattcgcctttcctcttctttcctggcccacgccgctccgaggcctcgcgaccgccgagcctgcagcctgccccgcggccaacatgagcttct

SEQ ID NO: 32149 - DNA, 2300 bp, Homo sapien
ctggtgtttgaaatctttcattttccagtgcttaaactcttcatcattgtaagatacttcttgtgtgggtcttttttgtggaaaccacacttggagatttctactccttaaccccaagcctctttatgacatccatccaggaccagctctgctttcctgttgaaggtctcaagagacttgccttcctcctctcggtagctgccagtactcttaccatttcatgagttttcccccaagcttggctgtgaaatgtgatacctattagcttccgcagcacctttctcccaacttccttgctatacctgatgacaactcttcaggcctcttatattcctaggatcttgctattaatcactatagggataagtaaaagtaatatatacaaaataattgcataacagaataatatagggcagttacatagaatgattcttgctgtttaatcctggaaaatgtgatccccgaggattcacattttaatttctgctctttatttctgaggatggagtcaccgttttccccttctggctacacatttagatgcatttcaggtctgatgatagttgcaatgtaaaaaagaatagcaaggcctttggtttctgtagacaatttggaccagataacttccagactgggtaatatccggtttattagtgttactggatgggaagtcttgactgagttgtctgggtttttggcgtgttgaacaaagaattgaacaaaacgtagaaacaaagcaacaaaagaagcaacgaaagacaaaacaacaaaagaacgaagtaacaaaagcacaaatttattgaagcgaaccaagtgcttcaagagtcccaattgcagtgttcttaagggttactaggctaaaagaatttggtaaatccctaggtgccctttacagtcgtccaattggttgcaccctatgaaggattggcctgcgaccaatcagaggctgaaatggagatggccgaggacaatcagaggcgatgtggaaacttctgtcttgtaatcacaggagtgaaggtgtggcctgtatgctgcctagtcttgcctagaaattgctgcacctgctgttcttttgcttatgccttaacccttggttaccctaattccctattctcttgcctcattaggtctttaccctgactaaaaatgcactcatctagctgggacaaatcctacactgcatttgtcccatctagatgagtattctagcagagtacatggcacatgagtaggcattcaaaaattcaacatacagtacattttgttacctatgtgccaggtgtcgggcaggctgagttaacagctgaacagaaacctacctacccaacgtgctaacttctatacagcatggtcgtgcatccaaatcaaatggaaagcggtatgggagatctggaaaggcctcctgtgggtggcatctgactacctaaattcccatcccagtttcacttactgactttgacacttggaacaagcagcctctcagtgcctgttttcccactggcaggtaaatgggctaatgacggtatttctggcactagacttcgttaattaatgaaaagcacatagaagaaaacagcctggctctctaagtgggcagtgcgattcccaaggacggcacttcgcctgatagtcttcctctaggctgagaagccagagtaaatccatttgattttcctaccacacagtgccttctccccagatgagttcaaagctttaagtctatccagttctgtccagacgcgtctgttcatctccaacaggcccactagagaggcgggttttccaaagcctggcacggcccactgcaggtgacgccctctgccctccagcgccctcaggcctctggggtccacccttcctccccacccgactccggaacctcttcccgcgccctgcccgggcgcctggctgcttggggtagaggccttccgccacacgcgcggccccgccccggccttcacgtgacctggcgtgcggagcgcgcacgcgggaacccgcgctggaggcgggcgagggccgaggggcagctagggagcgcggcttgaggagggcggggccgccccgcaggcccgccagtgtcctcagctgcctccgcgcgccaaagtcaaaccccgacacccgccggcgggccggtgagctcactagctgacccggcaggtcaggatctggcttagcggcgccgcgagctccagtgcgcgcacccgtggccgcctcccagccctctttgccggacgagctctgggccgccacaagactaaggaatggccaccccgcccaagagaagctgcccgtctttctca

SEQ ID NO: 32150 - DNA, 2300 bp, Homo sapien
ttctttcaattgcatccgtgtattttggctgcatgcctacaaagagcagtaatacaaaacagtttttctaagaatgaagatggagtcactaaaatcttgcaggccacaaagtctccccttcccaaactgatagcctctcactccctttatcttaacacatacatttttatttcttaataaaaactgttacccagcatgaacgatgcagaagacgggtgatttctgcatttccaaccgaggtaccaggttcatctcactggggagtgtcagaaagtgggtgcaggacagtgggtgcagtgcaccgagcatgagccgaagcagggtgaggcattgcctcacctgggaagcacaaggggtcagggaattccctttcctagtcaaagaaaggggtgacagatgacacctggaaaattgggtcactcccaccctaatactgcacttttccaatggtcttagcaaatggcacaccaggagattatatcccacacctggcccagagggtcctacacccacggagcctcgctcattgctagcacagcagtctgagatcaaactgcaaggtggcagcgaggctgggggagtggcgcccgccattgctaaggcttgagtaggtaaacaaactggcgaggaagctcgaactgggtggagcccaccacagctccaggaggcctgcctgcctctgtagactccacctctgggggcagggcatagccaaacaaaaggcaacagaattctctgcagacttaaatgcccttttctgacagctttgaagagagtagtggttctcccagcacacagctggagatctgagaacagacaaactgcctcctcaagtgggttcctgacccctgagtagcctaattgggagcaccccccagtaggggcagactgacacctcacatggccgggtactcctctgagacaaaatttccagacgaacgatcaggcagcaacatttgctcttcaccaatatccactgttctgcagcctccgctgcagatacctaggcaaacagggtctgtattggacctccagcaaactccaaaagacctgcacctgagggtcctgactgttagaaggaaaactaacaaacagaaaggacatccacgccaaaacaccatctgtacgtcaccatcatcaaagaccaaaggtagataaaaccacaaagatggggaaaaaacagagcagaaaaactggaaactctaaaaatcagagcgcctctcctcctccaaaggaacacagctcctcaccagcaatggaacaaagctggacagagaatgactttgacgagttgagagaagaaggcttcagacaatcaaactacaccaagctaaaggaggaagttcgaacccatggcaaagaagttaaaaaccttgaaaaaaaattagacaaatggccaactagaataaccaatgcagagaagtctttaaaggacctgatggagctgaaaaccatggcacaaaactatgtgacgaatgcacaaccctcagtagccgatcgatcacctggaagaaagggtatcagtgatgcaagatcaaatgaatgaaatgaagtgagaagtttagagaaaaaagaataaaaggaaatgaagaaagcctccaagaaatatgggactatgtgaaaagaccaaatctacctctgactggtgtaccgaaagtgacagacagaatggaaccaagttggaaaacattctgcaggatattgtctatgagaacttccccaatctagcaaggcaggtcaacattcaaattcaggaaatacaaagaatgccacaaagatactcctcaagaagagcaactccaagccacataattgtcagattcaccaaagttgaaatgaaggaaaaaatgttaagggcagccagagagaaaggtcgggttacccacaaaggaaagcccatcagactaacagctgatctctcggcagaaacttcacaagccagaagagagtgggggccaatattcaacattcttaaagaaaagaattttcaccccagaatttcatatccagccaaactaagcttcataagtgaaggagaaataaaatcctttacagacaagcaaatactgagagattttgtcaccaccaagtctgcccaaaaagagctcctgaaggaagcactaaacatggaaaggaacaactggtaccagccactgcaaaaacatgccaaattgtaaagaccattaaggctaggaagaaactgcatcaactaacgagcaaaataaccagctaacatcatgatgacaggatccaattcacacataacaatattaaccttaaatgtaaatgggctaaatgct

SEQ ID NO: 32151 - DNA, 2300 bp, Homo sapien
ccagcactgagtgttcatggctgcttcacgattataatgagaaattgccagctatgttgaaatacataatccacagtgtgaaaaactgctgaacagcaatggcaaatttttaatacaaaagtgacttccctttgcctgttagcttactttgcggttgctgattcttgctaactgcctgctcagggagtgaaagttaattttaacattagcctagaaacagaacataatcatttaggtgaaaactttaaagctaaatttttgttttatctttggttttgagtttcccatgaaaaattcccagtgatatatcactgcactgggttatgtagaatgtgtgaacatatatgtgagccagatgtgacaacagacacatgacagtacattttaatttcagacatcagattggcgtgtttccttgtgccttctgagcattaactaaggattttaaagatagaaactttttaaaagacacaggctccatacctgctttccaagcactggtgaggcaccatggatctctggatctcttccagttttgaatactagaaagaaaagcctctgtcctcaaattatttcctccctaccctcattttttttttctcttggaggtcctataagctatagctttgtattgaagaaatactggggaccaggagcagttggtatgttaaattatttctcttgagctttatgcattttggtggctactgttgaaaacacagtttggtcagtgatgtccacatacacattacatataatatgtattactagaaaatgatatacacttgcatgatataccatgtggttgcaatccattaagtgactactctctagcagtacccagaacaatagatggtgtgtctgtgctgacagtctgttcatatcttaatggtttacttatgattcaatagtttaccaatggcaatggtgctggatcactgatatattatttgcttggcaaagagtacttgaacctcattattagacttaggaacagaataaatacaaataatcactttgctaaggctgttttcctaactcccaaggaagacagaaaggcatcagtgacataagtgaaggacacagttgacaaccacgttatcttcagacatcttttgttaaaggtgaacaattacttaatactgtgttatggcagcactctatacgccccaagttttataaagtagagtcaagagtgatctgagctgggaaactcacgcaattttagttctgcatgaaagcacaggctctccccactggggaactcttttgagtaggacaaaaagctggacctaggacccagcccagggcgtgagagaaaaggaacctgggaggcaagagcggccggtccggagccgggtcctccgccagctccgggcgggcgctgcgcacagagcccaagcccccggcggaggcggcgcggctcgaggcccctccccgccgccgatgcccgggcggctgacgccgagcagcggcccggagcggtgggggccgggctggcgggcacgagcgagggcagggcagggggccggccgaggccacttacggctttaaatatggatcgcaggctcgcgctcgcggcacagcctccgccgcggccgccttccgtgagcccccgcaccccggcttgctcccgaggggcgcctgggctgggctccactgctgcagtgttagttactagcaggaacatcagagatccccataaatatgcaggagctgcaggaggcaaagtagagtagacgcccgcgctcttacacactcgctcgccgcgcaccacacaggctgtgtagacatccccccgcgccacctttcccctttcctcgcgggccgttcaggttgcagtcctgcctgctccgaagaccctcccgccccagcgcctttgccccgctctcccgcgctcgcctctctccggagcgcgcacccacccaggcggcaaagttgtgactacttgggcgcgggtgactggcgccccgctcgctccgcgcccggcgcagacaacttcccgcggctcggccccgccgcgtcccgggctcgcgcctccagggattccgcggccccccagcctccaaccccggcggcgcgccgggcagcgcttcggtggcggcggcggccgcggtggcagcgaaggcggcggcggcggcggcagtggcagtggccgctgcagccccacactccgccgccaaactggaggagcgacggaagccagaccccaggaggtgagcgcccggccccggcagctgccgggagggtcgatggggtccctcgctccaaggcggaggcgggcgcgggcccgggggccg

SEQ ID NO: 32152 - DNA, 2300 bp, Homo sapien
ctttgattatccatgtcacttgcatttatctttgggagacaagaaggcaacacagctacacactttgctgtctgtgtgtgaactgaacaacaaacacgcagtgatcaatcactgacatattttaaagaaacaccccatgattggtcaatgatcattatgcacacatgttagttacgtagtgatttatggactgaagagctagctgcaaagtttgtactttatgaaattactattaatataccatgttaactgaaatttgaactgtattgttagggactatgttatttaatctaaattgtggtgactgaaatgtacacatatcagactgagcaccgtgagggctgcctcaattcctagctttattttatagaaatatatatttcttgtttctttactaaaatgggatcatttaatgtgtattatttttatttttaattttatatggtatacatgtcaaaaaagtccagctattttgacttcatattttatgattgagtggtatttcattgtgtagttgtaccatactttatttaaccaatcttcctttatggatgtttaggatttttctgttttctcagttataaacaatgctagaatgatcacctctgtcactaaacctttgagataactcttatttatttagaatgaatgtatttctagtacaagaattgttggctcacaggatatatacactatttaaaaattttcatgtcccaccagaaattttcatgtccttcaagcatttccctttagagagatgtttccatttaggctcctaccagtaacataaatcaagaagtgctgggtgcatgattcccaaacccttgcccacgttgggattatcatttttttttttatttttgacatttaattaattaattaattaattaatttatagacagggtcttgctttgtcacccaggctggagtgcaatggcatgatctcggctcactgcaacctctgtctcccaggttcaagccattttcctgcctcaccctcttgagtagctgggaatacaggcacacgccaccacgcctggctaattttttgtatttttttagtagaaacagggtttcaccatgttggccaggctggtctcgaactcctgacctcaggtgatccacccgcctcggcctcccaaagtgttgggatcgcaggtgtaagccaccgcgccctgccattttttgacattttaataggtgaaacacattttattttaatgattagtttcgatttttaattaggttgaatatttttcatgggtttatttgtactaaataaattttgatctatggaattttattctgtcctgtattataatagttttcagatggtagggatttttggttttattgggtcatttgtgtacatatatttctacaaatttatatatgcatgtgtgtatgtgtgtctatccataataaatatatttgtgtgtacttgaactgcattcacatgtatataacattgttggttttacccagggattttgaggagtatttgtgggccttaaatttgtaacatgaccatcaatttccaactgcttttctttctctctctctctttcttttcttcttcttcttctttcttctttcgtcgtcttcttcttcttcttttttttttttttgaaagggagtaacccatgacctgggggaaattctagttaatttttcattgcatgattttcaggagatagggtcaaaaggagctagtagggcattcaattatgtgcttgagtgtgttggaaaatgttttttttttttttctctctccctcaagtgtacaatattttacttgggcttgtttttcaagtgcattgaagtgtgactaaacatttttgggtactaccattctgtaaagaagagggcccatcttgttaaatattccttcatcaactttgcagttagccagttattggcagggagaagcctgcgagggcatgagctttaggcattggacagagggagggtgggtgggaggcggggacttgggggatctcaggattggggtactttgttgtccctcccactgctgtatgaaaaagtgactggttcaagctggcttttgtcttataattttggatgagtcataagtggagaaggaggggaagtgagtggttagacctcagctcatctgagggctaaaggttctttgtgacacatcacacagaattggagtgctgtccttctggagagtggtggagaaccaagatacagttcagaaccaaaggaatagagaagggctttgatttctttttggctttagattggggatttgggaggcttagcaggaaagatgt

SEQ ID NO: 32153 - DNA, 2300 bp, Homo sapien
aagttacataaataagactgaaaaaaaggctcatatatttagctactagcctgttttgccgaatttcagttagaaaattcagccaagagaatgcatttggcagctcgtatagagatttctcaagagggcatctaaatgagatgttgcaattcttgctacatgtagtttatcattaaacaaacgtggtaaatattattgcaaaagcagagataaagtttaattttttaaaaaatgaaagaatgagctggtcttaaactctgtatcaaaattcgtagaaaataatctgagtgtgtctttttgaatgaactaatcagaagatgacgaaatacagttgaataaaagggatacagaagtataaatacagtgtattatcttaaagaaaaatgaaaactgtatcaatatgctaatgtgttacctacctcttttgagttccggggttctgagtagtttttaaactttttcacactcatttggagtatcatttccaaataatttgccatagaactaaaatacatttttaaattaacttgcacagtaaactaggaattcagccaaagggaactgaaaatttagatttatagtaatcaggaagttgatccttgaacaagatagagttggctcttggacaggaaagctatctccttgaccatatggatttccactggccttacagaaatacttgtgctttgatctggcataggtatctttttccaactagctggactctattttctgaacctaacacccaaggattttcagtatagatagaaaatctgactaaacatgtaactacctaaattggtttactgaaattttgatagactctgcccatgtagataatccttggctactgagttgataatgaagttttaaatcacttatctgcgggaccctggacacagggctgtctttaaactcttccactgagttccaatggcctcattagtttcattgaccttcacagatattataaatttggaaagccagtgggagaacgtggcaataactagaataagagtaataggtgacattaatccatgttactatgtgatggatgttaccatgagccctgcacccagattaccttaattaacctcatagcaatgttgtgtcaaatgtactgagttatcaccacattgcatatgaggaaaatgaaacttagaggggtaaaataaatttcccaaggttacacagctatgaaagctgagtagggatttgattttagagcatgtgtaacaacctgtacctgaccatttcctgaaaatagggctactgcaaaaaccaggagtggaactcatctaattccaatgaatgatctacctatgactctctagacaagtcacagaatttacccagtgctcagttcactcttctgtaaaatgaagatgttggatttcatgtcctacagggcctctctgagctctcaaattacatgcccataaaatatactagttgtaaactattagtagaaggagctttaaaatcactgtagggagtccaagatttgccactaactttttatgattggcagtggtgagccatttaacctctccagttatttgcctcacttcaaaggttatttttcatatatatgtcagtgcttcacaaagtgcaatacagcatagaaatacaaagtactatgccatcatctaaaataagattacttcatagcatcagaattatggatttaaaatattatgttgaattggcttctcactctttttccccttttacttagaacatctggtctgcaatattttaaggtaatgcttatttgtagtagatttaaacaaagagaggaagagaggtaaagacagagtttccgattttccacttacatatgagaaaggtggggtgtccaaagaagacacacagccctatacagggggagaaggtgtgcgttactaacatattaagtaaactttagtgaggaacagcagtggaaaataatctatataccttggctcttttgcagtttgacaaagttaatgattaaaatctcctagattttccactacagtatccccagggtgtctatttaccttgattgatattattttatctcttttgggccaaagataacagccccttgcttctgtgtttaataataattctgtgttgcttctgagattaataattgattaattcatagtcaggaatctttgtaaaaaggaaaccaattacttttggctaccacttttacatggtcacctacaggagagaggaggtgctgcaagactctctggtagaaaaatgaagagggtcctggtactactgcttgctgtggcatttggacatgc

SEQ ID NO: 32154 - DNA, 2300 bp, Homo sapien
ttcagaaagtgctcttattatgtgggccatatagaacatggccttcccactgacaaattactttagttcttatctcatactgctgtagtaatgcctacaaaggtagtttactcccccatatctaacgctttaatgattttcactgatggctctggtaaaaatggaaaagcagctatctggtggaaactgcgtaactaactccctcagccgatctggatttactagcactcagagagctgaggttggagccctaatattagccctggaaacctttccctttcagcccatcaatattgttaataactctgattactccatttatttattgcagaaccttggaacagccctcattaagtccactcttgagcccaccctgtgtgcactttttctttgacttcagcaattgctggatcaacgaacaaatcctgtttgtatcacacacatttgggcctacagctcactgcctggcccattggcttatggcaatgatgaagcagatctgcaagttataacatcactgcttgaccaagccacccaatcacatcaatttttccaccaaaattggagaaatttatctaaacaatttcagttaacccaaagtctagctaaacaaattattttacaatgcccagattactagctcacaggcacgtccccttcctcaacaggtgttaaccctaagggactagaacctaatcagttatggcaaacagatgttacatacgtccctgaatttggaaaactaagatatgttcatgtatccattgataccaattcccacctaattagcactcatgctcttcctggacagtccacccaatatgtcattaaacatcttctcttaacttttgcgtttatggggcggcccacaaaaattagaactgataacagtctgggttataccagctcaacattttcacaattttgtcacacatgggatgtccaacattccattttagcactttgctaaaatcactcacgatataaaacctttggtgttacggaaagatgtaaatagtaatctatggtgtggtccaaatgatttgctaatgtggggaagaggatatgcttgtattcacaccccctcagatcctctttggattccagctcaatgcatcaaaccataccacgatgtggctgggactcaacccagtaccaaaaataaaggaaataaccctgcaggacccaccaccccagatgatgcagcttcctcggacaacacaggccctggacacggtgctgaagaagacaactcaggaggctgagtgaatcctactctggacacagacaccattcactccagataatttgttcctttctatgctttctgttgtacattgcaactttcatagggtattaacctttcttattctctcactttgcctgcaactcacacctgctaccctctattgggcccatcttctagatccccctttcttccaccctgttacttgggcaggcacccccttcctagcctctaacaatgtgactgattggctaggaaggatcgacatatccccagtgggggtccttcaggaatggcacacattggactgaggtgccaagtaacactacatattactccttgattggaaaataatattactgatcatactcatgtttgtcttatgttatttactaattctaggatgccaagctggaacacgagctgtaaccactgcacctgtcaaacctgtctctgcacacatctttactcttcaatcaacaaaacctgatgcaaaaaacagaaaagggggagatgtaggagactggtgagagtggtgagagaaactatagggaaagagcagaccttctgaaaggttacaagactctgcacagctttgagggagaataagctgaaggcagctgttctccaaccctgaggcagagggcaaggagtgggttcaaggaagggtaggggaatttatcttaaacaggtttgtttacttatgttgaccaggagctgacctttgatcatccatgctgcctgactgctccctgaaaggtggaatgatgctaattacccgcagattgtgtttactccaggctttcagcattatgtctctattgaataaaagcaagcagccccagctgtttgggactgctcattcttcagccactagtgctggacagtcccctagcttctcttacactgcatacctgtgtctgagtactcttttcatcagtcactcagccagggtctgcagcatgaacccagcagctggtgtcccctatgaggaactcagcaacagattgcgacagaacccttgagaacaaaggtaaagtgactgcccagtcaa

SEQ ID NO: 32155 - DNA, 2300 bp, Homo sapien
aacaaacaaacaaacaaaaaacaaacaaaaaacaaagaaatatctatgttaaatggcagtgtaggaaaataaaaatttaaaaacagcctgtaaaggatacaaaaaatgagtagccagagatgcagggtaaagaaacaaaaaataggggattatgatgaaatatatgccaagaggaggaactgttgcagatagaaatcaagctgttctaaggccaaataagatgcagtctgaaaaatatccattgtatttcattgtatttctcaacatggaagtactgatgatttttgcaagattgtctggtgagaaggtctaactggagtgggttgctaagtggatgggaagtgaggaagtgcaaatgacagattgggcagcagaacagtgcagttgttcctgagaaggaacgatgtaggtattacacttagaccttgcaggaaaacagtgggatttttattttgttttgttttaaatggaagatcttgacatatataaaagccaggaataattcatttcacaaggagagaagaaatatataagagagtgtgagaatcctgaaagtacgggagagggtgggaagaaaagctcaccatggtagacatgggctttagctaggagaaagaaagacaagctcctctattaaaaccagttatagcaaagaatgatgaatgaatgcatggaagttaaagcagggtgtgtaggtgtttacaggagaagtactcagggaaaggtgcatatcaggtccttccctagttttatataattttctcctgcttatggatatagtctactgtttttagtggtggtggaatggtaggggtggggagcaggagaatagttcttgcagtgtgttgtttcatgatacagaaatggaatcatagtttaaatgattgttacataagtttcatatttcttttaatttgtaatagaatcctagcaagctggacattacctcactgtctcatcaaaagcgttgctattgctttcattctttttaatgacttatttttccagtggtatgaggtactgtgtagagcaatgaatcacaattatttttgcactttgatttgagaatttcaggttgaatacaaaatgcttttctcttcttagttttattttacccaactaacttattattctatcctatgactcctgtgttatctctttaacgtctttttcttttctatgactttctgtgccttgagtatcctgataaactttagagaagtgggaccagtatccttaccttgaacttggtaaagtcttgggagaaatacgcctcaatttagtcattaaacacacacaccacacacacacacttgtcaaaatctgcaactttaatccaagaccaaggaatcctactttaaaaggtctgtctcaccataggctttttttctgtattccacgtgtaccagtgatataggcagagaaatgtagcagataaagaaatgaatttggcttctggagcttttctttcatttaaataccacctctgtaatcttagacaagtcactaaaccttggtgcctctgtgtgaattggaaataattatatatcaactcttcacaaacctagagtgctatcgtgaggattaggtctaaaaggctcctcacaggtttctcatgcttaaagcacctttaattatccctttcttagtaattgtataaatctctaagttaatccattaaagtctagtcatcatctctctattagcaagacccaactgggcagatagtgttgttaggatcattgtgagtctccccagggttcttccccttccatttctgattatgctgtgaatatatttccagaatttcagaggggtttgcttgcaagctaaaagatctttgcaaaggctcaaaaaatacggtctgcttcagacagagagagggtttgcaatatgcgatgaatctctcagtcccattagaaccttaaagatgatgatagctcacatttaatgtaatgattaatgtgtaccaggaccattccaggcacttttgcatgtagacaaataattctcagattacttactgattaatatcatcatcatctctattttacaaacgaggaaactgaggcacagagaggctaaatcacttgcccaggatctggagccaagtaatggtgatactgatgcttccttttctttgccgcgctcggattctgagtttcacaagaatgtacctgggtgccccttagcgggatatgaatagcttcttcggaaccccagcggccagctggtgcctcctggaaagtgacgtctcatctgcaccggacaaggaggcggggagggagcgcagagcactc

SEQ ID NO: 32156 - DNA, 2300 bp, Homo sapien
gtctcatttaaaatctttaaagtacctcatttaggccaggtgtggtaactcatgcctgtaattccagcactttgggaggcagaggcaggaggatcgcttgagctcagtttgagatcagcctaggcaacatagtgagatcctgtgcctacaaattaaaaaaaaaaacaaaaaactagctggtcatagtggtacatacctgtagttctagcaactcgggaagttaaggttaaggtgggaggattgcttgacccctggaggttgaggttgcagtgagccatgattatgccactgcactccagcttcggcaacagagcaagatcttgtttgaaaaaaaaaaaaaaaaaaggacctcatttaaagtctctaaattttccttctcattttactttctgtccttgcattcttggcacactgataataaactgaatgtggggtctttctaggatcacatcttccagtctttgtaaggatgctgtatctcatttataatagacaactctctcagcagagttcgtagtcttgtgtttccctttctacttactcatgatctcctcttctgtctggaattcctcatcctccacaggtgtgcaaactgttttgtttgtttttgtccttgggtagccgtttatatcatttatatcagtgttacttaaggcttcaaagcctttggctaaaatcttccctgtttgagggagtttcctttgttcctgctcttttttcagctggaaaaactacattaagtaatttctgtgatatatgcttctttcaaaactagtggccctatgcttcccttaacacagaagtatcaaagaccagcatgagcttgaccaatatcctgagcttgcttttgatattttgattatctaggttttagtaactttttctaattcatgtttacctacagaattagtgcccgcttgaagattctacagtatccaaagccttacagtttctcactgtctctatcctcagctctcatcttttttcctcctttgacaccctcgagtcttgaacatgccaagctcattctcaattacaacttttgcacgtgatgctctccctgcctgggaatcgtgagtctcagagctgcagggaaggggttctttaagtcatttcatctcgggtctggaatgcttctccacactactagtcctcacagtattgtctgatttgtgtcaaagcccacttgctagttgagactttctcatttatgtgttcacttattaatgattttattccccaaaatgaaatataagctccatgagagatgtacagtatgctttcatatttattgctggccttagtgcctagaacagagtctagtgcatagtagatactcagaaaatatttgttctgtgaaaattttacttccatttccctattagattatcctgcatctttttacaggtccagacaagttgccgaaacttcaaccttatcattcctgttttttaattcctttctgttgatcctaccttagctaaaataccaatcagtatattttttttcctgtaatatggaaaaaaatttgaaaaagctatcattgcaccattttaatatacattcaggttgcatagtatctgtatatgttgatttcaaagaataatctggatctgagtactaggaaaaacgaaaataaaaagtagcacaacgtttactttttattaaagttacattagccattccactgttttcactggcatgatttttcatgtttaaaatatattttgaaaatatatacatatatagagatataattttgcataagtgcctaaactaaattatatcataatgttgttttttaattcttgatttttaaatttcctttctttttttttttttttttttttgagatggagtctctgtcgcccaggctagagtgcagtggcgcaatctcggctcactgcaagctccgcctcccgggttcgcgccattctcctgcgtcagcctcccgagtagctgggactggcgcctgggttttttgtttttttttgttttttgagacggagtctcgctctgtcgcccaggctggaatgcagtggcgcgatctcggctcactgcaagctccacctcctgggttcacgctattctcctgcctcagcctcctgagtagctgggactacaggcgcccgccaccacgcctggctaatttttttgtatttttagtagggacggcgtttcactgtgttagccagatggtctccatctcccgacctcgtgatccacccacctcggcctcccaaagtgctgggattacaggcgtgagccaccgcgcccggccaatttcctttcttagttgc

SEQ ID NO: 32157 - DNA, 2300 bp, Homo sapien
cccatgacacaagtttacctgtgtaataaacttgtacatgtacccctgaattaaaaatagaagttaaattaaaaaaaaacttgtctgggagtgataacaataattatcaatttgtacaccctcttttttttttaacatttattgtacttttatttcaatgctcaatttacagaaaaatcctataatacccctttgaatttagtaaatatgttcacacatacagtttttgcaagattagtttttagaatccttccatcatttgtttaaaccttcagctttatcttatctaattcaaaacaatccttcaaccctaggcaaaaatttacatttccatgcttttttataatcttttagtaaaatcacattttactgttcttacaaatcacccatgtaaatctatttccagtagtctgaattacatgttataatgttatataatgttataatgttaaatgttataactcctagcaatttttttttattacactttaagttttagggtacatgtgcacattgtgcaggttagttacatatgtatacatgtgccatgctggtgcgctgcacccactaactcgtcatctagcattaggtatatctcctagtgctatccctcccccctccccccaccccacaacagtccccagagtgtgatattccccttcctgtgtccatgtgatctcattgttcaattcccacctatgagtgagaatatgcggtgtacaccctctttttgtttagcacagtatcttgataatgtaactgatatggacaggaggcaaggaaatactagttagaaaagggcgcagtccctggcaaggactccaccttcaagcttggaccttgggctctaagtgagaacatgcaatcctgttttcccacctgaaatttgcctttttcaaaaccatcctgccctgccacgccccgcatcctatacctataaaaaccccaggttccaatggcacagcagcagagtggtgcggcagagaaggagagaagacaagaagcatctgaacatcgagaaaaaaaacagctgggcattggagactatggttggagaggagttcaaccagggaccatcaatcatcttcccactccatccccgttccagctctctatcctgctgagagccacttccaccgctcaataaaatcctccacattcaccacacttcaattcgttcatgcgacctgattcttcctgaatgccagacaggaactcaggtaccaagaggacaggtgcaaaatgctgtcaccctgaccctccactgagctggttaacacttagctgtctgctttctggggctccaggggtcacaggcaacctctagacacagccctggggctggtacaggattagttactgctggcacccaaaagcacttgccctagctcctgcaccctctcacctgcatgctccccctcccacaaggggcttgagagttgcaggtggagtaagggagccgccccttcaccagtcccaagcaggggtcaagggaagggtcctttcatcacaacctcaataaaatttttttttaatgataaacatcacaaaaactcagatctatgcagtaaggtaaagtacttctgtgggcccagaagtactttagggtgctaccctaagctttacaatgtaaacttatgttgcacacataaactaccactttttgaaaaatcattaatattgttgcatcttctctcaaaaactgttggaaatctctctagctaaccacatgagggcctaaatttctacttatgtcagactgaagacataatcatatcagatgtgtcagttctttggaccttacagttcatagtgatatttctatcatcttacatgtgccctgaactttattaagaaaatacaaaggtttcaggtaagacataattgtggggaaaagcaagagagatcagattgttactgtgtctgtgtagaaagaagtagacataggagactccattttgttaggtactaagaaaaattcttctgccttgagattctgttaatctatgaccttacccccaaccccgtgctctctgaaacatgtgctgtgtcaactcagagttgaatggattaagggcggtgcaggatgtgctttgttaaacagatgcttgagggcagcatgctccttaagagtcatcaccactccctaatctcaagtacccagggacacaaaaactgcggaaggccgcagggacctctgcctaggaaagccaggtattgtccaaggtttctccccatgtgatagtctgaaatatggcctcgtgggaagggaaagacctgaccgtcccccagcccgacac

SEQ ID NO: 32158 - DNA, 2300 bp, Homo sapien
caaagaacttggaaatgttttaaaactgccacatctttatttcttgcacttgcactcaaatgctttttttttcagggctagcttttgcaggaagccaaactaaaaaaattcccaagctgatttctcctgactgaatcctttgcctgaattttacagttacgttccaaagcacctactgtacaacttcaactgcacattcaacaaaaggcaccttaaattaaacatgcccagagctgaactcattattccaagccccacaccatacacaaacaaaataaaaggcagctgtttttttcatgctccccaaatcagtgaaaggcaggaccactcactcaattcaaacaaaaaacctgagctttatccttgaatcttctttctgtcaactttgctggcactctccaaattctattatttctgagtgctaactagttctgaaccaggccactgccctttgccacttggaatactgagattgttttctaactggccttcgggctcaggaagccaacctccaatttattttcttctcatagcagcccaaataagcttcttaaattgtaaaaatgatcctgccttttacaatgtaaatccttcaatgaatccccattgctctttaaatgaagtccaaactttttagcagaattttagtaattattatacagtttttaatatttttatatttccattgactttctcagcagggactattctctatcttattcatctttgccttcctgaatatatacacacaaacacatatatatgtatgtttacaaatatataagtatatatactcatatatgtacatttattaaacaaatatgtaagtacatatattgttataaatataaatatataaatacatatatttgttataaatacaaatatataaatacatatatgtacagataagcatatgtacttttatatttgttcattattacttttattgttaatagtgtctgctatactccatttattcaaattttgagttaaaatttatctcctatataaatatatgtacttatatatttgtttaataagtaaattgaacaataatatccaaaaccctattagtaggtattcaaaaagagcaaaatacatacgtttgtgtctatgaaattacccataatttcacggcaggtgaatgggagaattcttggattagaagactggaagaacgcttgaagttgaagagagaagatcttacacatgaaggagttataaagaatgacaacagagcagtcaaagcccaggctaactagtcattctatgaagataagttagataagttaatttggagttgctgctcagccacttaaagctctacattttcttatctacagatctggaatgtaacaattttcataacatttcagttttatggagtcataaaaatcaaagaagattaaataggtaatagttactttgaaaaaatataaaatgttacacagttgcataatagtgtgattatcttttgattaacataatgaaattcaataataataacaagatccacaatatcaaaatcatagtaaaatgaatcaggcttactctacatactgatgctgaatttttgtactcaccagaggacatagaatgttaggaaggctcataatcagaactcataatgaatactctcagatttttacagctgtaaagcaaatcagcaaaacatttagtggcttcaaacaatattggtttattacatctcatgattttgtgggttaattgggcacctctttgttcatcctcctgctccatgtgttataactggaatcactcatgttgcagcattaatctgggagctaaactggggctggaacatccaaaatggctaagctcttatctcccggaatctttctctacatgcctttcatctaattcaagcttcttggaaattgaagtctggattttaagaggaagcattccagaaggacctgccccacatgcaagtgtataaaaagcttctgcttgcatcatgtttgctaatatcctattggtcaaagcaagttacacagataatgcgtaggggaccacacaagagcctgagggataaaaggttgattgattgctacagatcagcagtctaccacagcctaagagctacccatctaaagaggacgatgtagaggttgagtttgagctctgaagccaaactacttgtgttaaaatcctgtgtaattattggtaagatttttacatttccaagtctgttttgctatcttttaagcaaggaggcttaaagagacggtccatgcaaattaatggaacagagtctgaaacggttttaggcattc

SEQ ID NO: 32159 - DNA, 2300 bp, Homo sapien
gatataattacattgtattcttttctagcaacatgagtatctggctttagagacctgatgcttaaccatcatgatagatgcttcaagacttgcccactgattataatctgaccacagcaagtggtgtgggctggaggtacaagagggagatttgtagctaggagatgagggtgtagacaagcaatgttctatcattatgacattgcttttccattctgagtcctggaacatggtggctaggctgtctggggcaaagagaattagatatctggctagagtgtaagggttgttcgaatggtgcttgatttttaatgctgttttaaaaaaaaagacagaaaaaagagaataaaagccagataaccagatcctctacccccactgattttagtatcacctcatttctcaaacaaaaggtagttctaaaaatttagtttggaataccaatgaattgcacatttctctctttgcataatcagtaaaatcctatgaaagctacatgaaaatcaatttttttaaaggcagctttgccctgaacaaaattaaaaggcaagagacaaactgagaaaatatttgcaactcatattacaaaaaggaattcatatctttagtgcacagattaggagagaaaaaatgtgtacagttccaataaaaaccaggacagtcatgcaatgtacagtgtttaaaatatgtgagtaataaacttaggaaaattaaactttattagttatcaaataaataacaactaaaatcatgatatttttcccatccaattaataaaggtgaaaattatgtaacatgtagtgtcaaatggccactttcatacactctcattattaaagtaacaattgttctaactgttccggaggaccattcaccagtctatcagaagaactagaattataaaaagtgtttgttcccttcagtctactaagaaacgccagaaatccccacaaaggttgggaaaatttctaatgaaaacaaatattgaagagttaccacacacttattaacaataatacataacaattttaggattacagactatgctgacatttaaaagtatattttctttttttaacttttttttgtacaagtgcaatttagctacattgatatcttgcattgtggtaaagtcagggccttcagtgcatccatcactggagcaatgcacattgtacccaccaagcaagttcccatcattcagccctccttccattccctctgacccctctgagtctccaatgaccatcattccacactccaaaagcatgttttcaaagaatattttgagaaatgtgcatgttacatgaaataaacaaagccaggaaagtaaatatgtctgtacacacacacacacacacacacacacacacacacacacacacacacagaatgcaaatatcttgagggactatcacaataataaaagtgactggttttctctagttaggtagaattatgatttttcgttttctttctatttttccataatgtatatattttctggagggaacattactatctttatcatcacaacacaacaatttccgttgaagacaattttaaaatgcaccaaaatttttaaatttaaaaattcaaaaaatttaaaaatttaaaaattttaatttaaaaattttaatcctttaattttaattataattctttacacttaaaagttaaaatcctttaaaaaggagatgatataatttaaggaaacctacagtgaaccttataaagttattatttttataatacaaactcttactcctcagtgtatgtattttttaacacttttatgttaaaagttttatagatacttcatctttttcttaaacagggcacatttgcactatggtttatagaaataaaaacattataatttttgaaactatttgaaagttttcagttttaataagagcaatattctgaaatatttgtaattttacactcaaaatttaaaaccctcaggtgatttacatattgatttcatgtgtatgttagattatacctcaagaaaatgatacccgctctagcctgacatataagtacatcatccatgaagactctgtacctacaatcaacagcaacaatgtcatccaggaagaattagatacttttgagtgggctttgaagagctggtctcagtgttccaaaccctgtggtggaggtaaccattgaacacatttattatattaaaatgtaatgcatataaaaaccaatcttgcttctacctttattgctgtctctaatcgaggccacaatctgagaaacaccaaacataaccatcaaaacatcaatac

SEQ ID NO: 32160 - DNA, 2300 bp, Homo sapien
tgatatatgtatgacccatctatctctcagaatcattgttaatgaaacattttaaaagttaaataaaagtgctttgaaagctgcatatgttttagacatgttatattattatctaaaccaagacatagtttattttatcatttttaaaaagatcatgtagccctcaaaatattctggtatgatataggtagtgacagatgaagggtaaaatcttaccaactgtgcaagctgggtgctcaaagagttcttattgattatagtgtttgatgcttactggtgaatgtatcatttaaaaacttgtctgagtgaatgttgtttttccattttaattttctacttgaaaaatacaagtctaaattaccctttaatagggtatattaatgacataattgcttttggataattttaaatgcatctccacctggaagaaaaaagagcagtaagaaagcccttcaactagatggttcttgtataacaacttcagctttagtgtatgcgtgattttaataattaccttttgtcatttttctaagtggtgctataagggtcattgcatgtggaagaatgctaatcagcaaaaacaagatggcaattgggggtcatggactaaatttggctcctgttctcggacatgtggaactggtgttcgtttcagaacacgccagtgcaataatcccatgtgagtatatccttgtaactcttgttatttttggagagaccagaaaatacttcaatattatgttattagtattctgttttataaagtgcatgtaaaacacagggcaggaaaataaattgttcacagttcataaaccagtctgtgtttttgatacatctccatttattaatcttgtgacaagcagtcagtgatgaagaagatcaaacgaagattgaatatttttaaagaagttgctgttcaggaatattaagaagctgaacaaggaaagtaggtcactgtgccctaagggcgtgggcatgggcactgcgagattgactgccagaaacaagagagtgtccaggaaagagcggtaccaagcatacagactctctctcttcagggagtggaatgtgattgcttcagaggaaggcaaaagaaagattgtgatagaaggccaggtgactgttgggggaaagttatctattcattcactcagactacaattactgaattccctattgtgtgctcagcaatctttacgaagaaaaaaacaactgaattctcacatttagaggattctgccttgtctagggtttaatatgtgagcagctttttctctctgtttctggcagcaggatgtctctgagcacgtcttttgtaagactatctgatgccacatacctgccttcccagtaagagatgatggtggtattagaagtaacaaagacaataaaaattaaaagatcagctaaagttcattatgagccagagttgttaggagtgctttaaataatgtcaactcatttaatcttcacagttttcctcaaaggaagatacattattatttgcattttacatatgagggaaccgagccatggagcgatgaccaaagtttctttgagctgcatctgtgtgttttatacatggtagcaaaatatcattttattgattcaatatacatgctttttttttcttacacacttttgccatgcatttaaaatatatgatttgaaaagctgatttaagttgagctttgtgttttgttttatttttccacccagcagggagagaagggtgctttggaaagggactgaaattaggaagtatgagttcattcactttgtgctggcagcccagaaactttggctttgtgccctcaagcactgtgtctgcaagcttcaactgctagacagaagccaaaaggcctttttaaatgttgtcttttctttaggcccatcaatggtggtcaggattgtcctggtgttaattttgagtaccagctttgtaacacagaagaatgccaaaaacactttgaggacttcagagcacagcagtgtcagcagcgaaactcccactttgaataccagaataccaaacaccactggttgccatatgaacatcctgaccgtgagtagcctcgtgctctccttcctgctgtgtggatggttactcacagtttaagctttgccagcacgaaccccatggactcttgatccctatgtggtaacttaggaaacttggtgcttataggagtaagttctcctgggtttctaagaataaggcttaaataccctttctctaaagaggtaagaatggtgcaatagttcctggcaagcagcactatcaccatcagcggtgaaaa

SEQ ID NO: 32161 - DNA, 2300 bp, Homo sapien
acaaaagggcctactgtaataacatggttaaatacattatttgttattacctaaaatcagatgattttagatctcaaatatctcatagaggagaaaccaaaatagaggtttattctgacttgtcaaggtaagacagctgttagctgggtctagaacctagatctcctaatgtgtatctctagtgttcttttacttgtcagtgtaaattgacagatttttcatttatggaatgcttagggttacttctttttaatgaatagacaaactcggtgtaaaatgtagcaaatcactcctggatagctagttaatgacaagttacaaaaatgctacaggctttaattgaaggaaaaaagtaatttagagatacttcagtgctggggtctaattctaattccaattaataactaattgacctaatatcctgttttactaggtggggccatttagttacctagtttctcatttgtatatgtaaatgtcctcgatatatgattttgagaagacttagcagataaaacatcagtgaacaccaaatctttccatgcttaagttaaaggcacaaccatcacgttacctctccaggaataaacaatgaatcgaagttataggaaaccctccaaactcacattgcttttaaaaaagaacaagaactatgacttatcttgcatctcataacaagataaacactagctcgttttattgtgggcaggcctcttcaagactgtccagttgaagtcttgaagttcgtatctaaatttgtgtctactcactcctggctcgtggaccggtcagtggaggttggagctatttccttttcctcctgtctgctttctggaaagcacccacaggtgtctacgcctgggaggtgggcctgggctaggattccagcaaactctcaggttggtgtcatttcccctcaggaagcgccaggccacagcgggcagaaatcatttgataacttaatctgggtgtgaggaagagtcgctgaggcctgtgtactctagtgataaacggaagcatccgggtgagtcaaggaaaggacgtggtatcttttaaaactaatataaacgaataaagcctaaacaagagcttacaaagaaggacaccccctgccaaaacgtgggaggtgactggtgcctggaagggagatcaccgcgtggttaagatctggaggttccagggcttctcttcggggagaattctctggctgggagaacagtggaggttggaggaggtgaatttcctacagcccaggaccagccctcggaccctcccccttcctataattaactcaacgcgcgtcccgccagtcgggaccggtggcgcccctggaccctcccctcctctcgccctaggcggagaaggagaggctccagggtgggaggtcgagcccgggccacaccagcccccgagcggtctccaatcctgacacggtgcggggggcgcgggttcgggccccgcatgacgtgggcgccacggcgggaggggcagtccggggagctccggacgccttattagcgccccgcgggtcgccagcagccagcagactgccgcgctgcgagcaacaggagccggcgagcggcccactcctcccacctcctccgcctgccttctcctcctccccttcgctcctcccgcccccacctctgcgtgtgcggcggagtcgccctctccctgcctctttctcccgctcccgctcgctcgtctctctcgctaatacttccccctgctgtgctccggggaacccaagcattctccgcgctaaccttagggaccaatggtgctcgaaaagcctcgaaaaagctgctttgggcagagatagttggaaagcccctcgtcccttccccctctcccaggcttagcctgtgcccgcttacagcaccttctcgctcctgcacactctgtgttgggaggacggggtgagaaggtgaagtggaaaaaactgcagagcagagggggccagtctcagagctcaaatttcattttcattgaagcaaagcacagaagatcatttttttctatttcgcattttttcccttttcctttttttcttaaagaaacttattttgggcggggggggtgggtttgctctgggcatttgctttgcccagtagttggaaagtgaactcgactcgtgatggttctcctgtcactttggttgatagcagccgctctggtagaggttaggacttcagctgatggacaagtaagtggaaaataataacaataaaaaaaaactcaaacccaaccttttcccgaaaagttcctcccctctctaccctcctctctttcctccttct

SEQ ID NO: 32162 - DNA, 2300 bp, Homo sapien
atatcaaagactggaataagctaattataaatgttgaacctttaaaaatgttttaatacattgcacaagttcatttgcaaagaggattgacaaatgatttcagttggtccactcaatagttgtagatcattttgtactgtactctgaaacaaaagatacaaaataatcacaatgttgtataaacagtacctatacattagtagtaacacttttcttttgcattgggctttaaaattgacaactacttcccccaacatcctctaccaagtagatagcaagttctagtcatccctgttatatagattaagaaatgtgtttatacacatatatgaaattagcagaaactaaatattcataaattttatttagatcaatattcaaacttaaggaaatactttttaaaataagaatgtaatatatgaacacaatgtatagcaaaaaatgtgttccaacactgaaatctcatttgtgaccccgatagaactccacaaaattaaatcttaggaattgaagaacagcttacagctttttttttttcttttcttgctttttttttttttttttaaagagatgggaatcttgttgctacccaggctggagtgcactggctcgatcattgctcgctgcagccttggactccggggggctcaagcaattctcccgccttagcctcctggtagctgagaccacagatgcaagccaccacatctggatgatttttgtatttgttgtagagatgaggtcttgccatgttgccaaggctgatctctaacttctgcccttaaggtatcctcccatcttggcctcccaaagtgctgggattacaggcgtgatccactgtgtctagcaaaaataactttaaaattctgttcagattatgaacagctgaacagtagtcagtagcaactgatggcttttttgttagcttaataaatggataaagaaatagattggtaggtttttcttttagaaaaagtttatatatagtgtgtgttgtgctgtgtgtttaaacacatttaaaaattcatgtatagatttatcagtcagtttggaaagcagatgaattccagaatcctgagaaagttatcgtagggtacccttggttaggtgcacagtgaagggcaaacaatagctggcgtttgacattacccaacattgttggaggcttcttttcctaagtaagtaaataaataaataaataaaaatcaaggtttactcctcacaacatattttagtctgtagtctaggggtgacccttcggtgaggaaactcctccacaacattccattttgttgtttccaggaacacaaaagttaaaactatatagtccatgtagattcaacgtattcctttaaaccagaagacagccagtgctgctgttcaggctctttaaagcttatataggatacaagtaaactcaaggaattcaccgtactgccagtgatagtttcccttaaataaagagatgatacttttactataagatttttgctgctatttatcatggaagacaaaacaccgaagaaattcagtttgcagttggtggtccaaatactaactggaacagatgggccaattaaatctacaagagactgaactatccctcgtgcttaacactcagagtcagcaagaaacatgcgtctctctacaagcaggtactttagcaacgtgtgactcttgagtatgataatctatcgtaatcgctaacggaagcaatcaggtgcacgtaaagaggttggggatcagcttctggtcacaaaaaaccgagcaaggataattccactacaaatgactattagctttagtgaaaaagaatggtaagttacacggtgtagatgaactttacaaggcgagagctccctaaagaacacccagcctggcggagggcagcaggctccacccatgtctctgcagttttggtccggcctcggactaactacaccctagcagcgggaaactttcgcgtgtgcgcagtaggcctgtccagtgccgcgtgggaaaggcgggactttcctatctcttgcgtcacatccactgcgacgcaagacgtcaccggcttgactgggaaggtcaatcgcggctgcaggcaggcgcgcatgcgctttatgcccgctgttgctggcgcgtgcgcgtatcagccttggctggccggtgtatgtccgctggattgtgaggcccgggatctgggctccgccgtggtgcagaaatgctgtgccggctcggcggtcggtggctgcggccgctccctgccctgcagctttgggctagggacctgccgcttgcgccggttcctacgagcg

SEQ ID NO: 32163 - DNA, 2300 bp, Homo sapien
gctcctgattgccttttctctgttcatctagagtaagagtaaatagaagaggcttattcaacaatattctgtatttatagaaagacattttagtaatactctttcctcttttaaaaattacaataactattgttaatgactaatcttaatttatatatacaacttttaaacaggtcaaagaaagtatctgttccatcaactgtgatatccagagtgattggaagaggaggctgtaatatcaatgctattcgggagtttactggtgcacacatagatattgataaacagaaagacaagactggagaccggataatcactataaggcaaaactttgtctcttacattttcttcctttattttattgcactatagcttaatgaaatacagccatatgagttttcagtggaactttgtgttacatagtatactttttaaaatgggaattttattagtgtttgagaagataaattttatagttttcttttttcctaggtaatacacttttgtgaagtgtttcagagacttttataggaatttgtatgcatgtgtagcaaaggtttaaataaataatttctgtacataaactgtttatatgacattcttaaaaatttgttctgagacttttagggagcgcatttctaacattttaagcagtgggtttttgtctttctcaaataacctttgagatttgttattctgagattgtgtctttagaatttgagttcttgggctgggcacggtggctcacgcctgtaatcccagcactttgggaggctgaggcgggcggatcacctgaggtcaggagttcgagaccagcctcaacatggggaaaccccgtctctactaaaaatacaaaattagccgggcatagtggtgcatgcttgtaatctcagctactcgggaggctgaggcaggagaattgcttgaacctgggaggcagaggttgcggtgagccgagatcgagccattggactccagcctgggcaacaagagtgaaactccctcaaaaaaaaaaaaaaaaaaaagaatttgagttcagatttgaatctgaagtgaagatataacttatcttgaataactcgtcgaatatgtctatgcctgaatattcttaaaataaaagtgatgttctaagaaatcataagaatgtaggaagctatatttaattactttaaagtaaattcatgttcctttgaaaaagagttttatattttttacatggcagatataagtttgtatgaggcagatgcccctttgcattatataggagagctaatagttacatcatacctcaaaaataagaaagcaagtagccatctctattttattcatcgtcctctccttctgactggttttcccctgggtatttgggtagtcacagcctatcttatctagaaaagagggaaccagataccctttattggtaattgctcccttgagtttccataaatatcaaatattttcctgaagatccagcactaaggttttatatggctatttttggcactatcaggattcctgcatcattttaagacatcttcccagaggagttacaataattatcctattaatagacaaactactaatgaatttttagtagacggagtcatcccagataccaagatttaaaataaaatactgttttcttactcagttgtattattttccttgtttacttctattatttttagtgttgattaactgtttcaatatttttaggattaaatgtttcaataacattgtggattacataggcttttatgtgcagtggtttttctaactgtagtgtattttacagtaggaaaatggtttcttagtctaaggaaacaatagtgaaatgtatttttgaaaaataagtcatttactattcttctgaaaaataaaagtagtaattcaggacagtttattgctttgtttgtagaatacctcaggaatggtaagaaaattgctgcccagcttttgttatctgtcctttgtttgtatgtgtgtatgtatatacacacaaaactgtgtgtgtgtttgtgtacataaatacatattaaaaacactttacatactcaaaagtagggaaaattctacctaatttttttttctcaatttataggggtggcactgaatcaacaagacaagcaactcaattgattaatgctttgatcaaggatccagacaaagaaattgatgaacttattccaaagaatcgtttgaaaagctcctcagcaaattccaaaatagggtcatcagcacctaccaccactgctgctaacacttccttaatgggaattaaaatgacaactgtagctctg

SEQ ID NO: 32164 - DNA, 2300 bp, Homo sapien
ttgtagccatagctgctttgataatacgtttttctggtgcacgtttcacctttgctttcactcctcctctccctcttatacttacttacctgttccacaaaatcaaagctagacagaacaagcacacttctccctccttcactggggtccacgtggagaaaacacataagcaaggctcaaatgagctgagtcacacatgctcagtttcttctttcaaactcaccaatcagatattactcctcccttgtggtgatccagggagtaaaggtcaccagttactgttttgttcctaatacttcagcaggggtaaaagctcctctactgatcttcagactggagctttctgggagtccagcagaaatttccagggttacgatgcaggcagtttctgtatctttagcttttagatgcattctttcctaaaatcgatttgctggagaaagtatgggtattctacctacaggttttccttcactgttgcccttttcaggaacaagacttatctctcacctagcctaaggtaagtatgttgcattaccgcagggtgtaaaaacctggtggtgggccaaacttttcaagaacctagcagagagctggtttgagtgtcatgggttatcagaacttattaacgttagtgtcactaaagttggtatacaacccccagctgctaaatttggcttaaaaaaaaaaaaaaccggagagggttaatttgaaaggcaggacagagagtatctagcaaaagcacagcacttaaaagatgaagtcagacttttttgaatgaaaactaaatattgtttggcttatgaatttatgaggactggttttacatgttgtaggctccatgccttaactgacattgttttgacacatatttaaaatacacataaaataattcagaatgctagattatgggtggagaatagtttttaaaaaacatcttttagatgacatgcagacagagtttgaagatgattttcatacctttatgagccaagaaagaaaatttaacagttaaaatagtttattaagatatatttttggacttttaaacctacagttagttttttgactatgaaagtaataatgtactcattttaacaaatagaaacactgtatagttatataaagtaaaattgaaagtcaccatcattctgctatccctcctcctgttccaccctccagaggtagtctctgttacccttttatttataacttttatggtttttttttctgtatttatacaaatcgatgcacaaagagggttctcttctctcataaaagtgattattagtcttcagtgtgcctttttttctcctaacaaatgtaaactgggagcattttcccaagtacatatttataatacttacggtgcctatctagtattctgtgaatatatactgttaatttattccttcccattgacagacttaccttgtttccatgtattgccattataatcaatttgcaaagaaaattgctgaacccttgttttttcactagagatagacattttatataataagttgttgggataagcagtttgtaatttttgttaggaagctttcaaattactttttctaaaatgtaaatattcatgcccgcagcagtacaggagagaattcagtttctcaaacttgtgctgatatctgatacctttttaaatttcgccaaattaatgatcaaaaaatggtattttgtcggttcaacttacatgtccttaatgattaaaagctatgtatctgtttattatttacccattttaaaattagtcttatattgttaatttgatcttgatattgtaaaaatattgtctctttagagtggtttgaatatgatcttgataaaacaatgaattgaactagatgactttgaattttatgatatcatggtttccttatgattaaatgattatgtgacaacttcttctccagggtaaatttcaacgttatatttctgctttattgatctttaacagttaagggaagaaagtcggaggctggctttggctgcgaaaagagaaaaaagaaaagagaagagaaggaagaaaaaggaagaacaaagaaggaaactagaagaaattgaagccaaaaataaagagaactttgaactccaagctgctcaagaaaaagaaaagcttaaagttgaaggtattttctcttaacaaccatcccatttgttttatattctagttaaaattatatttacttgattatcagtcactcttgaaaatatgctttcaagttattaaccccttaacataggccaggcacagtggctcacgcccgtaatcccagcatttt

SEQ ID NO: 32165 - DNA, 2300 bp, Homo sapien
actaataaataaacaattttaatagatataataattcctatacaaaagaatgggaaatctaataaaattatgtaagtgcagtaagggtagggcttggtcatccttcattttgtaaattaaaaagaactgaaatctattaacagtgataatataggcatttttttccataatttttgttcccttatatttggaatagatattatatgaatggatagttagatacacttattactagaatactccacacaagagacaaggagcctggcctgtccctactgttttgtttcttctacttgtgtcacttttttcttctataattcatagtaggggcaatagataggttaaaagtattataagccaaatattaagatagtgaaaaatgaaccacttaatttgataaattatttctactattccagaaaaagtaaaaatccccataaatcccggaaagcaaaattttgcctttcaatcatattgcctttcaatcattatttagcttgaaaaaatacttgctttatataagaacagattttttcaatattgagtcaagaagatattagttgattttctttatttaaaagtagtattaaagccaatagggcactgtaatttttatgaattatgtatttttgttaaaatataacagattaggttataacaattgttgaagtatgttagggtaacaattttgcctataaacactttgttactttaatttggtgtcaatagaagaggtaagtattttgaagtgattaataaaatgttggaaagtcattttactataaaaatcatacatttttgttgtatattggatgttttgggagcagaagagttctctgaaagaattgagaaatataatggcattgagaaaacttgagaaatttgattagagttttctactatactgtttataaaatagcctaacgctatattttttcttgtttttataaccttgtcactcgctctgaaagcaaaaagtgatggaaagaatgtgatatctaaaattggacatagctttgctgagatgcaagataaaccactattcattaacatttattatttgccagttagtattttaggatatattattaatagtaagagcaggggtaagagctatgatcttgagccagtcttgacttctctatatcttatttataaaatgagaatgaatattgtgtcaaaggattgtttaggcattaaatggcatagtggacaatgatctgtgaatggcccatcagtacttaaataaatgctaaatatttttaggtttcaggaaatgcaattaagatccagtgggatacaactacacatccactagaatggctaaaattgacgactggcaataacagatgttgccaagactcatgctactagaactcatgcattattgaagggagtgtacatagtacaaccactttaagaatagcctggcaatttcttacaaaaccatacacccagaaattctgccagtaggtgggacctaaaatctaggtagtgaatgtatataaggttttttaatgttatcttagaaaattttcataatcttgtgaaaatataggaccttttataccatgcttttaaaatacttactgattaaaaggtttaaaaatatgttaaatacattcacatgtataatacgaaaaaatcttgtcccatattactctattttaccgctttgtggtgaaataacaaatattaatttccaaagcatgtcacaaaattttcagtccagacctttcatgaacacattgtagcattttagtggatttctacatgggttttacttgagaaggtatctctttgttggcttctaagacctcctgctatcattagaggctgattttatgcagagcatgaaggaagaactttccccttcttttattgtacagtataccagaaaaagaaatttaaaaatacacactttggtaatttgtctctccataagaaaacatatttttttctattttattttcaggtggtggagctattgttagctcgaggggcaaataaagagcacaggaatgtttctgattacacacctctaagtctggctgcttctggtggctatgtgaacatcatcaaaatattactaaatgcaggagctgagattaactctaggcaagttgtattccctttctgtaagccccttatttagtaagactgttatagatatttgtagaacacctattttttagtgccaaatttagtaaatccctttattacaaatttggcattcaaagtgttagagatttttgagatgaactttatttaagtaattaaaacttgatatagagtttgaa

SEQ ID NO: 32166 - DNA, 2300 bp, Homo sapien
ccctacttaaagtatatctgaatttggatttcattggaaatactcaatttgtatctagatttaattaaatgtgcagtcgaaaagtagattcatttactcaaattgtttgagacatcctaaattttccagtaaccaaattgaatatcagttattacatttaaattaaagttaaatacaatttaaaattcagttcctctgttacactaaccatatttcaaatgctaatagtcacatgttgcttgtagagtactaaaaggtatctagctgggcgtggtggcagacgcctgtaaacccagctactcaggaagctgaggcagggagcgttgcgtgaacccaggaggcagagattgcagacagccaagatcgcgccactgcactccagcctgggtgacagcgagactccatctcaaaaataaaaaataaaataaataataaaagtatgagaaattagatagtttgctaggttagcattgaaactataacagagtatgaacactggtaaatctaatatgttggtcattatcattagcagaaggcagaagcaaaccatatgtagatagtgtcatgtctcattataatagtctttgtttttcaaaatacacagtatattttggatatttggttcctttaagtattttggggctttgttctcaaatacagctaagttacttggaaacaattttttttttttaaatttcaaggcctacttctcagtttgttaggtgggtccacaactgctaatttggccctactactgaggattctacttgacatcctgtgtgttttgaggtctttctactctggctggtgggaaccaaactattcctggctccgtgtgagccctgggtattattcagcctgactctctctggtggtcctttcctggcctgggataatttcctcatgcacatggactgatcaaaactcagctgaagatttgaggggaatcctctgcacatctccagagtaccctttctgcagtactctcctcttcaataatctgctccatgaattctagccaccttgatctctccaaattctgtcttctcaagttggggagactgccaggttgtttggatacttgctccttgcactatagcctggaaactctccaggcagtaagttgggctaatcatttctgtcttcagagatcactcttctgcactgcctgtctaaacaccatcgtttcaaagaggttttttttcttttttagttatttgaaataggaaaataaatctgatctatgtttctccattaatggctgaaagcaaaagttaatccacagtatttctttcaatcacgtgattgaaagtcatactttatttttcttgatgtttgtagcctttttaaaaaactcgcaagttggctgctaatatggaaacaagtaaaccttgcttttcttttcttttctttttttttttttttttgagacggagtctcgctttgtcacccaggctggagtgcagtggcgtgatcttggttcactgtaacctctgcctcccaggttcaagcgattcttctgcctcagcctccgaagaagctgggactacaggcacgcaccaccacacccggctaatttttatattttcagtcaagatggggtttcaccatgttggccaggatggtctcaatctcttgacctcgtgatctgcccacctcggcctctcaaagtgctgggattacaggcgtgagccaccacgcccgtccataaaccttgcttttcaaatgcttgatattgtagagtggtacatatgtatttgtgtgtatttgatatgtttgcatattatgtatttgatattaacatcttaagttatttaataaactaaccaaaaaataatttcttatagactgagagtaatcatgacacggcactaacacttgcctgtgctggtggccacgaggaactggtacaaacactgctagagagaggagctagtatagagcaccgagacaagaaaggtagggcctacttttgttttattttttggaatactggtcaaaaaatttatttaggaacattattttttagtcctattttgaaggtcagatattttgttcttttgccttagcatgtagtgagaagatcattatttttctccaggttttactccactcatcttggctgccacagctggtcatgttggtgttgtggaaatattgctggacaatggtgcagacattgaagcccagtctgaaagaaccaaggacacaccactctccttggcttgttctgggggaagacaggaggtaatgtttccccttagtgtaattgttttcctttctctgtttagcaaatgtgt

SEQ ID NO: 32167 - DNA, 2300 bp, Homo sapien
cttgccaaaccagaatcagctccctgtttaacctgtctcaacaccttgcctttgctatcatttcaagttcccttttttctatgctgacattaaaacttttctgatgtgtggttctccctctctaaatctaacactaaaatgaagccccacatgtaaagatttttaccagagttccttcaggtacctacatattttacatttgtttcttttagttgtagagaatggatgtgtgattgacagtcacctaattttagtaaaccaattttataggtaccccgaaggaaatgatgagataattgatttttcctgtctccttttagatgaggtgataagaacaaccaatttgacttaaaaaaaaaaaaaaaaaaaactctgtaattttggtaggttctttaaaagaaaatattccagttgaaatgtaaattataatttagtcatttaacaataaaacttagattttttttaacctgtttagtattatgaaataaaatttagtgattcggacagactggtgttcatcctgtttaagctactttttgtatttagcagttttattgtgaaaatccaatcaaaggagatatggaatcaatttaaagagctctagattttatatgattttgaaatgtatatcaacaatatgtacatttaaattatcttgatcttttcgtaacatacaaaactatcaatatggagtaacaatatccagatcgctagattatcaatttaatatattagtatatgcccttttctattggtctggatccctaaggattcaaacagtgttttgttttgttttgttttgttttctccttcgtttttcctttggcttttaagtggacttaaaaatgtataattatagaatgtgtgttgctataatgtatagtgtatgtttgtgcctgaactaaggatttcatgtaaaatagatttcttaattcataattatgtttataattgttataataagatcaatttcagttttattcttgacaggatcataatctcttttgcctggtttcagatccagttgtgaatcatgattgttttctgtctgatgtagttgataactactttggtaatacacatccacagtactgttgaccagtcaaagataaatgcccatactttaatactatagcatttttaatggggttgggggagatgatgttcacctatcaactccagaaataaggcaatgagagaataaagtaccctcagctgaatctacagtatatcctatgccagcatatttggagtcctcccacctcaagtactgatcagaatagccttttcttaagttgcatattttggtgaaaataatatcacagcaacatcatacttagaataatagtaatccatatttgaagaatgtttgtgtgcatacatttatttctaccctaatcttttaattttgtccttaagtcagtgtgattgctggattcattggtgagcattttagctccctcagaataattcttcacatgagcaactacacttctgtgtgaggataaatttttatatttgaatatcctgtcattccagagggctacaatgcagaatattactatatcccagtctgcagttagtaaaacagtatggcggtgttttaaatgattgcatagtgagatttctccctccccgacagtgatattaattttactagttctagaatataaggtgtgaaattggcaagtaaaaaccacatattcccccttctgatcttgactattttacctttgatcccctttctaattaggatataatggacaagtttccatttgcatttatatttaatacataaacatttttgttttcagggttattttgaattaaggttttacgactgcttataacaggggaatttgtttttcagttggattattatttagaaaatgagttactcagtatacattacaattttacactgtcatcagtgaataataaccaggaaaattagttattagtgctatagtagtcttcctgtagacatattgttttaagaagtctttaaatatttttgagtgaatatgtcttagtattacttaacaatgtttcatccttattaagtgcagttattttgttcaacagcagtcagtggaagagcatctgcaatgtcaaacactcctacccacagtattgctgcatccatttcccaacctcagactccaactccaagtcctatcatctctccttcagccatgcttcctatctaccctgccattgatattgatgcacaggtaagtcccaaacttaagagagatggttttttcattggaattatgccataattaaaaacattaact

SEQ ID NO: 32168 - DNA, 2300 bp, Homo sapien
tccaaaaagggttccatttttttctaactaatcaaaagtttgcttatccttaaagattcttatgaaaattcttcttttcctctctaaactttatccttttaacatttaagtttgtaccatatagtgttgatgtctcactatagtctcttatttcacatacttactgtttttttttctaatggttaataagcttcttgattgaaggtatcatgtttctacttattttatattttcaatctctatttccctcttctatgttaacagaatataggcagtgcataataaatactgatttactcaactgttaaatgtagctctattcctttttgagtggagatagataaacttcattgtatagtaattgagaagtcttcaaatttttcaagatttttttaatggtgctgatttaattttttaaattgtattatcattaggatggccatgttgaagtagctaggttacttcttgacagcggtgcccaagtgaacatgcctgctgattcatttgagtcaccattaactttggctgcatgtggtgggcatgtggaacttgcggctttacttattgaaagaggagctagcctggaagaggtcaatgatgaaggttatacaccattgatggaagcagctcgagaaggacatgaagaaatggtggcattacttcttggtcaaggtaaccgtatctatcaagacactaaagtataaatgtgtaaaacctaagagtataattttataaaattggattttagtatttcacctttctagtagagttgcaatgagctattacacaaaccagtgataaagtatttactgtgaaaatggctcccatactgtgttaaaacaaaatcaaagaaacttctttcatatagagctttcagagacatcatgtgctatatgtgaacgaaaaacagaactggtgttggcaaggcttgtgagttaaataggggaatataagagccaacatttctaaaggtaatagatcaagagaatgtattcctttgggggcggaatacctactaataagtatttaatagatctaatgttttaaaaaacagtatgggaaaccacgcagtaaagactaacttgctgagagtgcaagaatgcgcacatattagaagctgccaaggggctcagtacataaacttcttttttgggaaaagtgaaacaattacttcaatatgttaagatatcttcagtttagaagtaatctcccatctctgtatttgtagtgtgattttatttttctttcagtagtaaagtttttgtctggacaaatttaagaggaatgacacttttaaaaaaaacttttgtttttatttagaagtaatgttgactatgatttttaaagcgtaggttttggagcagacttcttaggttgaatcataactccactgcttgccaattttgtaactttaggcaagtttctaaccttctgtgcctcagttttctcgtgtagggttgttgtgatagttaatacgtgtgtataaagctaatagaacagtgcttgtcatgtagtgcctgttaagtgctagctatagtgatggtggtagtattgatgacaataatgttgtgaccttgtataagttaaataacctcagtttccttagctgtaaaatggaactaataataataataataatacctaaataagttgtaaaatgctttgatattgcctgggaaatagagcttattgaatgttaagatttttattatcatcatcatcatcattatcaccagtatctttatcatttttgaatcactataatgagaggatgtagcttatttttttgagttcttttatcacccgacttgtaccttctggctgagtaaatattactccagctgtggtacatcaaatctgggtgtgattttaatagttttatttatttttagttttaactgccttaggagttaggagagaggcactttcttatttattatagtaatataaatgttcattttaaagattcagtttattaagaaacaatcatgtttttcatatctctggaataagttaatgactttctttaaataattagaatctttattttaggagcaaatatcaatgcacagacagaagaaactcaagaaactgccttgactctggcttgctgtggaggctttctggaagtggcagactttctaattaaggcaggagccgatatagaactagggtgttctacccctttaatggaagctgctcaagagggtcatttggagttagttaaatacttattagctgcaggtaggcatttttgcatttgggagaagttttttacatgatttgtttaagtaaaaatg

SEQ ID NO: 32169 - DNA, 2300 bp, Homo sapien
atcttttttaaaatgcaggttttggatcagtacatcgtagggcctgagattctgcatttctgacaagctcccaagcgatagcagtgcttctattcagtggaccacatgttggatagcagggttctgtaatatccatcataacattagaggtaaaggtttttaatcctagctgtttatcagaattgccttagagcctttaaaatatgtaggtgccaggccctgctttctacttactgaattggatccccagatgtagaaaacctcagcatctatatatttgaaaaccactacagggggctggatcacacgtgtaaacctagccctttgggaggccaaggcatgtggatcacttaaactaggagttcaagaccagcttgggcaacatagtgagaccctgtctctaacaaaaaaaaaaaaaaaagcaattagccaggcatggtgacatgcgcctgtggtcgcaggtgcttaagaggccaaagtgggggatcacttgagcccgggaggtcgaggctgcagtgaaccatgatcatgccactgtacttcagcttgggcaaccaggtgagatcctatcttaaaacaaaaacaaaaacaaaaacaaaacaaaaaagcaccacaagtgatgctgatgggcagcttggattaagcaccactgaattaaaataataaaggttaggggtaagaatgctgcatgctttatagggatatctgaaagagcaacagttaggtttcatatagatggttactaaccatctctgcttttgaattttttttttaattttgcagttctgaatggttttcagattagtactttcagatgattttaagtatatgtgataagttgtagacataactcatttatagcttatcttttatatatagtctagaatgcctttttaggccatattttgttcacagatgatagcccagtaaacattcttaagcaaaaatagacattggcccgatgaagtagtttacacctgtaattgggagcactttgggaggctgaagtgggaggatcacttgagactaggagatctaaactaccctacacaacataaatgagactctacctctacaagaaagtttaaaaattagctgggtgtcctgctgcggtggctcacacctataatcccagtactttggcatgctgaggccggaggattccttatgcccaggagttcgagaccagcctgggcaatgtagtgggaccctgattcctccaaaaagtaaaataattagccaagcatggtagtgcacacctgtagtcccagctacttgggagcctgaggcaggaagattttgaacccaggacgctgaggctgcagtaaactgtaatcgtggcatgcacccagcctgggtaacagagcaagaccctgtctaaaaaaaaaaaaaaagagagagagaaaaatcagcctagtgtggtggtgtgagcctataattccagctactgggaggctgagttgggcggatcacttgagcccaagagttcatgactgcagtgagctatgatcatgccaccgtactccagcttgggtgacagaataagaccctgtctcgaaaagaaatatatataaattaaaaaaaataaaatgtagacatttcccaaatcatagagatggtgctagcttctggcactactggcgtcaatgagttaaaaataattttatcaggactctgtccccttctctttctgtgtctctgttctcctctatgttgactttattttgggcagtctttttctgtatgtggtgacaaaagtggctaaatagcttatgactcacatcttaccaatttagcaacctttgaatatacgttctttcagagatatgacagagtctaattgtcccatcataggccaaagacccgtttctggcaccagagggtcacaggatcaagtacctatgaaccacatggaatgaataagattattagaaaactggagaagagtgatttctcaaaagatgctgggcagccaatatatatgtctactctaccatttggaggttatttgttaacatacacagtatagctttaagtaacttgaattttgctttgtttctccttttgggtgtgtccatattggtgtgaaaataatataataggaataggaaaattgtccacggctgatggtaaagcctttgcagatcctgaagtacttcggaggttgacatcgtctgttagttgtgcgttggatgaagctgctgctgcacttacccgtatgagagctgaaagcacagcaaatgcagggcagtcggacaagtaagtacatttttgctgccatcagtatgaaatcattttct

SEQ ID NO: 32170 - DNA, 2300 bp, Homo sapien
gaaagaattgacctgggaggcaggaaataacaaaagccagtttgtagtttctgtttaagccaggtctcaacaatgtaaattactttgagcagcctttaaatgccaggcatacccatacctaaatgtaaacactaggtatggtatgaggtaaaacatagtgtcatttgtttgccattaattccacataccctttgcaatcagttctggatttgcatctggatttgactctgcatataactgtgtgccctgtctgatacttggttcccttattcgtaaaatgagattatcacagggaagaagtatagttgatgattctggatatggactccagtctggtgcaaactgcctgaattcagatctcaactcttcaacttaattagcttagcttgaaataattgggcaagttgcttaacctctttttgtcccatttccacatacgtaaaatggggataataataatatgttttaggattactgtgaaaattaaatgagttaatatataaaaagcatttaaaatggcatatagtaagcaaaatgtagtttaaaaatatgacatagctgggttgttatgaggataaataatatgtttatttttttaaaaaaagaaatcatatattgcttgacacagtatgggtatttcttaaataccagaaaccgtgtagtaggtactttatatcatttaatcttcatataaactgttaagaaaccataatctgtctagttgactgcacctagagcagtttctgatatttcaagttgaatgaatattatcccatttcatgattaataaattgaggcccaagagtactccaaaatcaccactaaaacatgacatcactttgaggagatagtaccagcaatgtcatgcacatcatcacatcacttttctcagtttagagcataaaacattgttcctttttgtttttggagacagtctcgctctgttgcccaggctagggtgccagtggcacaatggcaacatccacctcccgggttcacgtgattctcatgcagccacctgagtagctgggattacaggcatgcactaccacgcccagctaatttttgtatttttagtagagacggggtttcaccatgttggccaggctggtcttgatcgaactcctggcctcaaatgatctgctcgcctcagcctccccaagtgctgggattacaggtgtgagccactgcgctcggcccattgttcctttttcagtgcattttttcatattcaaagttgtataaggaagaaatttgacaatctaacaagttttactaaatggaagatcaattacaggaatgaatataatatatattggctccactgtcactcactcactttatttgctgtttgatgatccagatttggtgtctctaaatttcatttatctaggatattttagtctcttagagtatttattgtaagagaaaaaggccatttctttggttagtaaatgaagttaaaggcactactagaaaatgcatatatcaaatattatagcttgcttcagtaactgtaaattagttgaatgttaacctggttctcataagtatttacaagcagattagtttataaaaaccaatttactattaaaaaatctacattaggataattatttttgaaaccctgaagtcaactgtaatatgtatgttatataatacatttgcctgatgtagcaaatttctaacttggcattatcatgcctccttctttgcgtctttaatacaaccattaatctcactacaaggctttactaaggataaattgctgcgtaacccacttcaacctcttttgttcaaccaggaagccagacgtgttaaatagctttttaaaaaatatgttatttcttttttgaaattttaggattttaaaaattgaagtggtaaaataagagactttattttgtctgttaaaattacttgacagaagtttgctttggaatagagcttctgtatctttaaaaaatacacagtgagtcaccccctgctcttttggtagatgcctggctagtgaacagctaagctgctttaggcatgtaatagaacattccatttcctgttcccttgctgacacagaggagtgttcctgctggcaatgatctaatcatagtgcagtaagaaacatggcagtttgataaaacatggtggagacagcggctgaaatggaagcatatgttctagaagacattcttgaggtagggctaggtttgtaagtgaaatgaaagttgaaatctgaacaaagaaatcttatctgccggaattattttacagatgaatagattagaggagagagcaaagag

SEQ ID NO: 32171 - DNA, 2300 bp, Homo sapien
ccttcataatttttccatacttgaccacagatgaaagggaatttttacttcacattggtatgcgaagtagtgcctgctggtaccacttatatttttgttaggaccagtaggaggcaccaacatccatggtgtaacctacaccaaacctaacttttttcagctttcatcttttcaaaaaaaaaaaaaagtaagtcattagggaattgaaggtggtgggtaaatacgaatacccttctagtcccttgaatcttacctatctggtacagttatgtccatccacttcttacccagaagcaaaataccctttctgacttaacagtgcttcacttcttaacatttttttgtctttagaaattattattattcattcctgaagggatgtagagttgtgggacaatataggtatcatttttataatgatttataatttggggtttcagttattgaaaagggaaatgttaactgttattttccccaagcatgctatgaaacttcaaataatatagctctaattattgaaagcataacttagactgccttctgtcctgtgaaactcataaacattacatgatcttttaaaggagtcaactttttgtgtgtgtgtagagatggcgtctcactttgttgcccaggctggtcttgaactcctggcttcaagtgatcctcctgccgcaggctcccaaaatgctgtgggattataggcgtgagctactgcatccagcctggggttagtttttaagtttacttctgagtgagactagagataaaagagagtggggagaaggaaatgtaaagattttacatttgaaacatcagagtgctaaaaatagaaaaattagtcgggcgtagtggctcccgccagtaagtcccagctacttgggaggctgaggcaggagaattgctttaacctgggaggcagaggttgcagtgagcagagatcgcgcccttgcactccagtctgggcgacagagtgagactctgtctcaagcaacaacaacaacaacaacaacaacaacaacaaaaaccgttacagtacttgaggaattcctattggagccattattagtgtctttaaaaacaactctttttttctgttttttttttttttttttttttttttgagacaaggtcatctatgctggagtgcagtggcgtgctctcggctcactgcaacctccacctcccgggttcaagcaattctcatctcaccttcctgagtatctggagttgcagcgtgagccactgcgcctggctaattgttttgtatttttattagagttagggtttcaccatgtttgcccggctggtcgcaaactcccggctccaagtgatccgcccgccttggcccccaaagtgctgggcttgcagatgtgagctactgtgcgcagcctttataaacaattttgatatatggtgaaatttctcaaagcttgctgatcatagtgaattatgctgataagaatgggaaacaagattattgggaataaattgaaaaatattaaataggtttttatgcgtcaagggtaaaaaaaatgtgttttgagtaaatgatctgaaatacagcatgcttttttggtaaaagcttagtataatgtagggtgaagttaaggcgttggcgataaccagaatcataattctcattttaaataatgctatgctacatctgcacaaaatagattatgtatatttttggctgctgtaccatgaaaatgatgactaaaacgaggtctagagagggatagtttaaaaatgatggtagggctagagatggaatccatgattgaggaggactgtagattttacttaactatattctttctttttaatttatttttattttattttattttttttgagacgaagtctcgctctgtctcccaggctggagtgcagtggcgccatgccgtctcactgcaacctccgcattccagattcaagtgattcttctgcctcagcctcccaggtagctggggctacaggcgccggcgccaccacgcccggctaatttttgtatttttagtagagacgaagtttcaccatgttagtcaggctggtctcgaactcctgaccttggatccgcccccctcggccttccaaagtgctgggattataggcgtgagccacagcacccggccgattttacttaagtatattcttattgcttattacttcatactcaaactgacttataaggtagagaaaatcataatgtgtaccagatagtgctatttcagtttagaaaataaattcattttttatttcttgagattatttgaaagtacattgtagaaatggcacat

SEQ ID NO: 32172 - DNA, 2300 bp, Homo sapien
aagtcaatttcagaaaacaaaaaagacactgattgtagacactttttttttgagatggagtctcgctctgtcgcccaagctagagtgcagtagcaggatctcagctcactgcaaactccgcctcgcaggttcaagcgattctcctgcttcagcctcctgagtatagaatactttttaaagaaagaaagtttgcttgtgaaggaaataattgaaagctacagaagaattagctaaggaaccagaatttgtagaaggttgacaacagaaaagataataaatgcatgagaaagaggggtattggaactagaatatgtatgaagagtttatctcatatatgaacagggagtctctcattcgttgatactggagaaaaggcaatctcaggaaatttctagcacttggaaaattgtgaagtctaagttaaaagtcatataataaaatgggctgggatttaaagattgcgaaaagtattcaagtggaaagggagaaaaagatgctgaagaatatacaaagtaggagggagggatgcagctgaaattataaaatctaaatcagtagtggtgagatacacaatgcagtgctctgttctacactggaactcagcaacgactgtaggagaggaataggcagatggttaccactccgtatatatatttactatagcacttattacactgtaaagcccctggaaacaagagactttgattccacaaattatgcgcacagtaggcacatgatgaatttttgtttgaatgaattgatttagtcattgccaattctgccttggtactctgtagagtactggcaactgcccacatttcatatggtatgccaatgctaaaaagaaaaaaaatgctaaaaaaaaaaaaaatccaggcatattcagctaaactaagcagtcttaaaatggcaactatgtcagctgagacatacttttaatcttgtgccagtacatctgtctttgatgtttgcttcattttccgtatgccactatactcctactagaccagaaagggataattctgagttcaatgggctccactatcatttcaaaagtcctgaaacttcttcagacacctaaaaatgaacccacaactcccataacagcattccttccgagagaagtatacagacaacaatcactatttatgcttgcttccaagctgaatcgaagagggccggaagagctaaatcagggtcattcagtgaatcgtctacaaagtctggcacagaccacgcatccttcccgtgtcttcctccccttggaaacttgaggtgtaagtaatgatcttagacatctcctaatcgactgccttcatattacacacgtgtaaactcaggtagaggatgtctatgagccgagcttaaactcaggtaaagaaggctcttttcccaacacgacgccatctctcatgatccaaagctctatctctcgatttggcggtggaaaaaaatgaccaggaataaaactacgtacagcagtccagaacgaggccccacctcccggatctggcggaccggcctcccgtcagcaaagtgtctggaccgcgcttccgcacctcacactgcccggggccggctcctctccagcctccccgtactccccacacgccgcagcactgcgcgcccgcggggccccagacccggcccttgaaatctcactttcgcctttcggccacccgcgcgccacggctcaggcgacggctgatggcgtcactgcacttccgcctgcggctgcgttctaatcacaagccaggaaggaagaagggagggctgcagggctgtgtgtgcgggaaatagcgaggaaagagaagaaatccgggagctcgcgggcgctctggttgcaatcgcgcccccctcatctgtccccgccgttccccttcggaagctgccccaggcacacttccccgcttctttccagtctcctctcctctggttctcccgacacccggtctccctgttacgcctcaccctccttcccttgctccctccctctccctccctccctccctcccatcgtcaggctccccgcccttagtatcgcgagacgaggtgagagctggcggagcggcggcggcggcggcggcagtagaggtgaccgaggcggtggcggcggaggcggcaccgattgctgtgtcggccccagtgcggccgaagtcgcggtagagcgtagccccacgcccctcccccgtccgcgccctccctctttccctggggatggagaaggcgacggttccggtggcggcggcgacggctgcagaaggagaagggagccccccggcggtggcggctgtggcggg

SEQ ID NO: 32173 - DNA, 2300 bp, Homo sapien
atagtgccactgcactccagtctgggcgaaagagcgagactccatctcaaaaaaaaaaaaaaaaaaagaaaagattcttttaggtttcatcaattttgttttaaagctagggctcttcattagatataggaaaatcaattcaaagtttctattcagtcatgatgaatttgagatttttttaggtttctttgtatttaacaatatattacattataatgttgtggtgaaaactaaatggactaatattattcttttcatttgttaaatgaaaaagtatgcacaaagtatatgtgagagtgacaaaggcctgaatttgtcaattagtaacaattgtattcaacagtaaggattttatgtttgggtaggcctttcccagggacttctacaaggaaaaagctagagttggttactgacttctaataaataatgcctacaatttctaggaagttaaaagttgacataatttatccaagaaagaattattttcttaacttagaatagtttcttttttcttttcagatgtaggtttttctggctttagaaaaaatgcttgtttttcttcaatggaaaataggcacacttgttttatgtctgttcatctgtagtcagaaagacaagtctggtatttcctttcaggactcccttgagtcattaaaaaaaatcttcctatctatctatgtatctatcatccatctagctttgattttttcctcttctgtgctttattagttaattagtacccatttctgaagaagaaataacataagattatagaaaataatttctttcattgtaagactgaatagaaaaaattttctttcattataagactgagtagaaaaaataatactttgttagtctctgtgcctctatgtgccatgaggaaatttgactactggttttgactgactgagttatttaattaagtaaaataactggcttagtactaattattgttctgtagtatcagagaaagttgttcttcctactggttgagctcagtagttcttcatattctgagcaaaagggcagaggtaggatagcttttctgaggtagagataagaaccttgggtagggaaggaagatttatgaaatatttaaaaaattattcttccttcgctttgtttttagacataatgttaaatttattttgaaatttaaagcaacataaaagaacatgtgatttttctacttattgaaagagagaaaggaaaaaaatatgaaacagggatggaaagaatcctatgcctggtgaaggtcaagggttctcataacctacagagaatttggggtcagcctgtcctattgtatattatggcaaagataatcatcatctcatttgggtccattttcctctccatctctgcttaactgaagatcccatgagatatactcacactgaatctaaatagcctatctcagggcttgaatcacatgtgggccacagcaggaatgggaacatggaatttctaagtcctatcttacttgttattgttgctatgtctttttcttagtttgcatctgaggcaacatcagctttttcagacagaatggctttggaatagtaaaaaagacacagaagccctaaaatatgtatgtatgtatatgtgtgtgtgcatgcgtgagtacttgtgtgtaaatttttcattatctataggtaaaagcacacttggaattagcaatagatgcaatttgggacttaactctttcagtatgtcttatttctaagcaaagtatttagtttggttagtaattactaaacactgagaactaaattgcaaacaccaagaactaaaatgttcaagtgggaaattacagttaaataccatggtaatgaataaaaggtacaaatcgtttaaactcttatgtaaaatttgataagatgttttacacaactttaatacattgacaaggtcttgtggagaaaacagttccagatggtaaatatacacaagggatttagtcaaacaattttttggcaagaatattatgaattttgtaatcggttggcagccaatgaaatacaaagatgagtctagttaataatctacaattattggttaaagaagtatattagtgctaatttccctccgtttgtcctagcttttctcttctgtcaaccccacacgcctttggcacaatgaagtgggtaacctttatttcccttctttttctctttagctcggcttattccaggggtgtgtttcgtcgagatgcacgtaagaaatccatttttctattgttcaacttttattctattttcccagtaaaataaagttttagtaaactctgcatcttt

SEQ ID NO: 32174 - DNA, 2300 bp, Homo sapien
gcatttttgttgttggattatgataatgcactaaataatatttcctaaaattatgtaccctacaagatttcactcatacagagaagaaagagaatattttaagaacatatctctgcccatctatttatcagaatccttttgagatgtagtttaaatcaaacaaaatgttaataaaaataacaagtatcattcatcaaagacttcatatgtgccaagcagtgtgtgctttgtgtagattatgtcatatagttctcataatccaccttccgagacagatactatttattttttgagacagagttttactcttgttgcccaggctggagtgcaatggtgccatctcggctcaccacaacctccgcctcccaggttcaagcgattctcctgcctcagcctcctgggattacaggcatgcaccaccatgcctggctaattttgtatttttagtagagatggggtttcaccatgttggtcagactggtctcaaactcctgacctctggtgatatgcctgcctcagcctcctaaagtgctgggattacaggcatgagccactgtgcccagccgacagatactattattatttccattctaccgagaaggagactaaggctctgatcatttaaataagttgcctaaggtgatgcagtgatataagtagcagagctaggaattgagccttggtaactttaactctggaccccaagtccttagctactaagctttactgcatggggtttagtcaaattaagacttttggaatatgagttacttttgagattagctttgtgatattttttgtgctcatttgtccaacaaagtctattttattttcatcttaattaggtttttgtatgaatatgcaagaaggcatcctgattactctgtcgtgctgctgctgagacttgccaagacatatgaaaccactctagagaagtgctgtgccgctgcagatcctcatgaatgctatgccaaagtggtaggtttattgttggaaaaaaatgtagttctttgactgatgattccaataatgagaaagaaaaataatgcaagaatgtaaaatgatatacagtgcaatttagatcttttcttgagatggtttcaattctggaatcttaaacatgaaagaaaaagtagccttagaatgattaacaaaatttagactagttagaatagaaagatctgaatagagcaatctctaaaaaattttgatctttttttctctttttcacaatcctgagaacaaaaaaaaattaaatttaaatgttaattagaagatatttaacttagatgtaaagtgagttaacctgattccaggattaatcaagtactagaattagtatcttatggcaaattatagaacctatccctttagaatattttcaaatctttttgaggatgtttaggaatagttttacaagaaattaagttaggagaggaaatctgttctggaggatttttagggttcccactagcatatgtaatggtttctgaactattcagaatcagagaaaactcatttttcctgctttcaagaagctactgtatgccaggcaccatgcacaaacaatgaccaacgtaaaatctctcattttggagagcctggaatctaactggaaaggtgaactaataataataatatgtacaatcatagccatcatttattaaacttttattatatgcaaggcactgtttaatttcattagcttacctggtttacagagcagctctatgagatgagtgccatctttgcccctattttagggataaggattctgaaatgtggagatggtaagtaaaattgcacaactgaagaatgagttacatgacttggctcaaatactggtcattgaactccagagcctgaatattcttaaccacttacatgatgcaagctcaccaaataaatagttcgaatgtattgtgacagagcggcattgatattcatctattcatgtggctttgagtaggaagaagaaaggatatcattctgaccagaggggtgaaaaacaacctgcatctgatcctgaggcataatactattaacacaattcttttatgtttcagttcgatgaatttaaacctcttgtggaagagcctcagaatttaatcaaacaaaattgtgagctttttgagcagcttggagagtacaaattccagaatgcgtaagtaatttttattgactgattttttttatcaatttgtaattatttaagacttaatatatgagccacctagcatagaacttttaagaatgaaaatacattgcatatttctaatcactctttgtcaagaaagata

SEQ ID NO: 32175 - DNA, 2300 bp, Homo sapien
cacttatcatcatctctatctcctttgttcctcaaaatttcttatagtgtctgaatagtaaagaaaagccatgttttacattttggcatataataagtatttaataaatttaacacctacaggacaaatggccctgaaaatgctattgagtgatggtataacattgcatcatatgggtgttttgtaatattactagctattttattttttaaaattttttaatttccataggttattggggaagaggtcgtgtttagttacatgagtaaattctttagtggtgatctgtgagattttggtgcacccatcacccataacccatcacccgagcagtatacactgtaccatgtttgtagtcttttatgagtccccaaagtccattgtgtcattcttatgcctttgcatcctcatagcttagctcccacttataagtgagaacatataacgtttgcttttccattcctgagttacttcacttagaataatagtctccagtctcatccaggtcgctgcaaatgtcattaattcattcctttttatggctgagtagtattccattgatatatacatatatccatacacacaatgaaatactacatatatatatgtatatctatatatatgtgtatatatatcatcatgtatatcaatatatatgatgtatatcaatcaacgagtggataaagaaacagtgatatatactgtttctttatctactcgttgattgatgggcatttgggttggtcccacatttttgcaatcgcaaattgtgctgctataaacatgcgtgtgcaagtatcttttttgtataatgactttttttcctctggatagatacccagtagtgggattattgaatcaaatggtagttttatttcagttctttgaggaatcttcacactgttttccatagtaattgtaccagtttacattcccaccatcagtgtagaagtgtttcctgttcattgcatccatgccaacatctactatttttttatttttttaattatggccattcttgcagaggtaaggtggtatcacagtgtggttttgatttgcatttccatgattattagtgatgatgagcattttttcatgtttgttttcaatttgtatattttcttttgagaattgtctattcatgtccttagcccactttttgatgggattttttttttcttgttgatttgagttcattgtagagtctggatattagtcctttgtcagaagtatagattgtgaagatttttttctcactctgtgggttgtctgtttactcagctgactgtttcttttgccatgccatgcaaaagctctttagtttaatgaagtcccagcaatttatctttgttttcattgtatttgttttgggttcttggtcatgaaatccttgcctaagcctatatgtagaagggtttttcccaatgttatcttctagaatttttatagttttaggccttagatttaagttcctaatccatcttgagttgatgtttgtataaggtgagagatgaggatctagcttcagtctcctacatgtgcttgccaattatcctagcaccatttgttgaaaaagttgtcctttccccaccttatgtttttgttttctttgtctaaaatcagttagctgtaagtatgtggatttatttctgggttctctattctgttctattccattggtctgtgtgcctatttttataccagtaccttgctgtttcggtgactatggccttatagtgtagtttgaaatcaggtaatttgttctttttgcttagtcttactttggttctgcaggctcttttttgattccatatgaattttagaattgttttttctaaggtaaaagccatgttttatattccttacctataccatggtttttgttcttttattcagaattatcataatgtcaaaatattattttgaatgtttataatccataacttagaagagtattaatgatttatttaattagcccacaagaaactagaaatcctctaccgaagtggaataagagagaacactggaacttccacagaacctacagaattttcaggatagcaacacatctttgaaaaataacagtgctgtaccactctattagattctttccattttttattaattgaagcacagagaaaagaggcaaaatgattaaagaaatttatgttttttagacagggtgttggctttacaccaacgaaaaagaaaaacagatgaataagcttttgatcttcattttctttctcttattctcatggtaggctgaaaaacaaaaggacaaatataagtcttatttg

SEQ ID NO: 32176 - DNA, 2300 bp, Homo sapien
attctatatattttctatgataagaatatatattgacaattctctctctctctctctttccctgtgtgtgtgtgtgtgtgtgtgtgtgtgtgtgtgtgtcttagtcttctcaagctgtcaaaacaaaataccatagcctgggtgacttaaacaacagaatttattttctcatagttctggaggctagaaagtttatgatcaagattctggcaaagtttagtttctggtgagggctctgttccaggcctatagttgaccaccttcttgctacgtccttatatggcagagaaagcaagcaagctctttgacattataggggtagcaatctcatcatgaggctcctgcttgcatgatctcatcgaaccctaattacctcctaaagactccatctccaagtgtcatcacattgggggttaggacttcaacatatgaatttgctaaggggaagagagagacacaaacatctagtccataacagacagtgaaatctcttgactaagtaaggaattttttctgaaacttctataacaatgagccatcactgaaccttgtgaaatgctatagtttaaatgcatgtgttgctccaaaattcacaagtaagaacataatatccagtgtgatagcaataagagatagagccttttgggacgtgattaatccaccctcatggttgcattaatgctcttataaaagaagctgaagggtgccctagtgcccttttggcattccctttcttctgacttgtggggacacctaaatgagaaacagtcctcacccggcacagaacctgttggtgccttaatcttggacttcctggtctctggaactgtgagaaaaacatttctgttgttttcaacttacccagtttcaagtgttttgttatggtatcacaaatgatctaatggactaagacattaagaaaagggagtattagtattcagcaatgatgctgatgatggcagatggccatggacaccctttgttatttctaataccctgtcattgctatagaagctgggaagagaaggagtccatatgaaaaagtcattacaaaaaaagatttaggaagtgttattttctgtgcaagttattgttctaggagatgctttaaaagtgtttttctctcaagcagttgacagtctctttgagcatgtggaccagttctgctgttttaaggagctatgcccagcctagcataggcaaccaacttacagaataagaaatgctgttaatggaacatagatttttgtaaaatgtattttcagttggcccttgacttactttgctctatctctgcatgacccgtattgatgtcttagttcaccttgctgaccttgaggcacttctatccttttaagtttggcaggcaagattggttgcctaatctgactgactcctttgaatttgttcccgtgtgggagggagaaaaaaatgtattttttttccctttacaaaccagggacaagatccctttgatgaagtgaaatagtcttctttttttaagcaaatactttatttataagtataatagcttttggggggcagcaaatgggaaaggtgaagtcttgtactctagagcatgattcaaatagataggctcaaattaaacaaatggagggatagtttgttctgcctaaaagcagtaataggaggggaatctagaagctgggtctggatgggaagacattaagaaaggagagggagagagagcaagcaagaaggaggtcggtcagggctctacaagaagagagtcaggtggtattgatacgagtggaaaagatctttttatgttttatgcctagttccttgatacaaacttgtggtggggggttcttgaaaaagtgattggggactatctgatctggggtttagggcagggaagaaacagcatgtaaaggagaaaagacagagcatttgttaaagagaatttaacagcaagaggaaataagaaccaatgataccaaggataaacgcagtccttaactcccctatcactgaattcttagaaatatgggggtaggggtggtggtggtaattctgttttctccccataggtgagataagcattgggttaaatgtgctttctctctctccctctcctttcttaagaattaagggacagactatgggctggaggactttgaggatgtctgtctcataacacttgggttgtatctgttctatggggcttgttttaagcttggcaacttgcaacagggttcactgactttctccccaggcccaaggtactgtcctcttttcatatctgttttggggcctctggggcttgaatatctgag

SEQ ID NO: 32177 - DNA, 2300 bp, Homo sapien
ttggccttgaagatgatatatctatatctacatctatatctatatctatatctatatctatatctatatatgtatatcagaaaagctgaaatatgttttgtaaagttataaagatttcagactttatagaatctgggatttgccaaatgtaacccctttctctacattaaacccatgttggaacaaatacatttattattcattcatcaaatgttgctgagtcctggctatgaaccagacactgtgaaagcctttgggatattttgcccatgcttgggcaagcttatatagtttgcttcataaaactctatttcagttcttcataactaatacttcatgactattgcttttcaggtattccttcataacaaatactttggctttcatatatttgagtaaagtcccccttgaggaagagtagaagaactgcactttgtaaatactatcctggaatccaaacggatagacaaggatggtgctacctctttctggagagtacgtgagcaaggcctgttttgttaacatgttccttaggagacaaaacttaggagagacacgcatagcagaaaatggacaaaaactaacaaatgaatgggaattgtacttgattagcattgaagaccttgtttatactatgataaatgtttgtatttgctggaagtgctactgacggtaaaccctttttgtttaaatgtgtgccctagtagcttgcagtatgatctattttttaagtactgtacttagcttatttaaaaattttatgtttaaaattgcatactgctctttcattgaagaagttttgagagagagatagaattaaattcacttatcttaccatctagagaaacccaatgttaaaactttgttgtccattatttctgtcttttattcaacattttttttagagggtgggaggaatacagaggaggtacaatgatacacaaatgagagcactctccatgtattgttttgtcctgtttttcagttaacaatatattatgagcatatttccatttcattaaatattcttccacaaagttattttgatggctgtatatcaccctactttatgaatgtaccatattaatttatttcctggtgtgggttatttgattttataatcttacctttagaataatgaaacacctgtgaagctttagaaaatactggtgcctgggtctcaactccacagattctgatttaactggtctgggttacagactaggcattgggaattcaaaaagttcccccagtgattctaatgtgtagccaagatcgggaacccttgtagacagggatgataggaggtgagccactcttagcatccatcatttagtattaacatcatcatcttgagttgctaagtgaatgatgcacctgacccactttataaagacacatgtgcaaataaaattattataggacttggtttattagggcttgtgctctaagttttctatgttaagccatacatcgcatactaaatactttaaaatgtaccttattgacatacatattaagtgaaaagtgtttctgagctaaacaatgacagcataattatcaagcaatgataatttgaaatgaatttattattctgcaacttagggacaagtcatctctctgaattttttgtactttgagagtatttgttatatttgcaagatgaagagtctgaattggtcagacaatgtcttgtgtgcctggcatatgataggcatttaatagttttaaagaattaatgtatttagatgaattgcataccaaatctgctgtcttttctttatggcttcattaacttaatttgagagaaattaattattctgcaacttagggacaagtcatctctttgaatattctgtagtttgaggagaatatttgttatatttgcaaaataaaataagtttgcaagttttttttttctgccccaaagagctctgtgtccttgaacataaaatacaaataaccgctatgctgttaattattggcaaatgtcccattttcaacctaaggaaataccataaagtaacagatataccaacaaaaggttactagttaacaggcattgcctgaaaagagtataaaagaatttcagcatgattttccatattgtgcttccaccactgccaataacaaaataactagcaaccatgaagtgggtggaatcaatttttttaattttcctactaaattttactgaatccagaacactgcatagaaatgaatatggaataggtgagatattttgtgtttttcttgtcttttctctatatcaaaattttttaaattataaaatttgcatt

SEQ ID NO: 32178 - DNA, 2300 bp, Homo sapien
attctactgttttaccaaaagtcatttagtaaatatttcctctgatatgacatatttttaatattcattagatttaaagacaaataagaatccatagagtgactatatcattgtttatgtattcacctgcaaagatgtgttttgcacttttaaattaatgagtgacttgtgaagtgatattttgaaagtataaatatgctattcctcaataattattcacctatgactttatcattctttcatgaaactggcctaaatcagctattactatggtggttacaaatgtttatgctttgtttctaactacaattattagttggcattcttctgtagagaagaactttcctttcccaatttttaattttgtattggtataggttcatgaatttaaaaaaattcctgtgttataatatattccagtaattatttattttaattatcaagttctcatcggcttccattgcatttaaaaaactctttttactttaaaggcctggtgtggtggctcatgcctgtaatcccagcactttgggaggctgaggtggacggatcacagggtctggagatcaagaccatcctggctaacacagtaaaaccccatctcaactaaaaatacaaaaaatatcctggcatggtggggtgcacctgtaatcccagctactcaggaagctgtagtaggagaatcgcttggacccgggaggcagaggttgcagtgagacacgatcacgccactgcactccagcctgggtgacagagtgagactgtctcaaaaaaaaaggtaataaaaaatatatatatttaaggcgtgcaagatgatgttttgaatacatatacatagtgacttgagtactacagccaagctaatcaacgcatccgtctcttgacgtattttatttatttatttatttttgagacagagtcttgctctgtcccccaagctggagtgcagtgcgcgatctcggctcactgcaacctctgcctcccaggtttaagtgattctcatgcctcagtcacctgagtagctgggattacaggcgcatgccaccactcccagctaatttttgtagagacagggttttgccatgttggcgcaggttggtcttgacctcctggcctcaagagatccacctgcctcggcttcccaaagtgctggcattacaggtgtgagccaccacgcccagccagttatctatttttttttcttttaagacagtgtgaattcttaagacctagtctcttagcatattctaagcatacaatacagtattattagctgtagtccatgtgatgcatttgaacttactcattctacgtaactgaaactttgcaccctttgacaagcatctccccatttcctctacctcctgcccttgataaccaccattttatgctctgtttctagtttgattttttagattccacatataagtaggattatgcagtgcttttctttctgtgtctgatttatttcacttaacatgatgttctccaggttcatccacatattctcatatggcagaatttccttctttttaaagattaaatagtattccattgtgtgtgtgtgtgtgtgtgtgtgcgtgtgagatttatttatttatttagttttttatatgttgactgacaggttgttttcatattttggctattgtgaataatgaggtaataaacaccgaagtgcaggtatatcttcttaattttttatttttaatttttgtgagtacatagtaggcgtacatatttatatatctttgagatactgatttcacttcctttggatatatatgcataagagagattgcttgattatatctgttctggccctttgttcctttaacatttgcagtattttaagtttttttttggttgtctatttgattaagtattgtgcatacttagcctgtggacttttgttccaactcagtagattttttccagcgaaacacaaaggtaatttttttttctggttaatatttagcaagaattctgcagagtgatcaaaaaaatcaaatactcagtatttcagaaatagattaaataggttacttttttactgataatgtgaaagaatgatataaaaacttgattttcctcaacaacattactttcttttgtaaatgtggtttctacaaagatgaaactactaaaacttacaggttttatttttttcttgttttttttgactgaatccctaaccctgcccacacaacctcgggatataggtaagaaatttacttgtatatcagctaaagcatgaccagttaggataatttctatttttaaaattttgttttctttca

SEQ ID NO: 32179 - DNA, 2300 bp, Homo sapien
agcagctagttaaaattacattgcaggaaaaaaagtgactgatttatagtaaattgttcatactacgtttgatgtgatgaaagcaggctataaaccaacaaaccaaatgtaatagcattttgataaacagccacagggaaaataagtcaataaagacattcaacaaattgtttatgatgattatacttgagagatggaattataggtgctttttgtcctctacatttctgtgtttttcagattttccacattgcatatgtgcaattatatactttttatattatcaaataaaaattacatatttacaaacagataaaacactaaaaaacgaagtcactaagcctctaactttacttttctttagaaaaccagttggaaagcagtcatcagagtaaaagtttccacagcatctgccatttaacagtttctaagcctttttggagtccttttgaaattggagatattggcaaaaaacaaagcccccaaatccaatgcttgcaggtaaaagatgcaaaagaatgttgccctgatgctgacaataagcaaatgacccacttcaagcacagacaatggaggtggagcatggatttgagcaagatatcctggaaccgagagctgtaactactctaggtcctgctagtcatcattcaaaggtcagtccataccagcagccacataccagagagttatggagccaacatgatgatcgaattaatatctgcaagtaatactaagtcacatctgtccttacataagattgtaaaatctttgattgtgatccaataaaaccatttgctcaaataatgataaatctgatagttcctggtctccgcacaccacagattaaatagataaactgcctaatattttttcttttttttttttgaatcaggctggagtgcagtggtgcaatcttggctctctgcagcctcgacttcccaggctcaagtgatcctcccacctcagcctcccgagtagctgggactataggcatgccccacaatgccgggctaatttttttttttttttttgcagagacagggttttgccatgttgtccaggctggtcttgaactcctgggctcaagtgatccaccagccttggtctcccaaagtgctgagattacaggcgtgagtcactgcacctggcctgcctcaccttttgaacatataggatcttacttaaagtgctatgacaaacatgcaacctgaacatctagagtcattctgtttgtctggcgtttgaacacgaaagatactagaaattaactctgcctgctgaactttttgcaggaatcagattgaatttcttttgagggctctcaggtttacacttgtaaaataacctattatgtttaaaaattatgaatagttgctttacataggaaaccagtaaaataacaatgatccttaaaaatctgtgtgtgtgtgtgtgtgtgtgtgtgtgtaaatgtacttcatatttccacagcatctgtcatttaacagtttctaagcctttttggtgtccttttgaaattggagatattggataaaacaaagcccccaaatccaattcagtagataatgactaaattattatttatctcctctgttttgtttcattatgttcattttcaaactttgatgtctaccagtttcttctgtggagcttataaaaaatataaatacccgaagtgtatgcatggcctactaaatcagagtctcacagttgatggtacctgggtttagcagaatacataggtggtcctggtgcaccctgaagcgcgaaacgctgctctgggtgaaaaaaagtgctagcagggaaatgtgttagcaaaataacaaggaaaagaaagttaacaaatctcaaattggaaaagaaaaatcttaaaaagaaagacgtgaataatggcgttcagtcttggttggtgtcatttctcacaggccaattacctacagtctgggtggactagagaatagagattaacatcagtcaaatcccgtggttaaagcgttaactagaatgtccattcatttctcaagaagtgtggcagagagcaaaggagtgtacctatcagctgttcctaagaaagtaaacactcccaacatgcactgaggcacagggagtggctcaggtttcttgacacttccctgctgtggcgaaaaggagaaataattaacagctcctggggctccaggatcgctgatcgcgtcgggggcactgcaagcgcccagctgagccatgctctgggaggagacaggcgccgcccctgcgcccgcgcgggcctcggacctcccctacaggtgagtgactcgcgg

SEQ ID NO: 32180 - DNA, 2300 bp, Homo sapien
gtcaagccaggttgtgtccatatgagaatgtgtctttgctaaacatgccaacatcactgaagcaaagaaacttggagttttctttaagatataggtcttttttacctatccggcccaagctttctcttcttgtcactccatgcactgtgttccgtatgctaaatagtttgagaaacccaaatgggccatgttcgcctacatttcattgtcctgtacttcctgtcctgtactagcaaagcagtcccattggtctttcttctcctcattaacaataaaggtaacacttttgatgttgtttcttcagaaaaccttcattcatcaaaactgcctcaaagatcatgtttgtttgattccagaacttcctgtaattacctgttattgtaacactcatcactgtattttacttacttgtgtaactaattttccatattctgcactagacaacaaagtcctttaagtcaggtactatatctatttacatagcattcacatctcctacaataagggacattagcagataaacaacacatattaaatgaataatgaagtttctgaaatactacagttgaaaactataggagctacattatatagaataaacatttactttgctatagaattcagtgtaacccaggcattattttatcctcaagtcttaggttggttggagaaagataacaaaaagaaacatgattgtgcagaaacagacaaacctttttggaaagcatttgaaaatggcattccccctccacagtgtgttcacagtgtgggcaaattcactgctctgtcgtactttctgaaaatgaagaactgttacaccaaggtgaattatttataaattatgtacttgcccagaagcgaacagacttttactatcataagaacccttccttggtgctctttatctacagaatccaagacctttcaagaaaggtcttggattcttttcttcaggacactaggacataaagccacctttttatgatttgttgaaatttctcactccatcccttttgctagtgatcatgggtcctcagaggtcagacttggtgtccttggataaagagcatgaagcaacagtggctgaaccagagttggaacccagatgctctttccactaagcatacaactttccattagataacacctccctcccaccccaaccaagcagctccagtgcaccactttctggagcataaacataccttaactttacaacttgagtggccttgaatactgttcctatctggaatgtgctgttctctttcatcttcctctattgaagccctcctattcctcaatgccttgctccaactgcctttggaagattctgctcttatgcctccactggaattaatgtcttagtaccacttgtctattctgctatatagtcagtccttacattgctttcttcttctgatagaccaaactctttaaggacaagtacctagtcttatctatttctagatcccccacattactcagaaagttactccataaatgtttgtggaactgatttctatgtgaagcacatgtgccccttcactctgttaacatgcattagaaaactaaatcttttgaaaagttgtagtatgccccctaagagcagtaacagttcctagaaactctctaaaatgcttagaaaaagatttattttaaattacctccccaataaaatgattggctggcttatcttcaccatcatgatagcatctgtaattaactgaaaaaaaataattatgccattaaaagaaaatcatccatgatcttgttctaacacctgccactctagtactatatctgtcacatggtactatgataaagttatctagaaataaaaaagcatacaattgataattcaccaaattgtggagcttcagtattttaaatgtatattaaaattaaattattttaaagatcaaagaaaactttcgtcatactccgtatttgataaggaacaaataggaagtgtgatgactcaggtttgccctgaggggatgggccatcagttgcaaatcgtggaatttcctctgacataatgaaaagatgagggtgcataagttctctagtagggtgatgatataaaaagccaccggagcactccataaggcacaaactttcagagacagcagagcacacaagcttctaggacaagagccaggaagaaaccaccggaaggaaccatctcactgtgtgtaaacatgacttccaagctggccgtggctctcttggcagccttcctgatttctgcagctctgtgtgaaggtaagcacatctttctgacctacagcgttttccta

SEQ ID NO: 32181 - DNA, 2300 bp, Homo sapien
gacatttgggttggttccaagtctttgctattgtgaatagtgctgcaataaacattcgtgtgcatgtgtctttatagcagcatgatttatagtcctttgggtatatacccagtaatgggacggctgggtcaaatggtatttgtagttctagatccctgaggaatcgccacactgacttccacactggttgaactagtttacagtcccaccaacagtgtaaaagtgttcccatttctccacatcctctccagcacctgttgtttcctgactttttaatgattgccattctaactggtgtgagatggtatctcattgtggttttgatttgcatttctctgatggccagtgatggtgagcattgtttcatgtgttttttggctgcataaatgtcttgagaagtgtctgttcatgtccttcatccactttttgatggggttgtttgtttttttgttgtaaatttgtttgagttcattgtaggttctggatattagccctttgtcagatgagtaggtcgcgaaaattttctcccattttgtaggttgcctgttcactctgatggtagtttcttttgctgtgcagaagctcttgagtttaattagatcccatttgtcaattttggcttttgttgccattgcttttggtgttttatacatgaagaccttgcccatgcctatgtcctgaatgggtaatgcctaggttttcttctagggtttttatggtttcaggtctaacgtttaagtctttaatccatcttgaattaatttttgtataaggtgtaaggaagggatccagtttcagctttctacatatggctagccagttttcccagcaccatttattaaatagggaatcctttccctattgcttgtttttctcaggtttgtcaaagatcagatagttgtagatatgcggcattatttctgagggctctgttctgttccattgatctatatctctgttttggtaccagtaccatgctgttttggttactgtagccttgtagtatagtttgaagtcaggtagcgtgatgcctccagcttggttcttttggcttaggattgacttggccatgcgggctcttttttggttccatatgaactttcaagtagttttttccaattctgtgaagaaagtcattggtagcttgatggggatggtattgaatctataagttaccttgggcagtatggccatattcacgatattgatttttcctacccatgagcatggaatattcttccatttgtttgtatcctcttttatttcattgagcagtggtttgtagttctccttgaagaggtccttcatgtcccttgtaagttggattcctaggtattttattctctttgaagcaattgtgaatgggagttcactcatgatttggctctctgtttgtttgttattggtgtataagaatgcttgtgatttttgtgcattgattttgtatcctgagactttgctgaagttgcttatcagcttaaggagattttgggctgagaccatgtctctgtttgtttgttattggtgtataagaatgcttgtgatttttgtgcattgattttgtatcctgagactttgctgaagttgcttatcagcttaaggagattttgggctgagaccatggggttttctagatatacaattatgtaatttgcaaatagggacaatttgacttcctcttttcctaattgaataccctttatttccttctcctgcctaattgtcctggccattggagaggaggagcatctcccagacagctgcgtgcctcagagaagccagcctcgctaacccctcaagcccaggggatgagaccctgctgaatcgctgctctattttggctggagccacagctccctccaccgcggggcggggctaaaatgtcctcccccttaagggagcaggcagctcctcccagccacccaccccaccaattcccatcctcccgcccccctccaccaaccccttctttccacactgccccctgagttcagggaatttccccagcatcccaaagcttgagtttcctgccagtcgggagggatgaatgcagataaagggagtgcagaaggcacgaggaaaccaaagtgctctgtatcctccagtctccgcgcctccacccagctcaggaacccgcgaaccctctcttgaccactatgagcctcccgtccagccgcgcggcccgtgtcccgggtccttcgggctccttgtgcgcgctgctcgcgctgctgctcctgctgacgccgccggggcccctcgccagcggtgagagctcctggcactggggtgcatcccagcct

SEQ ID NO: 32182 - DNA, 2300 bp, Homo sapien
aataacaatgtctttttctggaatattttctgaagggccttccagaggctgattcatagttaactcttcttccattagcaggagaaggagttcactctaaaataatgattaaagagtataatatagtaaatacacaaaccagaaacagtgttgtttattataattatccatttttatgtactgtacatacttgtatgtcatatacttttatgcaactggaagcacagtaagtttgtttacaccagcattaccacaaacacatgaataatacattggcttgctatgattttacaacagctatggtatcacaaggcaataggaattttttagctccactatagtcttatgggatcatcatcacttatacagtctattactgcccaaaacgttgttatgtggtgggtgactgcacataagtcacagagaattgctattgaagagatcactatcttgtgggagaggcagacaagtggacaaataattttgaccatatgtgacacgtgtcaatatagatgtatgttccaattatatgctctaattgctccaattgaatagacataggaacacgtcaaagcctcatcatcatcattttcaacacattatcttcactactgtagctactttgcactgagtccctaccagtacattgaaatagtgataaacgttatgatatctaatgtcacagtgttttccatttaagaaacaaaacaattttaaacacttttaaatacacagatacacatacacacacatatatatatatatatctacaatatatgtgtgtgtatgtttgtgtattctgtgagaaatacgaagaacagagttctgcaagatagaacaacaagggaacacaattatatatagctgtcagggaaggcacacctgaggaagtgatatttaagctgacaccagaaatatgaataggtcttagccagctgaataggcaggtgtagggagagtaggagaaagaattgcatattcctacaaaaatgcaggtttgctgagcattagaatatcagctagttccatccagtgggtccctgacacccttcaccactgttagtcagagtgacagggaaccttgggctttgggttgagggtgtaccttgccctgatcaagagccaaagtcattcttttttagagaagagaaaacggtcgatatggatctcttcccctttcccgtgtgggattctgttgcatccccttcactgtcacctcccatcattctcacacccaactcccagatgccctgaatcctcccacagagagcatcactgctccctgccaacagtgcagcccatctcaccctgtcactggcagtgactgaggacacagcaggctctggaagacatggcctggcaaactctccttgtcctctcttctggactattattcaggattgaaacaatgaagaaacatccaggagctaagtttttataaaaataatgcattcaaatattacttctgcaatttttctaagagtaacgggaaatagatcttgcatcctacagtatactgggtgattgttggtggagcctggtaaatctcatccagagactagggaagttttccacattcaggtgaaattcagaagagtcatcacctagagaccaaattaaacttattagtattagaaaacaattgcaaatagcacactcttcaaacacacagccatcaaactcaatggtaatcaagactgaagttaggagcatatgggcagttcttgagttgagaaggaaacaagaactgtctgggtcctgaagccacctgctgtgtaagttgcttggtgactacagagaactctactatgatacaacacagaaaatatttctcttctaagatgcaagtagtgtttctaactccacaaatgtaagtgtatataaactgaggttggaggtatgcatctttgtaccacctcctagccaaggcagctgcccccagccttttgttttgtaatcttggctggccagagtctgagtcttcatagcagtgtcttagctcctgcaccacagttcctcgctgtccaccccaggcttccggactggaaggacagtgggacagtgacgggggataaaagaagcctggtgaggccaggagtcactgcctgcagaaccccagcccgactttccctgcgcactgggatcctgctggaacctcagctgcaacatgagctccgcagccaggtcccgcctcacccgcgccacccgccaggagatgctgttcttggcgttgctgctcctgccagttgtggtcgccttcgccagaggtgagagcagaaaccaggctgggagggccagca

SEQ ID NO: 32183 - DNA, 2300 bp, Homo sapien
gaaactgatgaagatatttgggacactgtatttggtctccattgggtcaatgctttttcatttattcttcctgttaagaaatataagtaatcaggaagatgtgaaaagagaaataattgaaaaagactggagtacatatactatctacagtgtctgttttaaagaaacaacattctagcacacctttctacccttgactaagattactgtaatgagagcaccagtacccctgagtaaccgaaagggcattttggaaactgagcttttggtgtttatatgaacattctgtcttccaggacctgccttgatttattcaagactcatactgctgtatatggtgttgtatacattaggggtagttgggtagcagtaactgatatagaaaattttaaatgtaaaaaacactggggagtgaacctttccattatatatatatatatatatatatatatatatatatatataaatatataaatatatatataaattcacatcaggatgagtttctgtttaggcaatgttggaaaacgctatttccattttttttttaaacaaatatttaacaaacatttataaggcacttaaatccatgctggctcttacaaatgttgactcatttctcataaccaccttggggtagaaacggagaggctaaacaatctgcaggcgatgcttcactactaaatgcaggtggcagccttgcctgtgttctctgcttggctaggaacacaggtcttacctattgagctgggctgtgtagaactctgttgtggagacatctgcccctggggcagaagcctctgctttttccccctcctcccatcttactccatgtctcagagagctctgaatcccacttggagaatcacacttaaaccctctaaaaacctaatgatgaataaaaataagttctctagaacttctggagaaaaaagtaataaagctaccaggttaaatgactgaaattcctgagagaaaacaacatgtgtgtgtttctctagaaagggggcccaatactgaataccaggaagtcctatagtaaatggaatgtgactctatgtgggatccggcgttcctatttcatccgaatgcatgtctgctgcttcagtgggaagggtgcttgcacaccaggtacccactccctggtgtcatgtgctatgcagtccaaagacagaaccaggaatggtgagcccatgagcctgctggacccagcccctccgaggtccggagtgacaaccagtgccgtatttctagatcaaacctgaacccctcctacagggaaaagatttccaggggattttgaaagttccaacattttacagggaagaaggaagataagcaggatatgaaagaagagttcatgttatacagccctggcttccactgacgctaacactggattcagcttttgacactgataatctgttgccaccaaatggaaaacgtaaacaagatattctaagtgtggttagagaatatgcaacacaaggaacaagcagaacattcttctctggaatctgacataatggactgtactttcacagacagcactgatgttagatgtacgtgaaataggctaaactgaaaataagaaaggctgaggcagagaggataatatagctccagcctatctcccagcaccttgttaatttctctcaatctccagccacaaatccgagacacaacgctcttcctccaaagaggtcgcgccttctctgtggtggttctcagggatccgccccagctccttctccgttcccagccccacacactgggatcaccaggcacccaagatcccacctctcaggtggtatcttcagcgcaggctgccactcagcccccctccagggatctggggcagaaggcgaatatcccagagtctcagagtccacaggagttactctgaagggcgaggcgcgggctgcatcagtggacccccacaccccacccgcaccccaagcgctccaccctgggggcggggccgtcgccttccttccggactcgggatcgatctggaactccgggaatttccctggcccgggggctccgggctttccagccccaaccatgcataaaaggggttcgcggatctcggagagccacagagcccgggccgcaggcacctcctcgccagctcttccgctcctctcacagccgccagacccgcctgctgagccccatggcccgcgctgctctctccgccgcccccagcaatccccggctcctgcgagtggcactgctgctcctgctcctggtagccgctggccggcgcgcagcaggtgggtaccggcgccctgggg

SEQ ID NO: 32184 - DNA, 2300 bp, Homo sapien
tatagtaaatacataaaccagtaacatagttgtttgttattcttatcaagtattgtgtactatacataattttatgtgctatacttttatagaactggcagtgaatgggtttgtttacaccagcatccccacaaacatgtcagtaatacactgcttcctatgactttacaaccatgaggcaatgcgaatcacatcactaggcaacaggaatttatcagctccattataatcttatgggaccattgtcatatatgcagtctattgttgacctaaatgttatgtgctgcactactgtatgtaagtcacagagaattgcacttgaaaagatcactatgtggtgggagaggcagataagtaggcaaataattgcaactatatattacacatgttaatatagaggtatacttcaattgcttgaaggagcaaatacatggatatgttaaaacttcatcatcatcattttcaacacatcatcttcgctaatgtggcactttgaattgagtctctaccagtacactgaaacagtgataaatgttataatctctgatttcatagtgttttccagtttaggaaacaaaaccatttttaacactatgaaatacacacatacacacacacacatacgtatctctgtgtaatatatatatatgtgtgtgtgtgtgtgtgtgtgtgtgttacctgtgagaaacaggaaagacagagttctgcaagatagaaaggcaagagaacacaattacatatagttgtcagggaagggccctctgaggaactgacacttaagctgactccggaagtataaataagtcttagtcaggtgaaaaggcaggtagtgggagagtaggaggaagaaattactcagctcaacaattaaattgcatatttctatagaagtccagtcctaccacatattagaatatcagctttccatgcagtgggctcctgacaccctttaccactgttaataagtgtgatagagaacctctggctttgggttaagggtgtaccttgccctaatcaagagccaaagtcattctttctcagagaagggaagactgtccatatggatctcttcccctttcctatgtgggattctattgcatcccctccaccgtcacctcccatcattctcacattcaactcccagatgccttgaatcctcctgcagagagcatcactgctccccaccaacagtgcagctcatctcaccctgtcactagcactggctgaagacacagcaggcactgggagacatggcctggcaaactcttcttgtcctctcttctggactgttattcaggatggaaacaatgaagaaacagccaggcactaagcttttacaaaaagaatgcattcaaatattacttctgcaatttttccaagagtacgagtaatgggaaaatagaccttgcgtcctacagcatactgggtgattgttggtggagcctggtaaataccatccagagactagggaagttttccacattcaggtgaaattcaaaagagtcatcgcctagagaccaaattaaacttattagtagcagaaaataattgcgaataacacatgcttcacacacaaagccaccaaactcagtagtaataattggtagttgcagctgggaggttggaaaggaaacaggaactgtcagggtcctgaaagcacctactgtgtaagttgcatgatgacagcagagaactctactgttaatacaacacaaaaaacattccttttctgactcaagttctgtttctaactctacaaacgtgcttgtatgtaagttgaggttggaggtcccagccaaggcagctgcccagagccttttctttctttctttctttctttcttttcttttctttttttttttttttttttttttttttttttttttttttttttttggtaatcttggctggccagaacccaagtcttcccagtactatcttagtttccgcaccgcagttcctcggtgtccacttcaggcttccggactggaaggacagccgggaataaaacgtgccggcgaggctcaggagtcattggccacagagacccagcccgagtttcccatcgcactgagcactgagatcctgctggaagctctgccgcagcatgagctccgcagccgggttctgcgcctcacgccccgggctgctgttcctggggttgctgctcctgccacttgtggtcgccttcgccagcggtgagagcagaagccaggctgtgagggctggcagcggcgagggggagtccgggaagccctggggctggggaggaatcctctaggatcatgatcacagccaca

SEQ ID NO: 32185 - DNA, 2300 bp, Homo sapien
cattagctacagattacagcatacaggctaaatgtctacatacaaaacaatcaataaaactttttgtttcagctaaacttagaaataaatcattgtcctatttagtgtcagtaggttctacagtaattagtacatcaatcatttgaggaactcgtaataaaatactttactcagagatagaatgtcaccatcaagtcacgaaacctttccagggcgagttaatttggaagtctgcttacttctaaagtaaactgtcaaatgtggtctgtaggttatcgcatttaaaaacaggacctgagaacttgagtagacatagtagataactattaaacaatagggaaaattggcttgaaaacaaaaacatgatttaaaaaattactatattcatctttttgatagagagtaattttgaacatttagtattttaagcatttcttctaaaatttaaggatatgaaaagtaagaaaagaatatggaaaatttaaataatattctgtgagacttatacatagttgtaaaaggaagaaaacttgttgccagtgccacttacatctgcctcttctttattgacaatcttccaaataaatttaaatagcatagttgctttgggtcctgtcgagtttggcctggaattgtaggtgattagaaaggatagggaagctttcatgtgatacgtattcattgatttattaattatttaagacctactttatattgaagtatcctacatgttataggatacatgagacattcaaacaaacacaggacatgccactccctacaaaagtgcatggttcaattgaggaaggaagtcttacagatgggacagagaaccagaaaataacataaagccaacatgtaatgtgtaggtccacctctctatctttgtagggatatagcatttcagaccaaaacctttaatttgggtctgagaattcaggaacaaatattttccttggtaaggacatttcttgcacaatttctaatagtgcaaaattggaaacaccgtgaagggcaccaacaaggcaaggttgagtaactattgttcttatcacaggacgtcacatggtcattaagaagaatgggggaaaactacattaagatgacctgaaaagataaggaacacatattttttgaaggataaaagtcagctgtatagtgatccatatacaatacttctatgtatatgtgtacctctatgtcttaaacgtgtctcattgtatacatatacatgtgtgcatataagtgcagacagaattgaaaactaatgcaaaattgttaccagtgtttaccactgaatagtaggaatgtggagaaatgatgaagagaaatttgtgttttatttcaaagacatctgcagcatacgaatcttttgcaataaattatataatttttctgttaaattaaaaataaaaagaaaaataaatatgctgggtcctactttttaggtattcttaggtggtagaaacaagtagcttcttttgtaatataaaggaggatgagtttcatttgtagtttctagatgaaattacaaaagataatatagattgaaggcagaaagaatccaataagctaaaatccaaagacaacctttgacggtaattggctcttattttacttacatgctccaaaccaatcccaatatttatcaacattcatgaaaagaacatttgctttctttggcaagcaaagataactttctctttcaagggccacatgtttgtgccttcaggtgctcctaaagtttctattaagcctaaaaactgcagtatagaaaaggcagggcgtattgttataaatcatacaaagaaaatgcatgtagtatttcagtctagttcttaccttcctgaacggagttcttacacaggtgtaaggaagataagtattgagaaagggagagtgggaatgtgaagtgatgcacattaagcaagttagtaggaatttgacctgtctggtctttctctgggttgggcacagcttcaaatgcttatgtgtgtatcaccacataccctcacttcctcctttcctacctcttccttcttactggctttgagaaagagcatataaatgacatcttcagggcatgagaagccacttatctgcagacttgtaggcagcaactcaccctcactcagaggtcttctggttctggaaacaactctagctcagccttctccaccatgagcctcagacttgataccaccccttcctgtaacagtgcgagaccacttcatgccttgcaggtgctgctgcttctgtcattgctgctgactgctctggcttcctccaccaaaggacaa

SEQ ID NO: 32186 - DNA, 2300 bp, Homo sapien
caagctacagtgaattgattcagagtgcaaaccaggtgagatatatacatttataagaccgtcaggaggaactggcaatcttttctcatgatccatctcagatttcaccatttggcgccaaaaacaaattcgtgtgttcacttatgtttaaaatagcttatttagaactaacgtaaacacacacacacacacacagtttaaaagtcaataacctatgtaattaaacttcttttaaaagaacaaagtcttatcctatggtttactccctgtggttacgttgaatttaattgcccaagattttttgaagtgttatcacttcacctaggcttaacttttgtctttcgatacactctaatctctaaaacgtcaacatactaaatctgcaggctgttttctacagattaccactccccagaaagatgaagaattacattttctgagtcaggtatgatgctggtgatgtcaagaagctgtgaagacttctcatttagtttcccacagagtaaggcccataccaccaaaccttactcagccagtgaatttctgaagtttccttccaaaataaaagttgttaaggtctatgacatctctttcttgctcaccaatggaggtgatggatgggggagttaataaaattcccagtatcataggagacaaggaaaagagttgtgtttcatgactggtttctcattgccatcatgtttactgattacctttgctggtctgctgtgagggcaagggtcttcagaaccagccagaagaggatctagttagatttccatgaaagaaagcctatgtgtcattccaatacaataacccattcctgccatggagcaagacagtggaaaacccttaaaccttcagtgctttaactcctccacagataacagaaggagagagggagaggaagctggaaactacttcacccttcaatttcaggcagcagtgcagggctcactggggactagagtaggcctgtggaaacagcgttggtcaccagtaatcatgaaactcgatggttccagaaacctgtggggagcattcctccctccgtgaagttgtttgagggaaaacagactgggtgctgttgtgctgccaaattgatacaaacccctacaagaagctttcacatgagcccttcaaactcatcagcctcccacagcatctccaaatggtgtcaaatacatatctggggctgggaacagagctggggcaggcctgggatccctggcaagctttagcctgcgctcaccatactacacctcacccccaacaagaccaaaacctcttccaattcaatagcatagcaactgccaatagcaaggtatcttccatggcaatttgctgggtgattttggaagatttttgtttaactacctggacacacgtatacttgctatatactacaagtacagaattctcagtaagcggacttaccaaagtaggtgatctgtaggggagttaacaaaattcagtggtcctttcaggccactgacttcaagtggcaagagacaagggtctcttgttatcatgttatcttggcttccaaagctggttgaagtccagagattcataaagtcattcaagaaacctagaatgacctgcctgcaaggaagacaggaaggactttcagtttatagcaattcaaacatgaataacatttcctgattaatagtaataataattagaaaggattgactttcagaaatttttctcaaatcaaggctcctgttactttggttccaccttttctctctagaaggagaggaggagcatctcccagagggctgcgtgcctcagaaaagccggcatccctagcccgctctggcacaggccatgaggccctgctgaatcctgctgaatagctactcccttctagctggagccacagctccctccaccgcggagcagggttacaacgtccctctcggtagaggtgcacgcagctcctcctggccaccctccccaccagttcccattgtctggcccccctcccccaacctcttctttccacactgccccatgagttcagggaatttccccagcatcccaaagcttgagtttcctgtcagtggggagagatgagtgtagataaaaggagtgcagaaggcacgaggaagccacagtgctccggatcctccaatcttcgctcctccaatctccgctcctccacccagttcaggaacccgcgaccgctcgcagcgctctcttgaccactatgagcctcctgtccagccgcgcggcccgtgtccccggtccttcgagctccttgtgcgcgctgttggtgctgctgctgctgc

SEQ ID NO: 32187 - DNA, 2300 bp, Homo sapien
atgtgtcttcctttctgaaagccttcctaaattaaaaacatttaacttttttgttttttataaattcccaattgaactttatttttcatttataagtttgcagcatttattacagcttgaaactgcagaagacatttgggacactattttggcctccattgggtcaatgttttttctgtatctatcctttctttcaaggaatttaagtagtcagggagatgtgagagaggaaattattgaaaaagaatggagcatatatattacctatagtgtctattttaaagtaacaggacattctagcacacctttctatcccttgtccaagattattgtaatgacatcacagatacccgtgagcaccagtaactacaagaccattttggaaactgggattgtggtgtttatatgaacattcttctttctaggatgtgctttgatttcttaaggactcacactgctttatatcagttagagacagggagagttgggtggcagtaagggatacagaaaattttaaatgtgaaaaacactggggagtaaaactttccattagattcttcttttttcctttacagaattcatagcaggctgagtttttgttcaggcaatgtcgggaaagaaatagccttttaaaaatggaaatagtccattttatttatttaacaaccattaataaggcacttaatccatgttgtctcttacaaatgttaactcatttctcataaccaccttgggctaggcacagagaggcttaacaacttgcaagtgatactctgcaactaaatacaggcagcacagttgcacgctctgtgtttggttaggggcaaggactcttatcccttgagctgggttgtgtagagccctgtgcttcaggcagatgccattcctttctcctctcctccatcctactccacgtctcaaagaggtctgagaccaacttgtagaatcacacttaaaccctctaaaacctaatgacaaatcaaaatacattatctaaaactagaaaaagggacaaaggtgtcaggttaaaagactgaaaatccagacgagaaaaaaaagtgccctgttaatgtttccagagaaagatcccccagtgctgaataccagaaaattctatagtaaatgaaatgtgattttatgtgtgatctggtgtttaaatgtcatcagcaggcagctgtttgctccttcagtgggaatggtgtttgcacaccaggtacctactctctagtgtcattcgcaaagacagaaccagaaacattgagcccatgatcctgctggacccagcccctccacagcttcagagtgacagccagtgtcatatttctagatcaaatctgaatccctcccactgggagaaggtctccaggggatttaggaagttccaacatttcagagggaggaaggacgttatgcaggatacaaaagaagaggtcatgttatacagccctggcttccacggacactaacactgaattcaaattttgacactgataatctgttgccaccaaatggaaaacgtaaacaaggtattctaagtgtgattagagaatatgcaaaacaaggaacaagtagaacattcttctctggaatccgagacgatggctgtactttcacagagagcatgatgttagatgtacatgaaataacgctaaaccgaaaatgagagaggcagagaccgggaggttaacatagaggatagactatatagagagaggatagctgagggaaaactcgcctgtctccgggtccccagcaaatctgataactaaggagacaaagctctcttcctctaaagaagtcgtgcctttcctgtcctggttctcacgggtccccccagctctttcctccaaccctaccccgtacgcggggggtcatcggggacctaaggtcccccctcacaggctgtatcttcagcgaggtggactcactgcctctccaggaatttggggcagaaaatgaatatcccaaagtcccagagtgcacgggggttactctggagggcgaggcgtaggcgtcaccagtgggctccccctacccgtatccgactccaccccgggggcggggccgtcgccttccttcgggactccggatcgatctggagctccgggaatttccctggcccggccgctccgggctttccagtctcaaccatgcataaaaagggttcgccgatcttggggagccacacagcccgggtcgcaggcacctccccgccagctctcccgcttctcgcacagcttcccgacgcgtctgctgagccccatggcccacgccacgctctccgccgcccccagcaatcc

SEQ ID NO: 32188 - DNA, 2300 bp, Homo sapien
tgtggaaagtgattgaaactaaaatttcaaacaaacaatggatcaaaaaattattgtaagatcccataaggatagaaatgcaccctcctttaaaatttctgatgctgaaaaattttaaaggtaaattagaagatgtttctttgaaaatatttctttctttgtgcgtgtgtgtgttcataaggctttatcagagtgcttctgtttagttaagtgtcttagtcagtttgagctgctataacagaatgccataggctagggggcttaaacaacaattatttcacagttctggaggctggggagtccaagattaagatcctggcagatttcatgcttggtgagggccctcttctcagtttgcagatggtggccttcttgctgtgtcctcacaatgcagaaagggagagagagccagagatcgaaagctcactgatctcttgctgtaatggcacttatcccatcatgggggccataccttcataacctcacctaaacctaattacttcccatggtcctgtcttctaatattagcacataagggagtcagggcttcatcatctgaatttgaaagagacacaaacatccagcctatatcagtaaggttgtgaaacaccacttctattttgttatttaacaaatatttacataacactttacatgcactgatggtttacacatattaacaatcaatacttctaacaaccccgtgaggcaggcactattataagctcttctacaggggagaaacatgagcaaataaagcataaattaccaagggtcatgaagcaagttagtggtatggctgaaacttcagccctgacatccttatcaagtgatctctacagctgcagcatccagggaacactctattcctaaggtagtcccacttcttcatcctcgtgccactcccagcccttctcatagcagtggcagaatatctccatatccctgaagtctgcatccaccaggaagaattaagacagagtattgtaggcctacagcttaatttttaaagagagggggtcattgaaattgatgatgaaaagtcagtaatccagtgagaaggcatcagctaaacaggcttggaaatgctttattgacattcctctagaactaaaatttcctcgatagctgtttctctagagggaaccaatcccaggatgctggtaaatacatatggcatggaaatgcaattatgttagcaatctagtatgtatatatcagacatgtctgcttgtgcttagagtagtaaacaagcggagtctcattccctgctccttttctggtggtgtctatggccttttctgcccagggacagcactagaaaaggcagacctcctgagcccaacaggcccctcgcagctcccagtgacttccatggatcaaaacacagacttccatacaacaaaaaattgatgctactggaattactagagttcgagatgttccaagatttcaaagagagaaaggatgggggattgcaacactgttaactaaaataaacactgaattgacccttggcaatggtctgttcccgcacccaacacctggctccactacgttgaaacacacacacacacacacacacacacacacacacacacacacacacgtgatatttgcttttaagatcataaaacaccaggaaggagacaaaagctcttatgcgtcatctgagatgacacatgtactgttaaagcgtgcgtttatttcaaacattaatgaaatttgcagaacccaaactaaagagagaggatagataagacatgctgcagttcttgccctaactttcaatcccaacaactgaaatgtcttccagagaagtaactccccccggtaaggatgtagcgcggtccctacgtgggtctaagggatctgacccacgacgcactgcactgggttcacgaagcgcctcctcgcaggcggttatctcggtatctctgagagcggcgggctctcgctcccgctccagggattcggggcagaaagagaacatcccacagttggcgggagttacgcaagacagtcagacccggacgtcactcgtgagtgccccgacccccctccaccccagaggcggggccatcgccttccttccgaactcgggatcgatctggagctccgggaatttccctggcccgggactccgggctttccagccccaaccatgcataaaaggggttcgccgttctcggagagccacagagcccgggccacaggcagctccttgccagctctcctcctcgcacagccgctcgaaccgcctgctgagccccatggcccgcgccacgctctccgccgcc

SEQ ID NO: 32189 - DNA, 2300 bp, Homo sapien
cttctctgctttgctcactctccggtgtctgtgtacgtcattcttcttggtcacaggacaagaacccggaacatgccaaaagggtgtaacacatactcctgctcactgagttacaggagtgaaaaaaaccactgggtgccgcatgcccctatttagcaggtacaaatgagctgtaacacaacacacccccatcctccaagctgcaggcagcagggagagctgtaacatgcctccatcctccgagctgcaggctcaaagaagtgaagcagttaggcactattccctcctggccagcttgctgaactacaaaagctgcaacatttcttgggagcttagacctcaggattccccaggcgagagctgtaacatcacctggggctccacagttgctggcatctctgagttttcaggtgccactgcattcccctcatctagactccggctcccaatgcaaaagctgcctgtggcatgccaagtttagccacaggcaaaacacagagtccctgttcagatgtgggatccaagcaggtagcacaagctgagtacagcccatcaggctgagtgggaagagtgagcccagcaggccttggcaagactacaggcagaggtcacagcagccacagagatttccagctggtgaagcagcactgaaggagtcctgtaacagtatgttagtctacaaacttggtaaattctcattctctgttttctgtgacattttgattttaaaaattttattctccaatacatcgcaaggactggatatcttgccctctattttgaaagtatggtgtccaaattcataggagaaggcaagggtaggtgactcagaaggcacacacaccaaaaagagtcattggaggaacaacccaggaagccatagaagaatgttatcccaaactagatggaaaagttttgtttttatgtaatttagaaaaacattcttattatttatttgcttaaagtttgtcaccattttttcaaattttttttatagaatgccatcctatttaaactactatccacaacatgaaatatagttaccacaaacataaaaatagccaagtggtggaatggggaggagggaccctgaactgttgaccaggaggtggcctctggtaagcctcaccataccttgatgaaagagccctcaaaactctccatctcctttgactttaattctgtacaatcttctaatttagatactgatatagtttggatgtttgtccactccaaatctcatgtggaaatgtgattcccaatgttggaggtggggtctggtgggaggggaatggatcttggggacagattccttatgaatcgcttagcaccattccccttggtgataagtgagttcttgctcagttagctcatgtgagatctggttgtagagtctgggaccttccctcttctctcttttgatctctctctcaccatgtgacaatcactgctctccctttttcttttgccgtgattgtaagtttcctgaggccctcaccagaagcagttgctgaagtcatgcttgcatagcctgcagaaccatgagccaattaaacctctttcctttataagttacccagtcatggttattcctttatagtgctttatagtcctttatagtgactcataaatggcccaatacaggtacttagccttttggttaaaagataccaacacataggtgactagattgcagatcattggcattttgaattgttttttaagtacccatattactgtggtttacgccaaattgaatctattatgtagaaatatgcctataaaactactttcaaatttgtacaaatatcagtttctcaaagcgtatatatatatatatatgcatgcatgtgtatgtgtctgtttaaaatacacctgctggggattagcattgagctgaaagacaaggtcctgcccttgccctagaagagtttgcagtgtagatggagaccacctgacacctcacctgatccctgatagcaattccaggccaactttcctaagcactatgggaattcagactaagggccagatcaccgttgcctgagattccattgtgatgttagaattcacattctcattcttattcaatagaactgactcgttcaccagagcacctactatgttccaggtggtatcataagaacttgggagacatcactaaacaaaatagaaaaatccctgcccttatggagctgacattctagtgggggcttggtttttttccttgggtactgggtttgtttttccatgatgagcatatcctatgatgcactatagcactcaagcaagatgcctga

SEQ ID NO: 32190 - DNA, 2300 bp, Homo sapien
ccctagaactgggaaggaatgaatctgtgacccatttgtgaataagccaagtgaactgactttgtccatcctagaagaggatcaactgcttgagatggcaaatgacaatgcccttaaaagtatgtttgagacaacttcaaatctccatacattctggattaaagtcaaggtggaatatcctgagattgccacaaaagtactgaaaatcctgcttccatttccaatatcctatctttgtgaagtagggttttctgcagcgacagcaaccacaatgagattatggagtagactggacataagcaatatactgcaggtgtcactgcctcccatcacctgcacatgggactatctagttgcaggaaaacaagcttagggctctcactgattctacattatggtgagttgtataattatttaattatatataattaattatttaattatatataattaattatttaattatacatatataattatatataattaaatatatatttaattatataatatataaaaatatataattatttaattatatatatggcgagttgtataattatatattataaatgtaataataatagaaataaagtatacaataaatgtaaatgcacttgaattatccctaaagcatccccttatcccaatccacagaaaaatagtcttctatgaaattggtccctggtgccaaaaaggttgggggccattgcatgtgaggacacaatgagaaggcaactatcttcaagccaaggagagagtcctcagaaaaatatcaaacctgttgaaaccttgatcttggacttccagcctctagaactgtgagaaaataaattcctgttgtgtaagccacccagtctgtggcattttgttacagcagccctagcaaactaatatattcagcaattcttttttttttctaggacataaacatattttaatgtcctacttcctggggagaaatccttttaattatttttgtgtatttggaaataggggttgtattccaaattgtagtctaccataaagaactacctgaggctgggtaatttataaggaaaagaggtttaattgactcacaattctgcaggctgtacaggaagcatggctggaaagccacaggaaacttataatcatggtagaaggtgaaggggaaacaagcacatcttcacatggtgacaggagagagagagagtgaatggggaagtgccacacacttttacaccaccagatctcatgataattcactgtcatgagaagagcaagggggaaatccatccccatgacttaatcacctcacaccaggtacctcccccaacactgggaattacaattcaacttgggatttgggtggggacacagagccaaccataacagggatatattataataaaacgtactgagaggtacacaacagcaccctggaatattgctgccaaaaatggacctaatcataaggaaacatcagataaattcaaattgaggaattgttccagaataaacaagactaaagcaacatgacaactaaatgcaatacttgaatctgcattggatcctgaaacagttttatctatctatccatccatttatccacccataacggtaaaggatattattgggataattgtcataatttgaataaaatctatagattaggtattagcattacatcaccattaatttcctagttttgatagttgtattctgcttttataagagaattttcttgttcttaggaaatactggataatctgggcaaaaaaattctggaattctttagactcttctttcaacttttccatataagttttaagtttatttcaaagtatgaatgctataaaattaggaattcaaacaaaaataatcaaattgagaggtgtgtacatttaacaaaacagttatattaaatcaggttaaattttaagcatgctgaaaatttgctgagacctgggagtgtttgtttctgccagtgttagtttcaaagtgcatagtggcatattgaattttgtgtaatttccagtaacatagtgcaaggatgagtagccacacacatttagtgttgcaataatataaaaagcctcaggagcactccagccagcacaacaagtccccagggacagctaagcactccagtgtctagggactgtgggaaactggaaagaaacaatccagtgtaaatatgacttctaagctggctgttgctctactgctttcttggcagttgcatgctttctgtagcactgtgtgaaggtaggctcatctttctaatcaatagagttttcttttgtctaaatatgatt

SEQ ID NO: 32191 - DNA, 2300 bp, Homo sapien
caatccagtgtaaatatgacttctaagctggctgttgctctactgctttcttggcagttgcatgctttctgtagcactgtgtgaaggtaggctcatctttctaatcaatagagttttcttttgtctaaatatgattctccgaaagcaaggctatccaaaatgctttgagatttgcttattaaaacaaaaaaaaatccccatttgcattcatttgatgttgtcatgagtacaaaataacttttgtgggccttagacatttttacctttgtgggactcttcagccatcataatatcaatacttaaaatttttttatgtaacttagaatgcttcaacattttttctgttttaggtaaaatttaggggatttttatgggccctaaaaatttctttatttctgttgtgagaaaaaaataacactttcttagattctaaaacttcatgtttttcttccgactttaaaggcaattaaaacaatttcatgggcttctaaaattattgtgggccctaggcactatgcctactggccctaatgcataagttacccctaatttgcattaaatttggaattatttaggttctatctctatacctctcagaaaagtgtaatatttgcattgatgtagacatttagttgctaaaattcacaacttgtcctataacacatatatcactatatatacttatattcatttataatttatattatattccattggggggcacagttggttaatattgcctgttaaaattgaactaggtaaccacgtatttttactcagtgttctgctgacaaaggcttagacagtaatcattttctgcctgctttgaagagttttgatgggccctagaccatcttaagatcctgctatataacaaatagtgtgtttttagcatgcgttttctgtatttgctttttcgttttatcagcattaaaagtttttttttaaaaaaaatacaagtcatctctgtaaaatagtcatgtttctgtttattctttctgaaggtgatatatctgttgataagatcattgtttatctcctataaataacattatagcatcatgaagaatactgcaaaatcaaatagaagaatggccatatggatataaaatattaattttaataaatttatagttttatgtatttatatatttatatattagtttttatattgacattcaaaatagtcagtgagaatcattttgaaagaaaggaaattaatttcaagggttggtctaaaactagtctttctatttgtagcaacctgtttcgttaagacatttctcatggtcctaaaaatcatcatattcaaatttaaagggtatctagcagagttgtgccctttgatgaaagcagtccttacttccttgctatgttcactgcttccattgtgccaagtattagtacagtaccacaatgccagtgcatgaggacacattttatacctttgcatcccaaatttattaaagaactcagaattattcagagtggattatattataaaaattaagaaatcatgtaagtactttcaaaagttcttagttattttgcttctgtacatgtagactgtttaggtgctgagagtacaatggtaaacagaacagcaaaaaaaaaaaattctgtctttacaaataacatggtactgacatctggttagttttagctattgtgtctcccttgcttctgaattccagagcaatactttcattttttgatataagcaaattctaaaacacattgtggggaggtagataatctgacattttgcagagttaaagtaattagagaagcacaagaaagtttcgaaaatgataattaaatttgaaataggaattagcatgagtgaagcaactccaggtacatgttgattaacccaagtaatatgactccaggtatcctgggaattcctttcactgtgaaagctgcaatcagtggcctttggaaaagtaagtggggttcctgcagctcccagaaaattgtgaaaaaatcctgttgggatcatttccatttaccactgagccaaatgaccatgatttccaactgcaaagggatatctaaaaccagataagtaatttacctaagtagtctttttcactctttagtgtgaagcttattcatgaagagacctctgcctgaacatacagcaaatttaagaaggttgtgcagatagtctgaaggaggtgagttagtttttcccactttctcaaatttctcaaatttcatttgtcatgaaactaataggaaagattcacaaatgtcagtttaagagttttacctaatggaatctcacttttatttat

SEQ ID NO: 32192 - DNA, 2300 bp, Homo sapien
atgcaagtcttgtggagaataaacagagtcttgattctgataacactgcagaaaacataattttccaatgtgaataatattttttaatatggtatactttgtttccctcttcctgttgtaaagttctgtaggttttgacaaatgcatagtgtcacgtgtctaacattacagtatcatacaaaatagtttcactgtcctaaaaaccctctgtgctacacactattcaaacctccaccctatcttcttaacctttggcaaccactgatcttttaactgactctataattttgccttttatagaatgccatataataaaaatcatgcagtatgtagccttttcagactaccttccttcacttatcagtatgtatttaagattcatctacgtctttttatggcttggtagcttgctccttttcactgatgaataatatcccattgtatgaatatttcaccgcttatttaagaacatcttggtttctggagaatatgaataaagatgctataaacattcatatggtggtttattgcagacatattttaaaatcagttgggtaaatacataggaacatggttgctggattgcatggttaaatgatatttagctttgtaagaatctgccaaactgtcttccaaagtgactgaatcatttttttattcaccaacaatgaatgagagttcctgttgccacacatccttgccagcatttcgtattatcaattttttggacttcagcggttctaatgggagtgtagtggtatctcactgttgttttaatttgtatttccttaatgataaatgatattgaatatttttccattttttttgacctctgtatgccttttttggtgggtgttttcagatcttttgctcacttttaactgagttgcttttcttttttctttaattgttgagtttcaagagttcttcgtatattttgggtgtaagtcttgtaaaaatgttttgcgaatattttctcccagtatgtgatttgtttctttattaacagtgtcttttgcatggcagaagtttaaattgtttttttcttttatgaattgtgatttaagtgttttatctaaagtctcattgccaaacccaaggtcacctagattttttcctgtattttcttctaggctgcttatttgtgtcaaatggatttagatcagccaggaaagagtagggtatcccattcttattgatatgattttaaagagcatattttctgacagtctatgattttaaaaaacaagttttctcagtaaaagtgcagctatgaaagacgttgttctgactcaacagcagcagcctgaccttgggagaaaagttgtttcctgttaacttcccagctggttttatctgtgactgttttttgtgtgtctgtcttaatttgcaaaatgaatggacagtctaatgttttactttttcagagggagcagatattttgcttcctcaccacacaagctcaccacacaatgcagggttcttagcctgcatcgacttgatcataactcaggaaaagacagatattggtcaatatttccttccaaaagtggagatgataaagtagaagtatagaaatcctaaagtccagaccttccttgttcagccaggttttgctccttctccacacacctttgttcttttctccaacttccaaggaatctcacaaaggaagtgggaaacaatgaacctattacttctttcctgctttaaatccaattccacgtagtcacggagactgttgggcaggatctctggcttggtggaaagtggggcgtgctgcctaaagtgatagtttggaggccttctctgtgccgtcgctatgggaatgccagctatatgttggctgggtgcggggcccagtcgccaggccacactgcacgcttccacatcctcagagggcccgggacttgggtcctggccccgccccctgcggacccggcactctgtcagttccgtccccggtcctgggaaccgctctttaccccactctgcgtgtctgccggaacctggctgggaagcgctacttgctgccctgccagcccgggtgagggcggagccaggcctccagccgcgaggactggagtcgcgggaggtggagccccagtccggaagccggggatccgcggccatgacggtgccggtccgcggcttctcgctgctccgcggccgccttggccgagcgccggcgttgggcagaagcacagcaccctccgtaagggcaccgggagagcccgggagtgcgttccggggctttcggagcagcggtgtgaggtacgagggctgcgggcgccgggtgc

SEQ ID NO: 32193 - DNA, 2300 bp, Homo sapien
aaactccatcaaacattaattattgaaattctacttaaaaaagttctccactaaaaagtactgtaaatattccattattataggcatgtggccaaaatgtgaaaaaataatcaaagatactttttcaattaaggccctacacagctcagaaatggtgataaatctgttaatttaaaacagtcaatatcactgggataagagtttatcaaactcaaaggcaattttcagtgagaataacactaaggtgtaaatttcatggcaaaagaaaagatgtcagacttaaaccacattaactatgaagaactagacaactaatgtgtcattatatatataaaaaagatgactgtggatggggacaagtggggaggcagacagtggcaacctctggaagatggaatctcttctctctgctggtcctagaagagaaaagagacaccaataagcatcaacacactgtccgaattcctccccacccgagacccaccagtccacaggtgtttctcaaccttggggccaacctcaccttcagagatggtattcagtacaaagagggcgtcaaaacccccgccttatcttaacttgcctagtgccctctttaaaaaataaaaactatcaaaatatattactttttttataactataatctgcatcaagtggaactgaaagcagccgggctgaaattagtaactcttacagtgcatagggataatagctttccaaaacctttgcactcaactattttaaattataaagaggtcattatgtgtaacttaaaagttttgaattctacatgagttggtgtgtgtgtacaaagcaaggggctacaaccaaattttggggttgtaactgttgtttgtaatgacttccattcaatgtatgcaggtcatggagaagatggggagatggagttgtttacagcaagctgacagggaaattaatcaagttgtactatttgaaacaagttatcctcaccctgaaaagcacccctaaaacaactgaaattcaaaaaataatgatacaaacaagtaatttagagtgacggcaaataatttcctcaattctttaaaacaaatagaattctacagaatctgcttttcctaggtagtagatctagctggtagttccaaactaagtggaacattcttacccaacctactacagcttacacaactctgattcactgttattttctcacatatccttgtggaagacctagtcacaagaaattatgtccaaagcaaatcctataggaagtaatttttaaattcagacactcgagactaagatctaaatgtacacaatagggagttaactgatttaaattaaataaacagtatctaagtttccacgttaccagtcattgcttttctagggattgtgctgggcactggcggatacaaaaactcgagtgagacacaattttggacgtaaaatggcaatgaaagcgcatttctggaagccctgaaagtctgaaaacagaggctcttctggactcacaagctctgggtcaagaagatatattttcatcttgttaagacggattttgcaactaagactggtaaagcataagatagaagagtgcgtaccctgttgtatttgcatggttcttgccagcaaccaagacatgtaatgaatctaagtctcatcacctgacagaggtttagggagggagagccatacatgaaaagactgagaaatctggattgatatttggttttgtgaaaccataaataattttagagttggaaaagacttagacaacactattaacaaaggaattcagaaacgcaaacattagtaagtcatctgcacaacgcctactcctttatttacgaaacactaaaataaccaaagtaaaaacaaatgtttgaccaagccgaccacgtgtttttatactaccttttcttagtgcctcaaatgtcttcctaaatcaagtgcacctgctgcaaagatggaacattctggtgcgagagcccagagcagagcacgttttcgttccccaagctgaggcaactgcgactcgcccgcgcgaccggcaaggccacctcacagacaaggctgtcctcgacccagcccgccgccgcgcggccgcccacgagccttgggccccacgcgcgcgagcgccgcccgcgcccccgccgacctcccaccgccagcggctccgcacccggcgcccgcagccctcgtacctcacaccgctgctccgaaagccccggaacgcactcccgggctctcccggtgcccttacggagggtgctgtgcttctgcccaacgccggcgctcggccaaggcggccgcgg

SEQ ID NO: 32194 - DNA, 2300 bp, Homo sapien
tgtccagctgcccactaattttgtctcagtttcttcatctataaattagggttaatagtagccatttattcaataaatatttattgagtgcctctatggtccaggcactattatttgtactgtggatcagtgaaaaagaaaaagacagaaatttctgtccttttgagtagcagaggaggcggttaaaaaatatatataataaataaacaaatatatttactagatgttgatatgctatcggaaaaaggaagaagtagatcatggtaggagggataggatgttggaggacaggttgtatttttatctgaccgcctcccaacatattgttataaaaaattcaaacatacaggaaaactaaaagactggtacaatgaacactcatatgccttcaaactagattctgtagttgttaacattatgctatatttgttttgtcacatacctatccatttgttccttcacccgtccattttatttttgaagcatttaaaggtaagaacacttaatatacccctaaaactttagtgtatacatcattaaggttcattatttatgttatgtgaaatttacatgcattgaaatgtacacatcttatatgtattattccataagttttgaaaaatgcaaactctcatgtaatctaaacccctatcatattatggaacatttttgtcaactgagtttcttcatgccccttcccagacagtcgctatctctttcatcctcacactcaggtaaccactgttctgatttttttcgtatacatattccatttcaatatcttactttgtaaagtggctgtttaaaatgtttaaaatgttattttaaaatgttatttattaaaaatattatttatcttttaatgatttaactttgagtgcttttttttatatatctggttacaagttctttaactgataggtgttttgcaaatattttctcccagtctttggcttacctgtacattttcttaatggtgccttttgatgagcataagattttaatttttcttaagtttaattggtggtatttttattttatgctttatgtgttttgtgttatttttaagaaaccttttcttacacccagcatacaatgatattcttctaaattttcacctagaaactatataattttaacttttatgtttagatttctaattgatttctagttaatttttctgtgtagtatgaaatagtcatcatagtaagttttgccaccccaccccctacaatatagctgcctagctgttcaagtactatttgttgaaaacactttgctttcgcattgaattactatggcatttttgtggcattcacattctataagtgtgactctaaagctgggctctcttttcttgttccattgatctatttgtctgttcttatgcctgtatcacactgtctagattactgtagctttgtagcaagtcttgaagtcaggtattataaatcttctaactctgttttcaagattgctttggatattctaagtcctttaaatcttcatatacatttaagaatctaacaaaaaacgacataggattatgattgagatgattgcaatgactctataaatcagtttgggaattgacatcttaccatcattgagtcttccaatctatgaacatggtatgccttttatttatttacgtcatttgtcagcagtcttttgtagttcttattatagatgttattctcaaattttaaacaatttactcctaagcattttatgatttgtcagctattgtaaagagtatttgtaaaatttcatttttctgatagttactacttgtatcaggaattcaattgttttcttatattgactttgtaatcttgcttaattcactttattagttctattaattgttttataaatttttaagcatgctctgcataaacaactatgccatctgtgatcagagaattttacttattctattctgatctctatgcctctttatttttttgttatcttattacacccactaggcctgccaacaaagcattaactagaaattgtgggagtggaccttattcagatcttgagggaaaaggttcagtatttcactattaagtaggatgttaattgtaaagttttttataaatgcctgtatcagattggggacttaaagatttgcttctcctctggtgaaccacaggtacaatctctggtaagttatcttatccttagatgagcttcttggggtttgtttcctgtgtgtttgttcaggggtcattcagagatacagaatttgtatacaatgtatgggactcctttctgtggctttctcctttcct

SEQ ID NO: 32195 - DNA, 2300 bp, Homo sapien
tccttgaacttgtctttaaaatgggcatgatcatacctttcctacttttatccccagtaactatgaagattaaaaggaaattgatgtaaaggtaatataatcattgtaaagcactttttaaatgtagatagagtagttcacattattgctatatactgtatactacatagtaataggtagatctctcctggaaaaagatatatgttagatttaatacactgctgagatagcagagttacataaaaatgataaatgaattggttttctggatttttatgatcttcacttttttcatctactcatatggagctcttttccttttagattcaggttttatgaatctgctatacattttgtatgtccattcatctgtcttttaaactagtaatacttaaatatttaagacaaaccaaaatggtgatctgaattatgatctgagttgaagttggcatatgcaagaggacagatctgtaaccaccagtctctagttctggcttccagattttcagatgcttacatttcttctcaagtatttcagctggtgtgtgaactgaaatatttgttacagctttaatgttattttcagtgaatgggagcgcaaaaaatggtagatggcaacatacagtgtaattgaggcttattgtttggagaatggttcttaaaatctacaaagagtccttgttgagttctttttaatcagtagcccagcccatgcatatattagccagttttgaacttagaaataaactaatttgagtcctagctaaaaatagatactccaaatatagttgtttttcttttcatctataaagcttttcatttcattgtaaaaaatatccatgtcatgaagcttccgcgtgagtggtaggtgatttaaaaatgacttatcatcatcatcacctagattttttttaaaaaagaaccagtatttttaccctcatgtaataagttaaatatgtattcttttaaaagtttgactagaatctatatgatgatctccaagctatagagaaaatagatggaggccctgctaaaacattctagactgaatgcagttattaaaagtgaaaaactattgaatggagagactttccaaagactcagtttctatttgaatatgattcagatgaatacttttatatatttcaaggacttttgtaatctaattatggttaattagcttgacttaaggtagcagtagcacacttttagaatacaaaagatataaaacccaaggcatagctttctgaaaagtttgaacttggacttttataatgttttaaagaattatgtctaaatcgcattatataatggccgaataaacttttacatagaaaatatacttttagtatattaggcatatgggttaattgttaggttagtgataatttaaactactctgcatagagtaataggagcctattttatatttctatacttacttttaaaaaatgagatgattggcatcccatatttcatttgattactttattactcaggttgtgttctttttcttccatatagcaaatcatagtaatattttttatttcactgtgacaatgctttagagaaaagatgtgtgtgtgtgcgtgtgtgttttatattagattttttgttatgtcatttaagaggaagctaagaactcatgatgttatgactattcttaacactaacaaaccccttttaatctccaatattcgaagtatttaatagaagcctattaggagaactgtcttgtgtcatagaaatgtggattcaaaccctgtaaatatacaaacttactgaaacaaagacatgacacctggctattaccagatctcattggtattgtttaattcacaattttttttctttcaccggtccagccacttttggctctggaatagcatatactccaactgcagttcattacagccatcagtcaagagcactttggcttactattttggtggcaaataataataataataataataatgactttacaccttttttagagccgaattataagtgatgtggctttagattctcagatttcatttttcaggctaccaaataaataacaattttaaaattagacaaattttatttatttttcagaccacgttgatgagcgaacaatatgcaatggaattgccccagaaaaagatgtagatggatttcatattatcaatattggaagattgtgccttgatcagcattctctcatacctgccactgccagtgctgtttgggaaataataaaaagaacaggttggtaatttgtggtctgcaggacatggatgctaggtgctgagctg

SEQ ID NO: 32196 - DNA, 2300 bp, Homo sapien
tcattccttttgtctccgacctgctatttgccagtaaaaattatttgaaaaatatatatttttttattttttactttatacttttaaatgttcttatactttgattatctggttggtcagcttttaaacatttgttgattcctgttattacatattaggcagtcaacaaactttctcatctttgccctttctcattctaattttggtagttgcgttatttctgcatagtaaaagcaaagaccatttacatttgtctgcgttttagtctgttttgttctgctatagcagaatatcacagactgggtaatttataaagaatagaaatttatttctgaacagttacagaggttgaaagtccaagatcaaggtgccagcatctggtgagggccttcttactgcatcatctcatgatggaaggcagaatggaaagagagggcaagagcaagacagaagtgggctgaacttgttcatttagaaggaacccactcctgcaataacagcatgaatccattcatgagggcagaggactggtgtcctaatcacctgttaaaggttccacctcttaatattgttacaattgcaattccatttcaacataagtttgggagaggacaaacattcaaaccatagctgtttgttaccccaatcctcacacttttttaaagtcttgatcctataatcataatcaaaacttttagcagtccttttgctagtttcctcagacatactttgattaagtaaactgtgtcttttagcatgttccttaggaaagacttatgggaacaatatttcctgaattcttgcattttcaaaattgtttgcaacttttaatcttggaggcagatttgactggctataaaatcctttactctcatttttttacatgaatcatttgtagatacacaatgagataccatcatctcacaccacagtcagaatgactattattaaaaagtcaaaaaataacagattctggcgaggttgcagaggaaaaagaatgtttatacatcattggtgggagtgtaaattagttcaaccattgtggaaaacagcagggtaattcctcagagacctaaaaacagagctgccattcgacccagcaatcccattactgggtatacacccaaaggaatataaattgttctatcatagacacatgcaaacgttcattgcagcactattcacagtcacaaagatatgaaatcaacctaaatgcccattaatggtagactagataaagaaaatgtggtgtgtgtgtgtatatatacacacacactacatacacacacacacatacacacaccatggaatactatgcagctataaaaaagaatgagatcacatcctttacaggaacatggagctggaggccattatctttagcaaattaatacaggaacagaaatccaaatactgcatgctctcacttataagtaggagctaaatgatgagggcaaatggacacagagaggggaacaacagacactgaagcttaccggtgggtggaggttgggaggagggagggaattaggaaaactaattaatgggtactaggcttcatacttaagtgatgaaataatctgtacaataaaccctcgtgacatgagcttacctatatagcaaacctgcacatgtacccttgaacttaaaataaaacttaaaaacaaataaaaataaataaatatttttgtataatatttggtcataatgttcaacttttccatgacattttttgttgagtttattggtacattgctaagttcttaaattttttttgcctttgttttgccttttgttttggttctgacactttttaaatgtatctttctattgaatttttaaaaatttgcatatggtaaaatttactctttttggtgtgcagtttcattaatttagacaaatgcatgtagtcatctattaagttaattagtctaacaccactagaatcagaacagcttcatcactccccaaattcccctgggtttgctcttgcataatatccttttattgatgctgtgtcacatccatttttattactcatcattgaatgagttggattttttagatctactgtttacaggacacttctgctgggggttagaggaggtcctgtgcagccttctgactcctttattactttcacagagtcagattgctttcttctaaaatagcccctctatgtaagtgtgttcccacccactctaaactatactgggtcccggaaggctcttctgcctttatttctattctcactgccccaattaggaaagctatatttttttgcactttgggataaactt

SEQ ID NO: 32197 - DNA, 2300 bp, Homo sapien
tagtttgatagcaagtgataagaatttgacatgatttctagactgattctaaccattcttccctagaccagcctccgaagtacaaccaactattccagagagtttgctaaaaatatattggaaaatattacatccttgtatctggagaccatcttagttttgtattgagtttttaatcaagtacagcacttcatgagaattatacatttgttcccattcagattcttcttgatacttagaatccgtcattccaaaattacaacccagtaaccattctgtccaatttgatgtcatttgcaatatgggctatgtagctactggtatgttaaaaaacaaaacaaacaactacctttaaaaaaaatttttcctgagtccatggttcagctgatcagttattgtgaccttgactcactcatttctgatgaactttctggggcccgatcaagcatctgccatcactggttgttggcagggggctgatcagtctattatggcctcagctaaagtgactcagctttcctctatggttcttgtatccttcagtaggctagcttgagcttgttttcatggccatgacgtggttccaagagagataagaagcacacaagacctttgtaaggatcagtcccaccgctggcctagagtaaagcagaaaaaaggtgaaaatgcatctggaggagaacaaagataaaaccatcacaatgccaatgtgtccttccaaattattcattaaaaatttgaacatggtattgacaaatgcttttcacagaagacctcaatagaccttacaaatgcattggtcgacagttttctaatatgttatttagctacctatgactctaccaatagatgctttcatctaacctacatttttccattcataacagttcagtgaaaagttttctaaaatttgatgctgtaattaagaaattacctatcgttttctgaacacaaatgaccatcactgtattatttataatagcaaaatattagaaacactgcaggaatgaatacatttttatggtaatccatacaattaattagttcatatggctcctaattttcaaatgaaatgggaaaatgctcacattttaatttaatgacagagtggtaagatacatagtgagacacaacattaaggaaatacaggtttcatattttatatttaatatataaatattttgaaatccgagaaagaaatacactaaaaatactaatacttattttctttggatagtaagataacagtgatttttattttcatgttaaatttttatatattttccaaattttctacagtggatatataaagcgtcattatccaaaacagacaaatatttaaagtttttttccattttgtaattttcctgggaattaaaatcaagctcacactttcctctattttgaaaattttgccatttgttcattgccatttaatattctctgagatgttataataatcagagggagattgggatctttgccattagcatagtagctggactgtaataactattttatgaatatttttatcttgaacttttttctgcagctatactcaatgtatgtcttctttttctattggatgccaagaagaaacaggattttatgactatctggagcaatgcatagtacctatgtcagaaccaataaaaaagataagttctatatcacaggataggaaagcaagggaaaaatatatctcaaacattggtgactcttctgttacatcattatgagactaaggaagctatcctacagctatatctatgttgacactgaccatttgtttatagcctttaaactcttgctagcagtaaaaatcatgttacaaggtgacatttaagccacccgtaatgcttaaatggatagtacaggtgctagaatgtctctaacaatgcagtggataggcttttcctgcaagagatctagaatacgaatgtgagaacatcacctaccgacaccatgtccactagaagcattgtgatagaataataaagatgatcacagagtctttgattctcctcccattgagaagtggagtctctgttcctcctcgtgatctgagtggactgtgttacttcttgaccaatagtatatgacagaagtgacattatgctggtttcccagtccaagcattaagaggctggtaactaatacttcttgtctcctggaacactcactcttggaagccagctgccaagctgtgagaaaccaagccccatgaagagttcatgcatatgtgttccagttgacagccttagctatgctcccagccaatcacaagcatccactgcaac

SEQ ID NO: 32198 - DNA, 2300 bp, Homo sapien
tatgagccactgcacctggccaggattgaagtgctgactctaggcatgtcctttggcaagtcacttaattcttttgggcctcaatttgtcatttgtcatgtgagaatagaaataatgcctatttatttccttattctctgaagacagattcattgagtatttactagatgttaggcactggatttgtttgggccagggttactgaagaaagaattgagatgtgtagggaaacctgtaaagtgcaaaggactgcactagctacagttaagagtttttacaaagataatctttgtactttgatgtctcagtcttagaaataaactatttaatcccagcactttgggaggccaaggtgggtggatcatgaggtcaggagatcgagaccatcctggctaacacagtgaaaccccgtctctactaaaaatacaaaaacttagcagcgcctagtggcaggcacctgcagtcccagctactcgggaggctgaggcaggagaatggcatgaactcaggaggaggagcttgcagtgagctgagatcgcaccactgcactccagcctgagtgacagagtgagaaaacatctcaaaaaaaaaaaaaaagaaagtatttaatatgagtcctaacatctccctccagaaactacaaaaagaattgtgatggtttatttaatcttttgtaaatgatttctttttaaattctcagcaatggtgcaaagacgattgttcaatttataattcaaatgttatttgcctgggaaatatattatctagaaatcgacttagtaatcaacagttttttaaaaacctacaaaagtagaaatgcaaaatgtagacacatttaaagcgagccaagtactattatattattttaactttaaaatgatgactcctgtggcaagtgattgcccaagttataatgagttcaacaagcttgttcttgtgtgatttctaacaccacatttatatttgaatagtgaaagggctcctttctggtaaatctaatttgctgagtggacatgatgcaaaagataacctatcttgacttgaatatgtttttagggttttgaggtttcaagtttcaagaaaatacaaggaattgaaattccagacagaaagactcaatgcctcaggaagatatatttataaatcatttatattaatttggggcaagtgaaaatttctgtagttgtaaaatatagtagctgtaatgacatattttggcctttaaagtgccactttaataattacaactagatgaacttgagaaataatttgaatgttgtattaacttagaaactttctattcattggatgtatccaaactaaatgtcatcttaattttctcttaatggagaattttaatattattattattgctattatcattatgttggtactttactggttctctgtagcttaatcattgggatgcagatttaagcattgttgttcctggaatatggcagcccatttcatttactcagaaaaatgttaaatagcaggatgacagaaaggtgaatattatactattaaaaataattttatttacagcacttgtcatagtaacactaagaaacaaacactaaaatggaatatgaaacctctgtgttttcacaaatttaactgttctctgcaactaaattaacaaattatcttgatttgaaatggaacttatagtctgtaataaaaggtggtataaccaactatagtttcaggtatatttcttttagaaacaggttatgctgcttcctaatttgcagttatgtttgttgaactcccgtataggtttctagcatagtttgagctggtatagttctcttcacaccaatgggagcctttcctgaaattacattttgttcttgttgttttaagtacttttacatacatgattatgcccacaggtaacaggaaaccagtgtttcaaaagaaaacttgatcacattgctagataatacaggtatcctaaccaagtgcgtgagcgcccagaggctttctgctgctgccagaagtacatatttttttgattggtaagaactgccagatgacgcttcatgaaatataaatgcaacaaagactcagagagctcaataaaaaccttccacccgtcagtctagaaggataagagaaagaaagttaagcaactacaggaaatggctttgggagttccaatatcagtctatcttttattcaacggtaggtaatttccttttgttttgttaactttatatcagtgtaaaatgtgaatagaatttattttctctgcattagagagaagttggcttctaacagttgttctttatgac

SEQ ID NO: 32199 - DNA, 2300 bp, Homo sapien
aatatgtttctatttaatccaagtgtaatctgcattttataggccttgacaacttttgggtcacaataacagaaatatctcccgtcttttgctctttgctgggtagtcacctgaagtttttcttcccctttttcctcccagctttctctctccctccctttctttctttactcctgccttttttttttttttggataaattttaaaaacgtagaacagtccaaagatttatctactcaaaatttatatacccaccttgtaaattgtaaatttttaatatttgcttccagttctttttaacatatgaaattagataatatagataaaatacctaaacttatatagtatttttttcttactatgctctgttcaatgtgctttccatatattgaagtcataactccatatgtaactagtatattaaatcacctattagctaatccttataacaattttatgagttagttctactattatccccattttatgaatgaagaaactgaggtgaagagagcttacatagctttcccaaggttcatgtattgtaaatggtggcaccaagaaacccaagctttgtagcactggagtccctgcttttagtttctctcctattttaaaagtgatacatagtacttctccttaagacataaatatttaatgatattaatagttaactatatcttttacagtcattcttagtttttataattttgtaacatggtctctttttagtcaatatctttgttctttatttgaacaagacaagaatttagcacaccggaactcctttctaaattttccctccaatcttcctttattattgttgtctggtgtttaagtttcacattgttaatttgtaaatgttgtcacaaattaattttaatttctactcaattgacaaacacatatctctgacttccttgctcatcactgatacttgcatggtatttttttctcctgggttcttgtttcatcttgctgaaatacattcactggcagtcttcagtatcgtttagaggtgatatggtttgtctctgtctccctacccaaatctcatgttgaattgcagttctcaatgttgggggaaggacctggtggcaggtaattggatcatgggggtgcatgtcccccttgctgttctcatgatagtgagtgaattctcgtgggatctggtggtttaaaagtgtgtggcactcccacttctctgtctctctcatgccaccatgtaaagacatgcttgcttccccttcacccttccaccatgattgtaactttcctgaggcctccccaggcatgcctcttgtacagcctgtggaactgtgagttgattaaatctctttttataagttacccagtttcaggtaattctttacaccagtgtgagaatgaaccaatacaagagatattaaactcttagtcttttgtagatacagaatattataagctctacgttcttcaacttagactttgctgggaaggacaataggagtttacaagccctaaggatgagtttaatggggaaacttgaaaaaaattagaagacaactaccattagtctttggaaaggtaaacctctgattataacatagattatatagaaaaaagaaagtaagcaaacattaaccggtgaattactacaaaattacattaaatttattgtttgttttcttaggatctcactgtgtcactgcagtgggataatttaggaatcagagagactgaggggccggagaggatatatattatttattatttaggtgcactggcctagtcagattagcatccaaaaagactgagccccgaacaaagagtgaggttaccttttaagcatttcatggggcagcgggagatctttgcagggggaagcatattacagaagtgagaaacaaagaccgttattcaattgagacactcattacattatttctaacttttcaaggaaaaacatgttttacgacttgagtttatctgcctagtaaccttgcaactgcacagttagagaaacaggatcttcgcaatgcctgggaaagagagagataagactcacaagccacagacagaaaaacaggcgttaatttttaaaggactccacctctttttctttctcagggggaattgggtttttttacatacaactgagttttcgcttacacgttctttaatttcttttaattcctgtttcatcaccaggctggaatgtagtggtgcaataacagctcactgtagcctcgacctcctgggctcaagccatccccaacctcaccctcccgagtagctgggaccacaggcgtgtgccaccac

SEQ ID NO: 32200 - DNA, 2300 bp, Homo sapien
aacttgtgatctctaccaatgctccataaaactataacccatttctaatatcattttccttggttccatttcttcttttccaaaataagctattaagtgagaagtcactcaatgcctgctttcttgatagatttggaagctagacttaggaacccagcctacctctatcctactgttcattgattcatttaacttacaaatattgaccaactaccaagtaccaccatcttaagcatcaacgtttgcatataatggtaggtatttttagtgagcactaactcggtactaggcactctactaagcactttcattattttcctatgcgctggatactattattatccctgttttacgtatgaggaaattgagacagattaaataacttgtccaggaattcacacacagacagtttaaatcttaacccctgataacatgatgaagtatttgtttcttttttttttttttttgagacggagtttcgctctgtcgcccaggctggagtgcagtggcgcgatctcgactcactgcaagctccgcctcccgggttcacgccattctcctgcctcagcctcccgtgtagctgggactacaggcgcgcgccaccatgcccggctaatttttgtatttttagtagagacggggtttcactgtgttatccaggatggtctcgatctcctgacctcgtgatccgctcgtctcggcctcccaaagtgctgggattacaggcgtgagccaccgcgcccggccgaagtatttgtttctaacaagagcattctggacattaaagggccttagagtatgagagaaaaaagccagaaaaaaaaaaggaatagtaataataattttttaaaaagtagaaataaaaaggtaaggagttaacatccattagattccattttctattcaaatatgtatatttacatacagtactgctgaattgactcacagttcttaggtcctatagaggagtgcagtgaaaaggaagacaatttacacagtacagagctgaacataggacttacaaacaaaaaaaaagtcaaggaatacaaagtagctttcccaggtgtaaagtaccgggtctagaattctatgaggctagggagaagataaacgacaaaagctataagagatcagaatgaaaagagatccacaagcctaagaagcccaggcccttgaggagaaccatgaatttgagcaggatttcactaattcctttaaaaagtagccattgcctcaaagtacgactccatcagcataggcaggaaagtgggagtgaggaaaggcttagagttttccagcctggctggggtcagacaatttgcctggggaaatagtgggagctgaggttgaaaagaccgattggcttcacgtttgtggcaggccttgtccaaaaagcaataggaagtcgttgaaaggttttgtgcaggggagcgacaggattaaggcactacttagtaggaagtcatatcaaaagcagcaacctgacaaatggcaaatacgacagaaggaaaaaaaataacaggaattttcttcacaatgactcgactttgaggtaataaatgcctgagccacattggaagcaggggtctcagaaggaaggcgcagatgggaaaggcttttctgggcggtggcgtttcaatgcaaggagggcgcttgaatcactgacagacttcaagttaagggagttttcgtggctgaggttagtaagtcacacgcacagctctccaaaggcatgtatggggaacgccagccttggctaaaagactgattcaagttatgtccgtcaccctgagcaaccaaaaccacccactacagggcaggtgaccccacaaagcaaaccaagccatctggtccacgctccccacctcccggagggagatggaaaagtttcgggagtagtccccggccaatcggaaagacattttttcattcctcaaccactactctcaggtgctccagggagggaggatgacttcctgacggtcctcctgccgctcctccctcgggccaattatgaaactctgggcactcttgacctcaccccgttagggcccgggaggggctccctagtataaagttcgcagcaccagacagttgagctcacttgcctgatatttccagtgtcagagggacacagccaacgtggggtcccttctaggctgacagccgctctccagccactgccgcgagcccgtctgctcccgccctgcccgtgcactctccgcagccgccctccgccaagccccagcgcccgctcccatcgccgatgaccgcggggaggaggatggagatgctctgtg

SEQ ID NO: 32201 - DNA, 2300 bp, Homo sapien
aatatgaagttacttgtcaatcaaaaaaaaaaagaagaaaagagaagaacaggcctagaacagaaatgaagcctatgggagcataaaggtgcaacagtgtagaccaactgcgtgagctccaaacaaagtctccaaaagaatcttttgaaatctttgggcaagtctctcaatctctctgaatcacaattgcctcatccaccagaacagataacagtgcaggcccctacttcactttggaatgggcatgacacttttctagccttatttcccatacttggtcataccctcacatcaggtctttattccatgtaaaagatttgctgggaaggcctttgaggggcctcttcatctttccacagagctttccattaaacagaggcaaaattaaaccatgtcctttttttccatggcactctgaacccttctcatcatgtgatctattagaattacttatctatgtatctggcccacaccactgagctcctggtgaacctatactgctccccttcataaaatataaagcaggtggctcacacaaaatacactctcaacaaatgtggaatagaaggcatgattcatgattatttcattctactaaatgcatgatattatttggactacgcactgtgatataccattaaaaataagtgatttttaaaaaaaaatttccagaattaggacagatgcactgtgactcacgttattattattattattattattattattattattattattattttgagtcggagtcttgctctatcacccatgatggagtacagtggcatgaccttggctcactgcaacgtctgcctcccgggttcaagggagtctcctgcctcagcccacccgagtagctgggactacaggcgcgcgccatcacgcccagctaatttcctttgtatttttagtaaagatggggttttgccatcttggccaggctgctctcgaactcctgacctcaggtgatccacccgcctcggcttcccaaagtgctgggattacaggcatgagccactgcgcctggcctgacctacattcttaaaagggctgtgttactgaaacaatcaggaaagaatcatatctccaggtgaaggaaaatgaacaatgctttttctcttcctcaagtcaagaaaaatccagttctttagttgacagtacatccaagttagtcaaattaagtagcttcctgtctccgcttcattttatctacttgtcatgattaaatatcctactaggttgtaagtgggccctcaacgctgacctttttatcttgggatttgagaggcacagtctagagcactactcttcacctaaatgccagtatgccaccagtagaaattatcctttaggctaaatattgttcttcccagaaaccctcttttcaaggatcagtttaaacctaaattcatcagagaggaaaacagcagatttcagagtcagatgaagaattcatatccacctggctttgaacattatcggctgtgagatggtgtaggtaaaattttaagtgcataatttggcaataataaatcatcaataaatattaatgttgatgaggcccctgggccacataaagaaatagggagtgaggggatttgaaattctggccacttcacagaaatgggtgggaaggggctcttgattgagatagaagcccatcctacatgaagcaattcctcattgagttctctcgtcctttatccttgttggaaacatcaggcaaagtcactcttggtcttaaagtacttttacatctaaatacggaactcttctatttaatccctgtctgttgtagatgttaagtatacaaagaggttgtcagagtttgaaacatctggacttctgtcaggtactagctccggaactccagtcctgctcgccctcaaaaacggcttgcagctagaggtttaagttccacttcctctcagcgaatccttacgcacgagggaggcggggcgtgtgtcctccgcgcgtggttttcgggtagcaccttctggggcgccgcctgcctccacccacggccgggccttgacgtcatgggctgcggccccctcccggctgagcctataaagcggcaggtgcgcgccgccctacagacgttcgcacacctgggtgccagcgccccagaggtcccgggacagcccgaggcgccgcgcccgccgccccgagctccccaagccttcgagagcggcgcacactcccggtctccactcgctcttccaacacccgctcgttttggcggcagctcgtgtcccagagaccgagttgccccagagaccgagacgccgccgctg

SEQ ID NO: 32202 - DNA, 2300 bp, Homo sapien
ccatttcataaatgaagtgctcaggatagcaaagctggccagtacctttaagctgtaaaagagatgttatctcacatcatggccatgtatcagagagctgtgtgtatgcatgtatgtgcatatgcatatgtgtgtgtgtgtgtgtgtgtgtaaggagggatctttaagtagaacttcagagcaaacatttataaaagatacatatgtatttacatattataaaaatataaaatatttatatttataaaatatatataagtaaattatatgcatatatatctaataaatataaatctataataaatataaatatataatatatacttacatatcaaggatatataattttatatataaatctgatcctttatatatctatctgtacaaacacatacagacacacacatatcacagaagaagaaaatgtaaaaccaactgattgaaactcctctttccagaatgagtcatactacggcaagtaaacaggaatcttttgcatctttgtgaggctgtaacatgattaaatcacggagtatctcgcctttccttccctctggcttggcttggcatcttcaacttttttccttctcctgcaatccagggatgttcctttcttgctgaagctggcagtttggacttttgtgatgaaggatctggaggacatggaagcaaggggaaaaaggaaggggttggctagaggcaatcaaggggttttccagggagactgggtaagagaagcacagtagaaaggatgtgagagaagtgggaggaacaaaaaggtggggctaagaaatactctcctggcttaggtacccgtttcccataatgtgagaaatataattactttgaaattcctttttgctgttggagtgtgttttgagtggtgatatgttttggctctgtgttcccacccaaatctcatcttgtagctcccataattcccacgagttgtgggaggggcctggtgggagataactgaatcacgggttggagggagtggtctttcctgtgctcttctcgtgatagttaataagtctcacaacatctaatggctttaaaaacaggagtttgtctgcacaagctctctctttggctgatgccatctacataagatgtgacttgctcctccttgccttctgccatgattgtgaggcttccccaactacgcggaactgtgagttctccattaaacctcttccctttgtaaattgcccagtcttgggtttgtttttaacagcggcatgaaaatggataatacaaatggcaatgctgcttggtaaacaaaccacataattagtggctctgtaagtgtcacaaaagtttcagctctttgcaaggaaaatcaatgggcttactggaggaagtctcgagaattactttggaattgatccttttttccttggaagtcagcattaaggcatcattgacatgatgttacaaagactggaattgtactgcaggggcgcagattggaaatcccgtgaggatgggtctttacctattctgatagctgatatgttggaggagttacatacatctttttggaatgaatgaatattcattccaaaatattgagtaaataggagaatcagtgtattcaggatctgttttaggtcactgatccatactaattgagggcagtttctctatagaatggttctctggaccagtcctagggaaatatataagtttgttgagagagagaagcagcaaaatatgtggaagtttagagatgagaaaaaaaatgaaactatatgagaaaataagggtgttggtgatagaggtggattatttgccattcttatctataacgcatgacattcttaactggacgtaagagaaggagaagaaaatgcatgtatttggggtcatcaatctcatatgtaaaaacgaaataatactgtctttcctgtaacatgaggactaggagaaatggttgttgatgtaaataatttatgcagccaaaaaacacatgaaaaaatgctcatcatcactggccatcagagaaatgcaaatcaaaaccacaatgagataccatctcacaccagttagaatggcaatcattaaaaagtcaggaagcggaggaggagccaagatggccgaataggaacagctccggtctacagctcccagcgtgagcgacgcagaagacgggtgatttctgcatttccatctgaggtaccgggttcatctcaatagggagtgccagacagtgggcgcaggccagtgtgtgtgcgcaccgtgcgcaagccgaagcagggcgaggcattgcctcacctgggaagcgcaaggggtcaggg

SEQ ID NO: 32203 - DNA, 2300 bp, Homo sapien
acaagtttcaccttgtgactctggtgtaactttggtttatttttctcttagtaacagctcagcttgcaaatgaaagcactgagacgcaactcagttacatgtttgaggactcaggaaaatcaattcttaccttccactcttccaaatgtaatggttgtattccagctttaccatgccccataagcaaatgacttgagagagagaggtggttgggggctgggggagaaaaagaagaaggagaaggagagggaagaagaggaggaagaacagagagaaagaaagtgaggggaaaaaaaagaaacaaacaaaaaaagacaggaaaagtctcttaacattgaagagattggatatccagtgtcagaaaatttggattttcttgggagtacttattttatttatggtggtaaataaagccctcaaggaaggttattaatttatctgtcctatttagtatattaaattatactacttcatattctagtggcctgaaaaagttaatttaccacttgaatggcataaatgatgaatacttacaccaagtcctggaattttccaatgctcaacaaacatttagtactttttgtttaggtctcgcttttttttttttttattagtatctacgaaaaaggaaaacaaaattgtagcattctgttggggctaacaggacagctgttggctaggctaaatgccatcttggagtaagagatactttaacttagggcactggtgctgagagatggagagaatatcagaaaagaaaaatgcagggtggaagtgttgagagggagggagatgatgtcaaaatccattggcttccagtgtttctgctctttttagctggggtgcagtaaccttccatcttacaactttgggtttctttaaacttcatgcctgccctctctaccaatgttttatgagctgtcatgtgggactagaatgggattctgaaaattaagagctgatttttattccaccggatatatcagttgcctggggcagtaaaataatttagttttgaaatgaaatgttattcgtgggagacaagtgcacaacaatttacttaacttaaacagtaggatgaggaggaagaggcagacacccaaactacatttcatatgtaaaataaggcttacatgacttttggatgctatagaaataaaatttctgtactgaggggcataattatccacataaatcttatatgaggaacacagaccagtacaaaagcagctgtatcttttggttatcttggaggcaatatataaccacataaggtaaaattggatgctgcttgctttctctaaaagctgtgaggatgtctttctgttccagaaattgcttaatgcaagtaaatgaaaatatactgaatacatgagtaaattcataaacagaaatacaaatgaaatttctaaagtaggtcctggtgagccccaattttatgaattattagaagacaatgcacccagaaactaagacactagcttgaagacttttttcatttcttttctttttttttttttttttttttgttgctgatgttgttgttgttgttgtcgttgttttgaaacagtgtctcactcttgcgccttggctggagtgaagtggctcgatctaggctcattgaaggctccatctcccaagcttaagcgatcctccccacctcagcctcagggaatggatgggactgcaggtgcacaccaccatacccggctattaatttacttttgtattttttgtagagacgaggtttcgctatggcttcaagactttaaaaggcaacaatgactcttttgaaattgcctgcattatcaaatgcctgaagtcaaccacaatgaatggtgagtctggtttctccatgacactagcaatcctctgaaataaaggaagttagaattccagaacacgtttgggtctctgactcttcctcggtggcttccaggagtttaggtcagcctgcaggcccgaccggaacccccgacacccctccacgcggattctttacatctccctccctaccttgtttacgccctagggggtagggaaatgaacagtcagtcaggtgagacccagcagggggagtggtgagctggtccgagggcagcccgaatatgtccctgggtgtgggtatgggtgtggggcaatttgggtgggagcagcgtggaggctcccaggaccaagtcctgcgcctctttggcggggtgtgtgcaggaggaggggggataaataggaggctccctcctcccggcgacattcacggagccggccggcctcccgccctgggtgtttccctgccttgtagc

SEQ ID NO: 32204 - DNA, 2300 bp, Homo sapien
ctgaggagtaacctggatccatagcagactttgatgagcaaaaaataaaccattatcgcttaagcttgggagactttgggctggtttgttacagcagcataacctacactaccctggctattacaaccattgtatttccattgcctagcataagggctggcgtaaaataagtgattaaatatgctctgactaaattaattaataaattaaaatttttaatcagcaattaaaatgaactattttaatcaaagaaattatttcaactctatcctgcgtacaatagaaaagttttggaaattttcactgattagtgtgtaggggtcatgattctttgagtaccaaaccattatcttagatatcaaggttagagttgcacatgcttcgcactccagaaagactccttcaagttttgctgaatttcaattgaataaattttttctgtgaagtggtcttcaaaaacctatatttctgccatagagtcacttacttaacctgccctatttaaaggggctaatgcctgatagaatgtcgctgcataactccatctgtgtgtggtccctgcatccatgacaaccaaaacccagatgcagaaattgttcctaatcacatagattaccctagaaaccggaagggccttgaagtcaaaagcattcagagaacatgctgaacaaattgaatttgcagtttatctggccagggaggatggagaggggatgggcacttggtctgagtattttttgtttctcattccaacagaaattactagatttaccaaaacaaagagaaaaaaatatgatccaaatttaatctggttgtggaagtgtgagcaaaatctacaagtggtagtgtgatagagtcaggcagaggaattgaccatagataaggtgctcaggactcctagagtcagcttctggtatgtgagaaagaagtgagaacagagcccatggcatatgaagaagatattacagaaaaaagaaagctgccttccacgcaaatcatttctttacaaaggcttgttaactcctgcagtgccccagctctagtgactaggggaccaataggttcattaataacagaattgggagagaacctggcatctgctttgatcgaagtgtgagaattaagcaagcctaaagtgtagcaagagcagggagggaactgaatgaaaggtcagttctaatctgtaggctttggagaagctttgggctcttgagagggagtagagtacagaggctgagcggggtgcctgggcaggcatcttatcattacttgcgagttgtgtgaactcgggcaagttaaacttctctgtgcttctactttctcccctgaaaacgaggatataatctccaaggattgttgtgagaactaaatgacttggttgattcctgaacagcacgttgtccagtgcctagcacatagcaatcactcaggaaacgtcagcctttattatgggcctagtgcacaaactattcttaccagttatgcgaccttgagaacattgtcttctctgtgccttcattttctcacctgtaaaatggaataataataattcttagaaggattcatgaaacaacgcctagtagggtgtctggcttagttatccccccgacagtattttcttctagtaagaagctgaatgcagcggcagacatcctggttcgggccccaggaagctcagccgggtttaatgtggatgagggtttaatgatgtacacgcagaagtgttttgacaaatgaagaaggtcctcattcttggaacatgtgccggttctccgagggaactcctaaaatggcataaggtcacctttttaaaggctgtaagctcatgtaggaaaagctgagctagattcctaagggcagagatgtgctcacatttctttgcatccctagttcccagcacagtgcaaggcgctgcaaacatttgctgaacccagggtctcgtgtcttgactgtccagcagaggccgctctgggccggggctctcgggacctgagggctgagagaaggaaggccagggggtggcccagtcatcgccgcggggcccgggtgggaggggtttggcagcggcaggcgcggcggcggcggcggaggcggaggcggccccgggctcgggcggctgggatggagcagaagagcgcggagcaccggagggcacgcagctgacggagctgcgctgcgttcgcctcgtttgcctcgcgccctccactggagctgttcgcgcctcccggctcccaccgcagcccacccggcagaggagtcgctaccagcgcccagtgcgctctgtcagtccgcaaactcct

SEQ ID NO: 32205 - DNA, 2300 bp, Homo sapien
tgcttctttctgaagttattttattgttacaaagcatacaaatacataactcagtgccaaataaagggattctgaaagaaacagaaagcggtttcaaaactaagtgaatgaatatgagtgaaaggtaagtattatcacaggtattttctttttgcattgcaaaaacaaaacaaatccaatgtttagggcaaaaatcagggctccccaacagtagaccacaatcttgcagatgctcaggcaatcccagagccatgtggccctgttttcagctcatgctccttctgtccctgtagtttcatgggaaggtgatgtgggcagcactgctccactgagcattctcaggaatttcagtgtttttaccccttccctgctcagagacagggcgtgcatgttgtcaatatccttgctcatctttgcagacttacagccacaccctaactaccagtaacttcaaggagctacatatgaataataaaatatgtgtcacagaaaattattatgcttgtggctgtgaaagatgtcctctggttttggtaggagcagacaccatccagctaatcagtgctgcaggaagaatgtgtcccaataccttgaacttctcagaaaccttgaaaactttcttctagaaagaagagtctagactaggctgggaaaagattgggatcagaggtaaggtattaaaaggttaagccagctcctcattaaccccactagtgcaagtaggtgatggagtgtgcaattcagcaaagcaagactcagaatctcagagaggaaggagatctgaggacttgcctcaccctcatgctttattttcagataaacaaagtcagctcagaaacaaaaacatgactgtatttcatcaaatctaaaaagtgtcaactatcagacacttgttattttatgtagtcttaagagtgacacaaaatgctgttaataaaataggatatgccattgattgtgaaacacatctcatttttaaagtggtaaaagcaaaaacaaaagcttaaaaaaaaatctgatatgatttggctgtatccccactcaaaactcatcttgaattataactcccataatccccatgtgtcgtgagagggaccaggtgagaggtaattgaatcacagggtcaggtttttcccgtgctgttctcatgagagtgaataaatctcacaagatctcatggtttaataaagggcagctcccctgtacacactctcttgcttaccatcatgtaggacatgcctttgctccttcgccttctgccatgattgtgaggcctccctagccatgtggaactgtgagtccattaaacctctttttctttataaatacccagtcttggatatgtctttatttgccctgtgagaacagactaatacagtgtcttagaaggggtatcttgatgaaacatagtaagcaacttgcctccaaatgctcacttctcagtccttaggtctcctgttgttccccactatgctcatgcagcttcatttccaatgagaaacctaaaatccaggagtgaggaaactatctcaaagtcactgagtgaagaaggagcagagccaggactcatactaggcccctgattcctttgtgctggctcccacaactctatattgcctctcactctaaggtatttatctcttgctctggaaaacagagctaaattagtcagagaacatttgcctcctgattaggtttagcttatgataacataaaaattaaattgctgccctgaacacatgcaggcaggctggaagcagcctgggtagacatttaccagggtaagagagggtctctggatttgaaacatgctcggtaaaatctataaagcaggcaatccatgtgccaggcaattgaatagctatttatcacagttagattagatgttttactcaatctagacttactggaatatgggagagaggctgagaataattttattttctcacagacctggcccttccctctgccacacagctagagcactgggatttctccacaacatctgtgccactgcttaaatgatggaagtttgccatgtctgtaactaagagcctggcggctgacatgtgagccgtccagcctcacatggtccacaaccccctcaaacttgaaaagaaggacagagccacacaagaggacagctccttctgcagtgcctcctctggcctgactggtgaggtacaagttaggcatggaagagaattatctggaatgtcttatctggctggtgccccaggaaacctgagatactgtatacctcctgttcacatactaacacttctaaatttagcttaggg

SEQ ID NO: 32206 - DNA, 2300 bp, Homo sapien
ggtaaaggatttgatcttacctggagctgagacaaatttagagagctgagtgaaatacaggggtagaagaagcagtaggaagacccctgtgggctctcggtccccaaggaagtaacttccgactttgtcttacagaagtccttggggagggctgccagaggaaccgggaagaaaccacacagggaaggaaacttccagctgaactttgtaacaatttcgaccgaatgcaaagtttccccgacagaaatcaggggaggggttgaatcaggagtgcaatcacagcacagaagccatggtaggtggggagaggtgaaatctaaaagccctgcttgctttctcagctgggaggctggtagcctggggcagcttttcagccctgctcacccactgcctggaaataaacttggtgctgttgagggagcacagtgaaagtgaaaccagccttttgggctgagtgaggcctataactgccagctttcacccatttccctggtggcctgcatgacacagcagaggcagccataatcccccgggggcagaattccactggcctgagaaccacaccccccctcccccgcagtaactgcagtaagacccgcccaaggagagtctgaaattagacatgcttaaccctgcccccacctgatggtctttatctacctgccctgatagcccaagaaaaaggacttaacctcttgggagctctagggccccacctaccacctgatgctccctctactacctcagctaatgccctcttgaaagtgccacctcctgactggaggccaaccaacacaaaactactgcaataaacaaaactacaactaagaacgctcacagactctgtttcactcctctgccacctccaccagagcaggtgctggtgtctacagctgtgagacttaaagatggttcacatcacaggactctgtgtagacaatcctagtaccaggccagagcctggcaactctgctgggtggctagatccagaagagaaataacaatcattccagtttggctctcaggaagccacatccccagggaaaggaggagagcactacatcaaaagagcaccccatgggacagaagaatctgaacagcatcccttgagccccaaatatttcctctgacacagcctacccaaatgagaagtaaccagaaaaacaattctggtaatatgacaaaacaaggttctttaacacccccaaaagatcaccagcaatagatccaaaccaagatgaaatccctgaattgccagaaaaagaattcagacggtcaattattaagctaatcaaggaggaatcagagaaaggtgaagtccaacttaatgaaatcaaaacagtaatacaagatatgaagggaaaaatcatcagtgtaatagatagcataaataaaaagcaatcacaacatctagaagtaaaggacacacttagagaaatgtaaaatgcactggaaactctcagcaatagaatcaaacaagcagaagaaagaatgtcagagctcaaagacaaggtttttaaattaacctaatccaacaaagaaaaaaaacaaaaaaaattaaaaaatgaacaaagcctccaagaagtttggggttatgttaaatgaccaaacctgagaatactgggtgttcccatggaaaaagagaaatgtaaaagtttggaaaacatatttgagggaataatcaaggaaaacttccatgaccttgttagagatccagacatccaagtacaagaagctcaaagaaaatctgggaaatttatcacaaaaatatcatcacctaggcatagtcatcaggttatctaaagtcaagacaaaggaaagaatcttaacagccatgagttaaaagcactaattagataacctataaaggaaaacctatcaggttagcagcagatttctcagcagaaaccttacaagctaaaagggattgagtccctatcttcagcctcctaaacagaacaattatcagctgcatacaagaattctgtatgcagtgaaactaagcttcatttatgaagaaaatatactcttatttagataaacaaatgctgagagaattaaccactacaagctagaactacaagaactgatcaaaggagctctaaatcttgaaacaaattctcaaaatacaccaaaatagaacctcctcaaagtgtaaatctcacagaacctacaaaaaaaaaacaataaaaattaaagaaaaaaacacaagatattcaggcaacaaatagcatgatgaatagaatagtacctcacatcccaatactaatgttgaatgtaaatgtcctaaatgttccact

SEQ ID NO: 32207 - DNA, 2300 bp, Homo sapien
atttgttcatgttccttgtagattctgaatattagaccttcgtcagatgggtagattgcaaaaattttcccccattctgtagtttgcctgttcactctgatgatagtttctttgctatgcaggagctctttagcttaattagattccatttgtcaatttttgttttggttgcaacttcttttgaagttttcaccgtaaaatctttgcccatgcctatgtcctgaatggtattgcctaggttttcttctagggtttttatggttttggttacatagatatacacataccacagtgatatgctgcacatattaacccatcatctaggttccctcccctcaccccctaacccccaacaggccctggtgtgttaattgagttaatttttgtataaggtgtaaggaagcagttcagtttcagttttctgcatattctccatcagtcttgagtcatcttgttaataaatggagttcactctctggctgtctctcctacttcgaggctcagagaaccgtgagcaatgaaatggattgaagacccagtttccctgtttctccagggtgttaagtcttattaagccttagctaacatcagccttcatagtccctgcggcgcacctcacttctgcccagtggtgtcccagagaggagaaagtggagcaccacaaactcttgctaaagtgggttctttaatcagaaacaacccatcttcagttccgcagcaccttcaccacctttggagtggtggaaatcagaaggcactagtcctagtgttgggccagaaatgtcagacgctgcccagtgttctgaccatcccaaacccagtttccctgttccccaaggaaccttgcacatccttgagaaaattttcttatcagcactacctatgaacactagatgactgacaaatctgcctcagaaaagtccagtcacacctatttccatctacctgcaagttgtccccaggtgggggaataaaagcatcccatagatagtatttgaggagagcagagaatctagactattttgtaagaaattttcatagcaagatgcgactgcctcttgtaaaagacagaaatgacccccaagctaggttaaaccagagccccagagagactgctgctgagggaatcagctactgagggatgatagcagctgggcatgaatttgaaaagtgttacttgtgatggagtcacctgtagtgcaaagggccaacgtgggttcactattgttcaattctttctatggctttctctctagcctcacaagaggaaatcatgtataatcactgggtgaatgctggtataggatttagagtccacgtaaggaaaagaacaacttattttattgctatgatctagtcttcagtcttctcagaacatgaggatactacaaatagtgacagtcaaagatttctggaaagtgaatatttttttgttttgcttttttataagctacctctacagataaggtaacaaagtgagagaatttggagagagttttaaagaatgcgtgggagctggtattcattctgtgatatataatgttaatgtttacctactccaggagatacttcacgctgtcaattataacacaagagtatttttaaccttatttgccaaatgttcaacttatttgcctgggggtagccccttgtagtaggttgaattacagccccaaaaattatatattcacatcctaatacccagaccctgtgaatgtgacattatttggaaaagggtctttgcagatagcattatccaagtaaactctaaatccagtgacaagaagccttataaaaggaggagagaagacaaagagtggaaagccatgtgaagacagagattgttgtgatgcagccacaaccaaggaactcctggagccaccagaagctgggagaggaaaggaggggttctcccctagactttgcagattggatttcagactctggccatcaaaactgtgagaaaataaatttctactatttcaagccaccatgtttgtggccatttgttacagtagccaaaggaaacgaatacacccattatgacatcagcgttatgtttaacctcttattgtctgatgtacagtagagaattataatgaaggattgaaccaagagggtgactgggctgagtacacaggcaggtctgcccctaatccgagagatgacagaaaatcttttgttgttgttttatctacaatagagataccctcaggggactggaaattaagagaaatatctgtgtatagaacacaaatgagagtgaatttaaaatcaaaaacaatgccccaaatctgtat

SEQ ID NO: 32208 - DNA, 2300 bp, Homo sapien
ctttaagccccacccccaaatttctcggggtggggggaagaaggtggagattgaactaatcttcaacagcccatgatttaatcaaccatgtctaaataataaaacttccataaaaatcccaaacaatgggatttggagagctttgggttggtgaacacatcaaggtgctaggggaggatgctctcaagaggtcatggaaccgttctacccctgcttccccatactttatgaatctcttctgcttggctgcttctgctttgtatcctttataataaaccagtaaacatgagtaaactgctttcctgagttttatgagctgttctacaaagtattaaacctgtaggggagggaaatgtgagactccgaatttgaaattaagttgaacagaaatatgggtaacctggagacccaatactcatgactggcctctgaagtgagggtagtcttgtggaccgaaccacactgcaaacaaaattaaaattgaaaataaattgcagaaattgaaaataaagttataattactgagctgtttttattcacttctgactccaaatgtgtggactttttcctcacatcaaccaaatttctgatcctctgtgggtcttgtaaacaacacattgttggattttattttttcttcttatcatccaaaccaagagtacaatttacatttgttataactatgattatttagaactcattcttgccgttttatttcatgttttcacaattttttattttagccattctgaggtgtatagtgataactcgttgtggttttaatttgtattttcctgatgactaatgatgttgaacatctttgcatctatttatttgctttctgtatatattctttggtgaaatgtcccttcatgtcttttgcacatgttttagttggattttttaaattgttgaattttgagtgttctttatatattataggaactagtcattcatcagctatgttgtttgcagatattttttaccagtccgtagcttgccttttcttattcttaattaggtcttcccaagaacaaaagttttaaattttaatgaattacaatttactaattttttccttttatgaattatgcttttagtttcaagttgaagaacttgttgtctagccctaggttttcaaggattttctctttttttttcctaaaagttttatagttttagttttgtcttatgtttaagtcagtaatttatttttttgtgtaagatataagacttacatgagtggtggcccatgcctgtaatctcagcactttgagaggccaaggtgaggtgattgcttgaatccaggagttcaagatcagcctgggcaacatgacaaaatcccctctcaaaaaaaaaaaaaaaaaattagctgggagtgatggcatgctcatgtagtctcaggaggctgaggtgggagaatcgcttgagccctgaaggcagcggttgcagtgaggtgagattgcacaactgcactccagtctgggtgacagtctgggcatcccccatccaccataaaaagatataagacttacgttgtgatttactttttgcctatgaatgtccaattgctccagcaccatttgttgaaaatgctgcctttcctctattacattgcttttgcacctttgtaaaaagtcagttagacattatctactgcgttctttgttctgttgcattggtctatgtctatccctctgccaatactatacactcttgatcactgttgctatataataggtatcgatattaggtagactgattcctcattttctttttcaaaattgtttttagttattctacttcctttgcttctccatataatattataataatcttgtctatctacaaaagattttgctgggattttgatacaaattatattaaacttgtatatttatttggggagaatttactatgttgagtcttccaatctaacaatatggtatgtctccacatttgttcaggtcttctttattgtacagctgctccttaacttacgatggggttatatcctgataaactcatcataaattgaaaatataatatgttgacatagagctgctattacctgaagatggctgaataggaacagctccggtctacagctcccagcgtgagcgatgcagaagacgggtgatttctgcatttccatctgaggtaccgggttcatctcactagggagtgccagatagtgggcgcaggtcagtgggtgcgtgcaccgtgcgcgagccaaagcagggcgaggcattgcctcacttgggaagcgcaaggggtcagggagttccctttctgagtca

SEQ ID NO: 32209 - DNA, 2300 bp, Homo sapien
tatgttttggaagcatgctaattttcatgtatttccaagtgcaactatattgcttttttgaaaagcagtattaacaagtagatattttaaaatatgtacctcagaatatctgacctacagttccttttcttctctgtagtgtaagaatgcttatatcacttactagcataatgttggcaacttccaagttagtttatggattcttaccattggtactgcttttaagaataactttaaaacaggagaaatactgaatggtgtaacctaattagcacaacattctaagaaaattcagaaaatattttactatttctttttataattaagacatacatattttaaatctggatgtaggaattatgtcacaatcccaggccctttttcattatttaaaaaaaaatctaataaagtattacattatagtactgattctatctactgtaagaatttaattaagagaatggaggattggtgtaaagtgaagtgtaaatcgtacttgttcaagtataggaaattccagataaggcagaacagtataagtagcaacattgtagctgttgagagagagagagacagatagacattaattggaaagagactgtttgaaatcatttacttagcagtatagtaggttcgatagaatataagaataagaagttattgcagaaatataatattagctagaacttggcctaaatagtaaagtggtgaggaaaattgagatgaataatgaacatatatgatgtggtaatggtattaaggaaaaagaatgaggcagagtaaagatgactctgaagattttcagccccagcttaaggtacttgattagtagattgtaaattttttgaagataaaagattgagtttggtttttaaacttgagtttggggtgatggcaagctatgctaatggagatagccaggagtcaatagtatcttatagattacatttctatgatgttctggtttccaaagcatgtgtagtgtgtgtgcacacactaattcattgcatcctcacctcagcatttacattccatcaactcagagatgccactgatgatcagatatgttgtaattgtggggatgttaaaatgtatgtgtgaggtgcactttagaatcaaatgaaatatgtattaattttattttataaataagaaacgttaagactaaagtggtggctagtccaaaatctcaagggctggtaaatagcagagctaggattacagtctagatttttaaacttactattaagcttattattttgagggtttttctccccactatactgtcatctttcaaaaacttacatctatttttttgttatggttttttttgttatgttgtttttcagttatcttttattgtctatattactaagtggtcctgccatctattaagtgcttccgttaaaaacctgggagtcttccatggcacagtgctttcccttacctccttggatttaatcagacattacatcttgtcaaattaagaactctggctctgaagttagcctgctggagctccagtttaattctgcctcttattaatgtgtgactttggaagttccttagcttctctaggcctccactgctttaactgtaaaatggtataacaatcatagcctatttcatctaggattgtgagatttaattgatcttatacaggtactgtgctgaacatggcatgtagtaaatttcaataatatgaactattattaccaatattattagtaagttgagcttactaatttaggtcactggctttggagtaaaacatacataatatgcaaaggttccaaatcttattatctttggatcttgggtaagtgtcttgaattcctaagtcactttccttatttgtgaaatgaaggtaatctcaataatgtttattgacattttcattgtatcagataatatgccaagcctgaaatagtgtgagatttaaataactattaaaaaactcttcttacatataaaaagcatatattaatgttagctattatttttagtaagttggttttgttaatttttattattaatatttttatacctgacattttaatctagttaagcttttgttaatgtgaatttctcttttaaacagtgtattgaaaatgtgtcccgacagaattgtccaatatgtttggaggtaggcttaaaatattttttactttggaagtctcagctcttgaatttaaaatacttggatgtttatattgtcttcatacaagcactaacatttatttcatttacaggacattcacacatcccgtgttgttgctcatgtcttgccatgtggacat

SEQ ID NO: 32210 - DNA, 2300 bp, Homo sapien
atctctattaacttacttgcaaatatacctcattctctgccttcccttaggaagaactgacagtctatgtttctaaggccaactccttcacttgtgcactggatttcatcccctttggctactcagggacaatgcccttacagttttctcactctctcctgcattataaaacgttctcactctattgtatcatttcctagaatatacaaacatgctgtaatacttcctctcttaaagaggaaaaaatatggtgccagatctcccagcaaccacatcttttttttgctcccctttacagctaaaccccaagaataccctataagtgctattttcaattccactcctcccattctttcctaaattcactctaatcctgatctctccactaaaactcctcttgtcaagatcaccagtgacctcttccttgccaaatccaaagggcaattctcagttatcttactcaaacagctgcatttgacccagctgaccacatcctccttgaaatacttcacttggcctctggtatttaaggggggggggggggcgggggaaggcaaaaactgtttgacacctagggcgaagtatcttagtgctatgatacacagatctaattgtgtggtttatggggggcaccaagatgttaaattccgttttagacctcaagtttgaaagaataataatacatctcagtagaaattgaatcataaggatagcattcaatttccttacacaacacttggtggatgaccaacatttttaaggagcttcatccagttcagtggagcaatgttcgtcaagccatgacctatagaaaagagtttaggatgcacgtacaggcctgagacttgaacttgcttctaataatgaggcagtgaccagcaaggctgacttgtgaagtgaaagaacaaaaaataataatactcagattgacgatgatagtaacagtcatggtggtatatatttactactcatttacttcagggaatgcgccctgttaaacactatacacgccctttagtatataatcctcatacacttttatgaaacaggcgcgatcatctccattttacatacggggtagagaggagctagctaaaatcagttattaaagaggagagctaagatttggggatagggcggttgaggttccaaagctcaagttttctaagcaaaatttttgtactgtttcttgcaaggaaaatcaggaaacttcaattgaatacgtgccaatttaaaaaaaaatacagattaagaagttttctcagagtaacaatacatgcttattaggcactttcctatgcataatttcctatttaatggcaattacatgattgtcttcttttttgggacacacgttttctcctacgtctgaacatgtgcactgcctttaacatgaagctggcaggctataaaactttaccacaggagctgaaatcgtattcgggttctccacttgcttatttccattatctccacttccattatttcatcacacacctgaacggaaaaccccagtacaggcccggggctgcctcagtctacttcggcagcaaaagacgaataagcccactggcagagaccactgtgcaagcctaatcacttcccaagaagggttttgctttaaaggtacgaagcaggtaggaaaggtggggcttatcgccttgccaaaaacgttctcctcaagaagaacccagttccaggtggaaaaggtatcctgaaaatcaggttaacctcaaacttaaatccaagcctaaccacctgcccagcccgccccagcccaacctgacggaagcttgtcagggaagagtccatagaaggcgtcacctttaggagacatcctctgtcatagtgctcgcagccccgctgacctcgctcttgaccgctggcgccatcttcccgggccgtcgccgccatctcctccacctcccctcacattccaccgatccttcccccaggataaaaaccacgcccagagaagctgcgcctctctagcacacccctcccagccccagcggccactagcgacaatatggctcctaagcacgtgacccggggcagacggatttccggttcccggggctacgaggcggaagcgaaggcagacgcagtctccgtcgttgacgttagtcgcagtcttcgctgctaacggtaataactcttaggttgcctgttttcccccaatcgctacccgcccaaatctcagggcgtagttcggcgcgaggttggcggcagcggcgcggagacgctggttggccccagaggaaaggacgctcactgggcgcatcgttacctgtgacggg

SEQ ID NO: 32211 - DNA, 2300 bp, Homo sapien
atttactactcatttacttcagggaatgcgccctgttaaacactatacacgccctttagtatataatcctcatacacttttatgaaacaggcgcgatcatctccattttacatacggggtagagaggagctagctaaaatcagttattaaagaggagagctaagatttggggatagggcggttgaggttccaaagctcaagttttctaagcaaaatttttgtactgtttcttgcaaggaaaatcaggaaacttcaattgaatacgtgccaatttaaaaaaaaatacagattaagaagttttctcagagtaacaatacatgcttattaggcactttcctatgcataatttcctatttaatggcaattacatgattgtcttcttttttgggacacacgttttctcctacgtctgaacatgtgcactgcctttaacatgaagctggcaggctataaaactttaccacaggagctgaaatcgtattcgggttctccacttgcttatttccattatctccacttccattatttcatcacacacctgaacggaaaaccccagtacaggcccggggctgcctcagtctacttcggcagcaaaagacgaataagcccactggcagagaccactgtgcaagcctaatcacttcccaagaagggttttgctttaaaggtacgaagcaggtaggaaaggtggggcttatcgccttgccaaaaacgttctcctcaagaagaacccagttccaggtggaaaaggtatcctgaaaatcaggttaacctcaaacttaaatccaagcctaaccacctgcccagcccgccccagcccaacctgacggaagcttgtcagggaagagtccatagaaggcgtcacctttaggagacatcctctgtcatagtgctcgcagccccgctgacctcgctcttgaccgctggcgccatcttcccgggccgtcgccgccatctcctccacctcccctcacattccaccgatccttcccccaggataaaaaccacgcccagagaagctgcgcctctctagcacacccctcccagccccagcggccactagcgacaatatggctcctaagcacgtgacccggggcagacggatttccggttcccggggctacgaggcggaagcgaaggcagacgcagtctccgtcgttgacgttagtcgcagtcttcgctgctaacggtaataactcttaggttgcctgttttcccccaatcgctacccgcccaaatctcagggcgtagttcggcgcgaggttggcggcagcggcgcggagacgctggttggccccagaggaaaggacgctcactgggcgcatcgttacctgtgacgggtcctccctctctccctccggtggcggggagcctggagaaaggggcggagctcggcccgggccctgggctcagcgggtcccgcgcgctgctcttggacgccagggtgctcgctggcacctcgaagtgcttcttgcttcctccctttcccgtttacttgctgttctttcaaaatatgtactgacattcactattgccagtcaccagctaaaccgtgaggacaaaaagtaaggaaaaatagacacactccaccatgacctcatggaactaacaagactggtggaggaggaagacattaataagagcaatcactgcaataaatgtaagattacaacctggagaagtgctaggaagaagtgtgtgtcctgtgagagctaatattagagcagctctgacaatctgagtgtcagtgagggaaggcttccctggggaagcgatgcaagccgagggctgaaagatgggtaggagttagtgtgcaaaaggctttgtggcacaaagaacatggtacctgttagaaggtggaaggaaaatgtacaagccaacaaaattgaaatcatactcggggtacacagctaaatatgtttctccttattaaagagtcaaggccctggaaaatgatgtaagcaaagctgcaggtgttagaagaagatatttgtctttagctttctatcctgattttgtgtttcctaaaacaccgggaaagggaaaatattccccttcagctttccggttactaactcttaacattctaattttctttcagttttgttatgagttgctaaaatggtgaaatgctgctccgccattggatgtgcttctcgctgcttgccaaattcgaagttaaaaggactgacatttcacgtgtaagattttgctgtagttaagccaaatactttggccatgttataaaaagcaaaagacagttctacttaagtcttcaattttgaactttagttcccgag

SEQ ID NO: 32212 - DNA, 2300 bp, Homo sapien
agaaaagtttcaatggatatttagcatcttatagtaagatccacaattgaaggtatttattcatctatagatgataaaagaattatcacttgggccttttcctatctgaaatgatatccagaatttatcctcgataaaaagggccccttgtaattccattcttctgtcagcaccagaaaattgcttagtacagcatttaatacatagcaggtctacagatgcttagtgaatgaatgcagagaatagctgcagtgtggagttctggagatcagagctattttgagagatatgaaggcctaatagccatatcttactcaattttcaagctggttcaaatttttctaaaataaggtaggatatatatgctcagttttgatttattatatctaacaaaatagctaggagatctttctctaacacataggacagtgcctggcacaaaagcagcaaaataaacctttaacaagtgaacaactattaaatcttattactccttcacttactccttcatggctgtcaagagaatggctaaaatatgaaactaaaatcattttgatttatttgcaacacagctaaagatcccttggtcttaacttgtaatttgtattttttctctataacctatgcttgatctacttctaaatagagagggcaatatattcgagcaaagctccttcattcagattgtaaactacatgtaaacaacattgaatttctttggcggtgtgataaaatacaaagtaataatattagcaaaagttagccttatggtattttttgtaaaccagtctctgatatcttaaagtctctgatatcttaaaacttttaaactaaattataaacatgtaaaggtatcacattgtcacttcaaatttaacaaaaaggttatttaaaaaggactcgggaactaaagttcaaaattgaagacttaagtagaactgtcttttgctttttataacatggccaaagtatttggcttaactacagcaaaatcttacacgtgaaatgtcagtccttttaacttcgaatttggcaagcagcgagaagcacatccaatggcggagcagcatttcaccattttagcaactcataacaaaactgaaagaaaattagaatgttaagagttagtaaccggaaagctgaaggggaatattttccctttcccggtgttttaggaaacacaaaatcaggatagaaagctaaagacaaatatcttcttctaacacctgcagctttgcttacatcattttccagggccttgactctttaataaggagaaacatatttagctgtgtaccccgagtatgatttcaattttgttggcttgtacattttccttccaccttctaacaggtaccatgttctttgtgccacaaagccttttgcacactaactcctacccatctttcagccctcggcttgcatcgcttccccagggaagccttccctcactgacactcagattgtcagagctgctctaatattagctctcacaggacacacacttcttcctagcacttctccaggttgtaatcttacatttattgcagtgattgctcttattaatgtcttcctcctccaccagtcttgttagttccatgaggtcatggtggagtgtgtctatttttccttactttttgtcctcacggtttagctggtgactggcaatagtgaatgtcagtacatattttgaaagaacagcaagtaaacgggaaagggaggaagcaagaagcacttcgaggtgccagcgagcaccctggcgtccaagagcagcgcgcgggacccgctgagcccagggcccgggccgagctccgcccctttctccaggctccccgccaccggagggagagagggaggacccgtcacaggtaacgatgcgcccagtgagcgtcctttcctctggggccaaccagcgtctccgcgccgctgccgccaacctcgcgccgaactacgccctgagatttgggcgggtagcgattgggggaaaacaggcaacctaagagttattaccgttagcagcgaagactgcgactaacgtcaacgacggagactgcgtctgccttcgcttccgcctcgtagccccgggaaccggaaatccgtctgccccgggtcacgtgcttaggagccatattgtcgctagtggccgctggggctgggaggggtgtgctagagaggcgcagcttctctgggcgtggtttttatcctgggggaaggatcggtggaatgtgaggggaggtggaggagatggcggcgacggcccgggaagatggcgccagcggtcaagagcgaggtcagcgggg

SEQ ID NO: 32213 - DNA, 2300 bp, Homo sapien
tctataaaatgaaacaccaggcagtggctgaagtgattatgtgaatctaattctattggcattgtggtgtatttacaatgcaggggacaaagtagcatatgtgatactgacccgttgatgtaaaattacagactgtgtttgtctgcttcgttctcccatagccttcagtccttcccctctcttagcactcaaaacgctttattgttattcctgagttaatttttaatgtctcctaaactataagttccatgagagcaggaatcttatctttagccccagcaccttgaccagtgtctgacactgaataaataaaagtcaatacagaattattgaatgaatgggtagtctaaggaactcaatttgtcctggatgtttcctgattccttttcaaactgctgacaaatcatccatctgattatctgttctggaagtttgcctaggactaacatcaagcctgaggaactttccattttctatctgtgagtgtttgcatccttattcatttagactttcagtttgcacagcctctcttgttagattgtcagtccttcaaagacagggaccatgtttagtttgttctttttttttttttttttttttttccatgatacccaggaaaatgttctgcttaaagtggaggtctttccagtgattaactgatttggcaagtacagcctcctaagagaataaattatcagttgggattattataatttaatgacaatcacaaacactccctttcacaggccaggcactgtggttggagctgtatgtcaattatctccttgatatgaaaccaactaagtggccatcgaccaacgagtggataaagaaaatgtggtagaaatacaccatggaatactactcagccataaaaaaatgaaataatgtcttttgcagcaacttggatggagctggaggccattattccaagttaagtaactcaggaatggaaaaccaaatatcgtatgttctcacttatacgtgggagctgagctatgaggacacaaagacatacagaatgatataatggactttagaggctaggggtgggggaggttgggaaggaggtgagggataaaagactacatattgggtgcagtgtacactgctcgggtgacgagtgcactaaaatctcagagttcgccaccatagagtccatccatgtaacccaaaaccactcgtaccccaaaagattgaaatttaaaaaaaattttttttaaaagcatctccttaattcacaaattcctctgagggtagtaccacaagtcccattttacaggtgaggcccctgaggcttcagcaagtctcagggactcaccacagtcactcagctagtaagaaaaggaacaaagactggaattttacctgactccaaggtccatgttcttaatcacctgtgacaatcccctctcatatatccagcagctgatgaagtctttctctcaggaaaccaactggacatagacatgtcatgtccattttatatgcaatatggtgaatcaggaggagccgtgaaaggacgactcactaagttactctcccaatgtttatgtttgtttagacagtgaccatcatgaccactagggaagatcactttctgattctgctgccctcacctcctggacaaaagcagagcagagaagcagcataaaccctggttgggggcctaagaatgatccccaactctccactgcaaaccaccggggtcaggaagcctccgggtaatgccctctccctcttgtttcgctttttaagtaggtaagctgcacagagagaagcactgttgcatatttctggacagcttatttctcttgcagaggaagactgatatacacaactaaaaggcactaacatgggagaagatttgagagattagaaggatggtgaaggtgcggttgtccaaaatccccctctggggggagatgattgatatctggctgtcattccaagaagcttctggttgacaaatactgtctggtatttccttgctgatttcttaccctcacaccgcaagccctgatctctgtggtccactgtgcaaatgcaaattacctgaatcaggctgctggtgactcaccagctcccctttaaagcaacatcaggttcaacgcagtgactgctcagtagaagccatggctcgcagacactgcttctcctactggttactggtatgctggttggtggtaactgtggcagaaggtaagggttttgcttttattctactgtgggtccactaattaataagttgtaggaaaagacaaaactggctccatgattatacgttcccataaattgga

SEQ ID NO: 32214 - DNA, 2300 bp, Homo sapien
gaaaacctgcctctactaaaaaaagaaaaaaattagccaggcgtggtggtggggtcctgtaatcccagctacctgggaggctgagacaggagaatcgcttgaacccaggaagcagaggttgcagtgagccaagatcgtgctgctgcactccagcctgggcaacagagtgagactccgcctcagaagaaaagaaagaaaaaatagtaacacaatcctgtttctacataataccttctctattaacaatcctgtagatggccagaatgtgtaagtctttaataacctctgtcctctacaactggctttcaaactcagttcttactgaaattgtttttttttggtttgtttgttttctttttttcagtctcccaagtagctgggagtacaggcgttcacaaccatgcccagctaatttttgtattgttagtagagacagggtttcaccatgttggcctggctggtatcaaactcctgacctcaggtgatctgcccgccttggcctcccaaagtgctaggattacaggcatgagccaccgcatctggctgaaattgtttcctaaagcatcacttgttcgccaaatccagtattttcagtctttatcctttggttccctgtgagatataaatagattattgaagcttctaggcctcttgcatgaaggggccttaaaatgttatacggttgaatatgattataaagttgcaaaagtaaaatagttttgcgctcttgttcttaagcttcaggcccaacaaaactgaatctacccccatataaaagaagttcatcagattctcttatagcctatagaggtaccaaatgggacagggcttctcgcaacttggacacagctaaggacagagctaattgctacactaagagtcacatcttgaattgaccaaataattctattctttccataactaggcctcaggtctggttctcaatattacaggttcaggaactagattttaagcagtctgaccaaggtaattaaccactgggagattaatgcaaactaaccaaactcacaaaagactataaaaagaatgtctatttcttaatgtacaagaaggaatcaataccttaacattaatgattaataccttaatattgactagggtatatggtagacatttgtctatccaggacactctattccctaaatcaaagtagtttcgagaccaaaatgatcatgaacatttagttatcatgattgaaagtgttattttactggccttatggcctcctcgctgcctcagattctttgaaaatggggtaagctctgttcctgtgtgatttaagcctgtgcatgattctgacctaccagtcttgctcagtcgtggattgagctgcatttttgcatttaaggcaagttttatcgcaagccctaactccaccccatttggctgccatacgcgggtgttgtgcgtgtcctccagatccccagccatcccagcgctttcccattccactcatgccctctcttccccttcctccatctcagtgttttccctcactttcaatggccagactggccttcccaaggtccctcctaacgtcaggtctgtcatcacctaccttcttccaccttgcctcgcctactaatcatcacctcctaaactgtcaccgttatctcctacctggctcacactggccccaccgcccagaacagaaaggaagcatggaatcccggtcaggccgcgcctacgcgactcagggcgcccggcgcccgcccctgccccagcggcgatgctatgagggaaaccgtatcgcattttgcatagtcttcgcagtcctacataaccgccacctttacccttcgcgtgggcatcacaatcgcctcctcccgctggggaaggcagaaaggcgcctcctgacgagaaccaaggcgtgtggggacgcagggcctctgcgtgtcagggagcagaacctgggccgagccctaggtgaaggggcggggtggttggccctgagccaatcatggctcgtgacgactcggctcggccaatcagaagaagggaggcctggcgctctcggggcgggtgagaaaccgcccccccttgcagctccgcggccaacgccttcgcccaggggtagttggagcggtgcaggttcccaggctccaggtactgggcgccttacgagctgggaggtggtgcctctcacccagctaattgctctctagcccttggccttcacaggtgttggtgcctgccgtgaacgcattctgacctgggccgtatctgtctcccaagactttgtgcctatggttggggacagagtgaggtcgttgccttga

SEQ ID NO: 32215 - DNA, 2300 bp, Homo sapien
gttagtcagcagtagggcagataagtgaattgcggcaattagtacaatgggagtattctatagtttgcctgagggtatggactgtggaggcagattgcctgtgtttgaatcccagctccagtgaatagtagcagtgtagtcctgggtaagttacttgacctctccaagcctgttttctcatctataaaatgggcataaaaatagcaactactggccgggtgcggtggctcacgcctgtaatcccaacactttaggaggccaaggcgggcggatcacgaggtcaggtgtgttcgagaccagcctggccaacatagtgaaacctcgtctctactaaaaatataaaaattagttgggtgtggtggcatgcgcctgtagtcccagctactagggagcctgaggcaggagaaccgcttgaacccgggaggcggaggttgcagtgagccaagaccgtgccattgcactccagcctgggcgacacagagagactccatcttaaaaaaaaaaaaaaaaaaaaaatatatatatatatatatatatatgtacatacatatagcaactagctcatagggttactgtgaggctcagaaggctgtataattacaagaatgcctggtatataagcccagtatattaaaggacagccggcatgtaatgtattttgatgctttaaggaaaaacatcaggttgatttcattaaagtgatggtctgcccaaatattttgcatataacagtatctttaagcagtctaaaggtaaagatattgtagactttggaggccctaatgttggcattgcctctgccaatatttaaggtatttgacgtattgtcttaacatgccaaataccttaaaattgcccttacaggattgcgaagaaaactgatgagatgtacatgcttgcgtccaccatgtttagttcgtaagcattcattaatgtattttttcctttccgtttctttgaacacttcctcagtccttcattccaaaattcctgtgctatctcggtattctctgaaaacactgccagacctaagatgcaaagtggcttccttgactacaagatttggcttggctttgtccatgaaacaaggtcaccagtgtctcaccctgggggcaagtctgggcttagagctagaacaggactgtaatccttgtatttcaggccttcttttagctttagtatgtaaaatgctttagtatctactgatatttagccatgcctaaattcgtaacaaggacacaaagaaatagtcttttccccctctgtaaagcccacgtcatgttcttcctttactgcagggcctcttaatggggcttaaaacctaggatgggttaagtaaacaatgtaggtgagtttagtgtgcaaacagctgaaatcaccggctgcattttaagctcgtctacagcagcaacctgcagacacctattcagagagattactaaattccctccttcccattaataaaaaggaccagaatatcagtctacaaaagacactgcgttgctgcgaaccagctctcgcttgcgcgatcaggaagaagggcggcaaggctggagcctcgggaccggagaaaggcagcctgcttgtgacgtcaaatcagcggactcttatcttggctttaggccggttccggttccccggctttccgggcgcgagcgtgtgcgagcgcggcagcgtactgcgcgtgctccgcagagggacacgggaaggttgggtccggctctggaggagatgcgtgattggctgacgctgtgctcgggggttccctggccctttcggcaggggtaaaacaataagagggggcggtggcaaagggggcgggacgtccgtggtccttgtcgcacgtcgcagcgcctggcgcccgggaagaggtggttgtgaggcagacgaactcgcggctctccggcttccgaggcttccgagttgtcggaggaagggggcggcgagcaataagaacccgccgcacccggtcctcagcgactcttctgacctccgcgcgacgtacccgccgccgccgttggctggaggtgtgtacgggcgccgggaggggaggtcggtgtggtggtcggaaagggacattccattcgcgctccgcggcgcgaggcaatcgtccggtgtgtgagcccgggagccggaggtgtagcggcagagacattgttcttgccggctccctacggtgccgtgtgtgcgtgagagaagaccagtctttcctctaggtgaggggtgggaggccgcctgggaagggaggtgacccgcgagcgtcttgcgggcagagggctccgagtgcacaggtggggttg

SEQ ID NO: 32216 - DNA, 2300 bp, Homo sapien
cgcgcccggcctatatcagtggtttttaaagtgtggctcctagagcagcagtagcaccatcagctgagaacttgttagaagtgcaaattctcgggcctctgttgaatcagaaacttagggagtggggcccaactatctgttttaacaagccctacaggtgatttcggtgcacattaaggtctgagaaccactgctctagagaaagttctgcacctctgcaggatacatggtgaagaatatttataatagcattgcacggaagagctccaaaccggaaacacttgaaggttagtcagcagtagggcagataagtgaattgcggcaattagtacaatgggagtattctatagtttgcctgagggtatggactgtggaggcagattgcctgtgtttgaatcccagctccagtgaatagtagcagtgtagtcctgggtaagttacttgacctctccaagcctgttttctcatctataaaatgggcataaaaatagcaactactggccgggtgcggtggctcacgcctgtaatcccaacactttaggaggccaaggcgggcggatcacgaggtcaggtgtgttcgagaccagcctggccaacatagtgaaacctcgtctctactaaaaatataaaaattagttgggtgtggtggcatgcgcctgtagtcccagctactagggagcctgaggcaggagaaccgcttgaacccgggaggcggaggttgcagtgagccaagaccgtgccattgcactccagcctgggcgacacagagagactccatcttaaaaaaaaaaaaaaaaaaaaaatatatatatatatatatatatatgtacatacatatagcaactagctcatagggttactgtgaggctcagaaggctgtataattacaagaatgcctggtatataagcccagtatattaaaggacagccggcatgtaatgtattttgatgctttaaggaaaaacatcaggttgatttcattaaagtgatggtctgcccaaatattttgcatataacagtatctttaagcagtctaaaggtaaagatattgtagactttggaggccctaatgttggcattgcctctgccaatatttaaggtatttgacgtattgtcttaacatgccaaataccttaaaattgcccttacaggattgcgaagaaaactgatgagatgtacatgcttgcgtccaccatgtttagttcgtaagcattcattaatgtattttttcctttccgtttctttgaacacttcctcagtccttcattccaaaattcctgtgctatctcggtattctctgaaaacactgccagacctaagatgcaaagtggcttccttgactacaagatttggcttggctttgtccatgaaacaaggtcaccagtgtctcaccctgggggcaagtctgggcttagagctagaacaggactgtaatccttgtatttcaggccttcttttagctttagtatgtaaaatgctttagtatctactgatatttagccatgcctaaattcgtaacaaggacacaaagaaatagtcttttccccctctgtaaagcccacgtcatgttcttcctttactgcagggcctcttaatggggcttaaaacctaggatgggttaagtaaacaatgtaggtgagtttagtgtgcaaacagctgaaatcaccggctgcattttaagctcgtctacagcagcaacctgcagacacctattcagagagattactaaattccctccttcccattaataaaaaggaccagaatatcagtctacaaaagacactgcgttgctgcgaaccagctctcgcttgcgcgatcaggaagaagggcggcaaggctggagcctcgggaccggagaaaggcagcctgcttgtgacgtcaaatcagcggactcttatcttggctttaggccggttccggttccccggctttccgggcgcgagcgtgtgcgagcgcggcagcgtactgcgcgtgctccgcagagggacacgggaaggttgggtccggctctggaggagatgcgtgattggctgacgctgtgctcgggggttccctggccctttcggcaggggtaaaacaataagagggggcggtggcaaagggggcgggacgtccgtggtccttgtcgcacgtcgcagcgcctggcgcccgggaagaggtggttgtgaggcagacgaactcgcggctctccggcttccgaggcttccgagttgtcggaggaagggggcggcgagcaataagaacccgccgcacccggtcctcagcgactcttctgacctccgcgcgacgtacccgccgcc

SEQ ID NO: 32217 - DNA, 2300 bp, Homo sapien
tgagcctcattcctgatgatggggtagagtgagtttcagggacaaggtgaagtgaggttcagggaggggtgaggcttaggggcttaagtgaagttctttgcatgcatttcttagtaacaaaaatgctgagtaatttactggttactttttttaggctgcaacaaaatgctcccatggaaaatgtctacggtaaaatgtcaagtgtatagctttaaagcagaggacaatgcttagcgcacagtatttttggcagtatgaccccaccattctccaagttgcccaggcttaaaatgttggcactaggaaacacatagcttatgatgtcttccctacaatttcactttacagattaaaaaaagggaacctcctcttagtataatattcatatattctttcaataatttattcatttatccatcaatatcaccttttatgagacagtggtaagcaacagagatataaaatgaataacatagtcctgcccttaacagtttggtttagcaagcatttattcaatgtacaccatatacagtatcaataactgcaaagtgctaacatatagatgtgtacctacattttagggaaagctttcaagaatgatgtcagagttgagccttaaggaattagcaggagtttgcttgatgaagagaaaggaagggaagggcatatccaggtctgagaaaaatgcccagagtatgtgggggaggcaggagctgaaaaagtaggcaggagctaaatcataacaggcctgtatgacaaactaaggagtttgcactttattctggacagaatggggaacaactggaggattttaagaggaatgacatgaacagatgttttgttgttgttagtctcacccaaggatggactggagattggactggaaggaagccagggctgaatgcagacaaactaattaggaggctgttgctgtcatctcaatgagaaatgatgagaagaacataatctatgtcacaggcacagaggatggagagcagaacacctatttgagaaatattctataaatagaaatgataggacatgactattgattggacatgtgtgggtggaaagccagagtctaagattcttcccagcttcctctgtctagcttaggcaattatttggacagtggtactactgagcacggcacgcacacagtagaagcagcatattgactttttttctttaagggaggcagggaaagatgacgagttcaattttaaatgctgaatctgagacctgtggggaatccaaggggagaggtgcatgagtcagttagctaactagacctgtgctttttagcctcaagaaatttacaagactattccagaagcatgtgtactgacaacctcactgccaaaggaacaggcataccaattagagaaaatgacaatttttcatgttaaaaaaaaaaaaactgaaaacacaggggttgagagttaataacgaaacattatgttactcgccaaactgacacagcagaacaatgtatttctctagtaagctaaatgtagggtttgatgggtttcctcctgacgacacttgaaaatagaggtgtacctggtgtttagatctaggaattcctttcagcaggtttgaagagcaagagctgagaaatgcgccctccagtggcagtggaatgaggggtgtctagtaaccctttttaccaccaaacaaagccctgtaaagaaatgcaatttaccgggatcagaaagccacaatgctggtaccagtaaaccgtcaaaccaagcgaaccctctcaggcgccaggaagccttacctgtcacgttggccaaaggaaaatttcactttcgactcaacaaaataagacctcagatttgatagcttgcagtaagtcccgcttggcgacgattaaacaccctgcaagtcgaaacgcgtagtctaatcaaatcctctccagcctgcagggccgggcttccaccacgtgggtggctgcggccagcaggatcaatccgcgaagggtgggggtaggaggcgtgcccctgcggtgggaggcggggtctgcgcagtgggtggggcttcggcggaacctagctaagaggttcctctcgcctccgctccccttttgccttcaaccttcgagccgccacgtaatgccacgtccccgcgcatgcgcatcttggccgctgctggcggctgtttccgggcttagagggctggagtggccgccgagttggaggcggtggtggcagcagtaggagtgtgtagagtgcgggattggggcccaggccctgcggagggcgggggaagttgtcttcttttttttccggaggggc

SEQ ID NO: 32218 - DNA, 2300 bp, Homo sapien
atcatttatatgtttaccactctaatgtgtttatccacacagacttctccactgatatctatgttagtatttatccagcttcttacttggtatatgcacttggatttttataaggtatctcaaacttaatatgtccaaaactaaacttctgattctctgtatacttccagcttgcttctcccacagtgtttccaatctcagtaaatggcaaccctatccttctagttctttaggccaaaagcttggaatcactcttccttttctttccccacactcctctgtgcaacatgtcaacaaatcataatcctttgtaataaaaattatgacatctaaggtctaagccaccttcatgtgactcttttcttgattatgcctcctgacctgtctccctattttccttactcactgacagtgtgttctcagcatagcaaccagagtaatccttttaaaatgaaagtataaagcagtgaattcttttactgatataagagatgattaagagaaatatttcttggagtttctgaaggataaacccagcatatttaggtaattaatcaactggaaaacatttcatttctacttttggtctcttctttttcctctataaacaattagatgggattatgactgtcaatcttggattgctttgcttttcctgtcatctgctgggttttttccctcacatttagaaaagaattttctgagggataatgggtttgatcttgactttcagctccattggctgatagtcacttagtggagtactatatggaaaagtattctgacgctcagccaatgctgtgattaattagctgtgtctggtgtgagtgagagaatgggaagtagtatgtttgcatcactaatttgagtttataatataggcagatcttaagtagtttgctttggcagttgttgctttcatttttagtgatcttttttttttttttttacatagtacattgagacaacaaatactttaattaaaagacatttaaacattaaagacaaatgtaaaatcctttaaacaataagtgagaaattagatgtcaaattctgattttattgccaaagaattttgtaggatatgtatatgaaaaagatactgagaaatctggagtagattggtttaatttcataattaaattatttaacccagtaacactaacagtcagcaaggactatatgttcaatattgttttggggacaagggttttaagatacaacttatatacaataaaatttactctgaattgtagtctgagtttgggcagaagtatacagaagtgtcaccactaccacattctagatagactatttctatcccaaattgtttccttatgccctaatagaagagtaacctaaaaatgcccttgagaaaatatgagtatttaagtatcctttttttagatatcatatttaaacatttagccaataaaatgtatttaaatgaatttgaacattattttaaggatatagctttacataataattgtgatattgctaccagccacactgttccagtgttgaattgtttaccaggaaaattatcattcacgcttaactcttcaatgaaaggatattttaaaataacctactattaaattgaaattctttatttttgaatattacagaagaaaattccacaagacagagtgaagatttgggaagccaatttacagaaattttcattaagcagcaggaaaatgtcactcttctgttatctttattggaggtaaatagggaaccttgatgtttttgtcatcttaataagctgcttttgttgccttttggatgttattgaggaagtaacatgtatatacctttaaaggtagtaaagtttattgtattatagcaagagatccacatggatgtttcaagaactatgtaatcacttaaagtatgctaaacttccatgttttacttgtagtttctggtaaaagttattagtggaaaaaatgtttttctcgaaaatgtgaattacagatgttaaatattttgaattcttacattgcaggagtttgatttccatgtccgctggcctggtgtgaagcttcttacttctcttttaaaacaactagggcctcaggtgcaacaaattattttagtcagtcctatgggtaagtgacttatcttttttatattattttgattcaagcatgagtatcatttcctagagaaagggactgaaatggtgtgttagtaaattgttaataatttgagtcactatttgtatttttggtctgccagcatttttcacatggttgtatgttctaggtgtttcaagattgatggacttacta

SEQ ID NO: 32219 - DNA, 2300 bp, Homo sapien
tcaaacagtacataatgtgatcctctgcctctcttccccacttgtggatggcactctccccatgagtacccctagtgataactgccatctgtactcattaagacatttaaaaatgcataaacgttttaaaatgtagattctatttttattcaggtatgataaggccaacagatcaggggacaattgccatttaaaagatagcttattactcctcgttcccaagaggagaggtcacacctgcacagccacgggagagaacactgaggttggtcacaggcagaggacaggagaactgtggttttcgagggaaggaatgggtgaggcagggtaaggcggctaagcaggtggaggactagctagttggaatagtgtcagctgactcctgactgtagactgcactgagttgtctgatatatgatgtcagggtgattagggtagagagataacggccttgagtatgaaagtccaaaaaaggagggatttggtggtagggctctagattggttagtttgcatctcagggatcagctaatcccaggaggtgtagtctctccctggtcaacaaggccccaaaatgtcaaagcatcaatatggaaactagaaaatatgggtaataccacataaaaaaatatcttaggttattttccaacttttcctaatcacaaattatacagtaataaaaatccttatatagatttttgcatgggtgtataattctgtaagatacttagaagtataatttctagattaaaggatttacatattttaagtatgtaatttaataaattacaattaaaatttaatttaattcccccaaaatgaaacattttaacgatcccagcaatagtatatggagagggtcctttttctcatactctcagtaatacaggattttatcagtcttttagtcaacttggagaaagaatgttagcagtcagccactaacaaaaactaagctaatgtgaaaatgttaatatcagacaaaagagaatcaaatgcaaaaagaattttaaaaggcagagtgatatttaatttttatgtcaccctctaccaagacagttaaatgacaatacggcttcatgtgtaattacacagttgccgatggcaattttacatggtttaaatttaatatctaattatatagcttcaaaacgtgtaatgcaaagactcaaatacaaggagaatttgctaaatctgtacttgtcatagaaatcttcaaaatacctctttcaaagatggtcagatcaggaagaataaacaaagataaagaggatctgaattaatataattaacaaatttaggccgggtgtggaggctcacacctgtaatcccagcactttgggaggctgaggtgggcagatcacttgaggccaggagttggagaccagcctggccaacatggagaaaccctgtctctactaaaaatagaaagactagctggccatggcagcgggggtgcctgtaatcccagctactcgggatgctgaggcatgagaattgcctgaacccaggaggcagaggttacagtgagctgagattgtgccactgcactccagtctgggcgacagagcaagactgtctcaaaataataataataataataataataatgaacaaacttgacctactagatatagacaaacagaatatcactttctttgagaatttccatggtgcatttagtacctaccagaacacacacacgagcatcttagattaactgaaaaagtaagttgtccaagaatagtgattaaccacagattaggttatatcctaaggaaagtgtccatagaaagggcaggatatttcaagcaggctttgcaaacagaaaagccagccccaacaaagaatgcctcctatgtgtcttctgctgaggactccccttggactccagagcccctaggcccctgtgtcttgtcagcactctgctatttcagggctaaggagctcaggcttctcagatgtggcctgggaaacacagtcttctaatccaggagagtaagaagatttaggactgacgtgggtgctgttagagaaacccatctccttgggtatatgggagataccccgactatgcagtcgcccccttcaaatcttccttgggggcctgatctgactgacgtcagggggtgcctactccttcgaggcaagaagcctgaactttccttcctgtcactgtgaatacttggccagggctgtgaatgtcaccattgcttttcaggaagaagacatggcagactagggctgcaccttctttatgggctctgtaggtctgaaagaaatcagatcagcctgggatcc

SEQ ID NO: 32220 - DNA, 2300 bp, Homo sapien
cttccaccatggctcactcagatgacttgacaagaagcctcagttcctctctggctcttggtagaagctcagttcctcaacaaagggactttcttttttcttttttttcaattttatttacttcttttttggagacagggtctcactttgtcatttaggctggagtacagtggcgtgatcatagttcactgcagcctcaaattcctgggctcaagtaatcctcctacctcagcctaccaagtagctgggactaaagatacatgcccccatgcccggctaatttatttttatttgtttgtagagatggggtctcactgttgcccaggctggtctccaattcctgggctcaagcagtcctcctgcctgactctccaagtgctgagatttgtgtccagccacaaagggacattttcatagggcttcctcaggacatgacaatgggcttcctatagtgagcaattcaagagagcaaggagaaacccacagtgtcttttgtgacctagtcttggaagtcaaccaccagcaattctgattctattcattaaaccaagtgacctcagatgatcagccagccaacgtgctgggatgacaggcgtgaaccaccatgtctggcaagaaattttgtaattcctttaagtgttatccttaaaaacaagtgattgattataaaagttgtatttcttcatcctaaaattggtaaaaaataaaaaaaaaatgtgtttagtttctactatgcatttagtttttttttttttttttttttttttttttttttttttttttttttttgagacaaagttttgctcttgtcactcaggctagagtgcattggcacaatctcggctcactgcaacctctgcctcccaggttcaagaggttctcctgttcagcctcccaagtagctgggattacaccaccacgcccggctaatttttgtatttttagtagagacagggtttcaccatgttggccaggctggtctcaaacttctgacctcaggtgatccacccgcctcagccccccaaactgctgggattacaagcctaagccaccatgcccggccctttcatttagtttctactattcatgtacacatgtaccctgttttacccacagacaactgtgctaaccgttaagaatgtcccagccttactaagattttcctaagtttgtctcccagacattgggaactcaaaggtgaagaaacttaggtgtgaaggtggattgtggattcagacctccttacttggaggccagtgcagagacacaccagcagagtaacctcgggtacatggcttcacctctccaagcctcacactcctcatcagtaaagcgaggattagtggaacctacctgttggcttgttttgatgattaaatgagataatgtccgcgaaaaatatttagcagataaatgttcactaaattttgagctttaaaaaaatgttttaccagccaggcgcggtggctcacgcctgtaatcccagcactttgggaggctgaggccggtggatcaccttaggtcaggaattcgagactagtctggccaacatggtgaaaccctgtccctaccaaaaatacaaaaattagccaggtatggtggtggacgcctgtaatcccagctacttgagaggctgaggcaggagaatcgcttgaacccaggaggcggagttggcagtgagcggatatctcgccgccgcactccagcctgggcaatagagtgagactacatctcaaacaaacaaacaaacaagcaaacaaagtttaactgaaaagtctttcctgacaccttttcgctactgaaaatcttacagcccctcccggccgcagcctacactccttcggcccaagcaggtgcgctggaaccggcagttggtgagaagccggctgccggcagccccaacccttagcggccccgcggtcagggacctccaggcccgatggagagtcggggcgggctagtggatgcgcggcggggacgggaggtgtcgccgctccggcttgccggtgacaggggcgggcgggtcgtgcgcgggccccacctccagcgatcgcagcccagccccagctcctcctcctccacggcttacccgggctccgacagcggctgcaggtctccaagttgcggccgctggagcccgagccatgcggaccgcggaccgggaggcgcgcccggggcttccgtccctgctgctgctgctgctggccggggccgggctgtcagccgcctcgcccccagcagcgccgcgcttcaacgtgagcctggactcggtccccgagctgcgctggctgcccgtgctg

SEQ ID NO: 32221 - DNA, 2300 bp, Homo sapien
tatggaaccaaaaaagagcccacattgccaagacaatcctaagccaaaagaacaaagctggagtcacgctacctgacttcaaactatactacaaggctacagtaaccaaaacagcatggtactggtaccaaaacagagatagagaccaatggaacagaacagagccctcagatataataccacacatctataaccatctgttctttgacaaacctgacaaaaacaagaaatagggaaaggattccctatttaataaatggtgctgggaaaactggctagcatatgcagaaagctgaaactggatcccttcctgacaccttatacaaaaattaattcaagatggattaaagacttaaatgttaggcctaaaaccataaaaaccctagaagaaaacctaggcaataccattcaggacataggcatggacaaggacttcatatctaaaacaccaaaagcaatggcaacaaaagccaaaattgacaggtgggatctagttaaactaaagagcttctgcacagcaaaagaaactaccatcagagtgaacaggcaacctacagaatgggagaaaatttttgcaatctacccatctgacaaagggctaatatccagaatctacaaagaccttaaacaaatttacaagaaaaaaaccccatcaacaagtgggcaaaggatatgaacagatgcttctcaaaagaagacatttatgtagcctaaaggcacattaaaaaatgcttatcatcactggccatcagagaaatgcaaatcaaaaccacaatgagataccatctcataccagttagaatggcgatcattaaaaagtcaggaaacgataggtgctggagaggatgtggagaaataggaacacttttacactgttgatgggactgtaaactagttcaaccattgtggaagacagtgtggctattcctcaaggatctagaactagaaataccatttgacccagccatcccataactgggtatatacccgaaggattataaatcatgctgatgtaaagacacatgcacacatatgtttattgcagcactattcacaatagcaaagacttggaaccaacccaaatgtccaacaatgatagactggattaagaaaatgtggcacatatacgctatggaatactatgcagccataaaaaaggatgagttcatgtcctttgcagggacatggatgaagctggaaaccatcattcttagcaaactatcgcaaggacagaaaaccaaacaccacatgttctcactcacaggtgggaattgaacaatgagaacacttggacacaggatggggaacatcacacaccggggcctgtcgtggggtggcggtagtggggagggatagcattaggagatatacccaatgttaatgacgagttaatgggtgcagcacaccaacatgacacatgtatacatatgtaacaaacctgcacgttgtgcacatgtaccctataacttaaagcataataataataaaacagtgaaaaaaaagtctctcctctttaaaccattacagtggcaattaagtttcgacatgagttttagagggaacattcaaaccatagaaccctggaacgagtgatttattattgaagcactcttttttcctagggcaatttagtagcccttttggttgattaaaaaacacttaatgagtataatcactggtttaaggattgtctaatctgtcctgataagtaagtgatatgctgaacagcagctttttattttccttggaaaatattgcaggataatagccctaaagactttaacctttcttatttgagctagtcccatctcttcttagagttggcaagtaaatgcttctctgatttagtgtgccggacactgttccttattccaccagtagaggaaatggcagtaactggaataaaagccctctaaggctgcctacctgacattctctaacatgctgcagttttggagacctaagctatataaaactcaacgtgttttccttttgagttaatctttttaggaagtcttcctgtgttgaatcatgaaaaaattgctattcgggctcttttaaactttgtttttctttttctagaatcaatgctataaaggagataacagctcgatgtcctctggccatgactgaagaacttctccaagacctggctcagtataaaacacacaaggataagagtaagctgcatgttactctctacacaccaaagagtacagtgtgactcctttttacctcattgtactctatgggccagaatttctaattaaaagtattattttacagatgtaatgatgtct

SEQ ID NO: 32222 - DNA, 2300 bp, Homo sapien
gcaaggctgggcatggtggcccacacccataatctcagcactttgggaggctgaggtgggagaatcacttgaggccaggagttcaagaccagcctgggcaatgtagtgagaccttgtctctacacaaaaaaaaaaaaaattagctgggtgtggtggcacacaccttgtggtcctagctacttggcacgctgaggtgggaggactgcttgagcccagaagcttgaggctgcggtgagctaagatcgtaccactgtactccagcctgggcagctgagtgacagaccctgtctcagaaaaaaaaaaaaaaaaaaaaaaaaaaaaattcagggaaattgctaaaaggactaagaagcttcccctggcaaggtggtgacaatctgaacataaagtaattaaaataataatactaaaaaaaagttttaaagtacataaaaaggtagttataatgtcaatgaaatacatataacttgacttttattgatttgactaagtaggtaagaattactatatatggatattttatttcttccaaaaaaaatacaatgtttctatctgtgtaagcaggacagagtgaacaaaatcttgggaatgattcaaaaagtcttggaaaaatagcaaatacaccaggtagaaagatagcccagtggctgataagaattgttggttatcccaataaccaattaaaaagagcttcttccagtgtgttcaatgcttcctctaaagagcaatgctaactatacagacgcaatcctttatctcctagtaaaggaaatctctattattattattattttttttttttgagacagaggctggagtgcaatggcgcgatctcggctcactgcaacctccgcctcccaggttcaagcaattctcctgactgagcctcccaagtagctgggattacaggcacgcaccaccatgcccggcttattttgtatttttagtagagacagggtttctccatgtaggtcaggctggtctcgaactcccgacctcaggtgatcctcctgcctcggcctcccaaagtgctgggattacaggcgtgagccaccgcgcctggcggaaatctttattattttttaaaaacctactaatcatcataaagcactataaagaaatatacatacacatttttttccatttaaaaaaaaatttagaggtgggatcttgctatgttgcctaggctgcagtgtagtggctattcacaggcatgctcataccacacctcagcctcaaactcctgacctcaagcaatcctcctgcctcagcctcccaagaagccgggactacaggtgcacctggcatatatattaatttaataatgcccacagaccagtttggtggggtactgccaggaaaataaaacttaaagaaatcctaattacttggaaagccattaagtctctatactcaaaatatcaaatctctatgacctacaaggacttcaagagtaacatgacataggtaaaagcctttagactaggggttcaagtttggagtcccttgggctatactgccaggtcccatgtaccagctgagtatcaatcagttgacaacccagggcctgaaaccttggcttgtctgagacagtattctttttctttttggcctaatcaaattactaaaatcctaaagtagtataaaaatgatagaaatacaaaaaacctgagaaagtctaaaagaaaacaaatattcatctaaagacttggcatttctacaagttgtgctataggatattagtacgttttgtgatcatatttgcgtacttatctgctgtaaagaggtttgaaaagcagatgtattaaatttggaaatgtcttagtccctagaagcagagactgatttattacaagtgatttgttgggggtatgatctcagaaaggaagtgaaggaaggaggatagtgcagagacacgcaaagcaaagcaaggatgtgcccttgactggagactagctttagtcccaacacaggaaaacactggagcacatcctgcattggagtcagagccaccctgaggtaatgggctgggcttttgtaccacatgataatgggctgtgggctactagggtaggaggacacctcccaggcactaggactccgatttagctgaggacaatgttgcagagaaagggcagctgagggccaccagcagctgacattcacaacaagtggggcaaacaggtacaccggcctcgtgaagggaatgtcagccaggactcaaccccaaccactaaaaggacaatgatgaaatgctcaaactgactgtctaatgggtaagtttactaatttaaggcatt

SEQ ID NO: 32223 - DNA, 2300 bp, Homo sapien
gtcattagagaaatgcaaatcaaaactacaatgagataccatctcacgccagttagaatggcaatcattaaaaagtcaggaaacagcagatgctggagaggatgtggagaaataggaactcttttacactgttggtgggagtgtaaattagtttaaccattgtggaagacagtgtggcaattcctcaaggatctagaaccagaaataccatttgacccagccatcccattactgggtatatacccaaaggattataaatcattctactgtaaatacacatgtacacatatgtttattgcagcactattcacaatagcaaagactttgaaccaacccaaatgcccatcaatgatagactagataaagaaaatatggcacatatataccatggaatactatgcagccataaaaaaggatgagttcatgtccttgcagggacatggatgaagctggaaaccatcattttcagaaaactatcacaaggacagaaaaccaaacaccgcatgttctcactcataagtgggagttgaacagtgaggacacatggatacaggaaggggaacatcacacattggggcctgttggggtggggggctaggggagggatagcattaggagaaatacctaatgtggatgacaggttgatgggtgcagcaaaccaccatggcacatgtatacctgtgtaacaaacctgcacattctgcacatgtataccagaacttaaaagtataatttttaaaaaggggtggcagtgggggggtgggattttgactggagagcttcatgtacttgagatataatttatatttctgccctgttatttttctgctgatttgagtgctctgcatacatggatatggtagtaggggtcatttatttttatttttattttgtgagacagggcctccgtgttgcctaggctggagtgcagtggcatgatcatagctcactgcagtctcaacctccctgggctcaagtgatcatcccatttcagcctgttgagtagctggaattacaggtgcacgccaccacaccctgctaatttttgtattttttgtagagacaaggtctccctgtgttacccagtttggtctcgaactcctgggctcaagtgatcctcccactttggcctcccaaagtgctgggattacaagtgtgagccactacacccagcagtcgggatcatttagatagtaactggcagaacagggctacaatctgaatttgggattcatgcttctctgttcttacaccatgctgcctaaacttgtagtgataattccaaggaaaagttctttagattatctgtgatgtgctcaggtctttaaaaagcgcactttgaagaatgcagataaggcaaaaggagtgtttttatatacttttgcattatctttttctccatgtgatcgtcaacagtttctactaagaatttctctactgaatgtctgtactgagaaagtcatgtaatacaatgtgacaaacttaaattttatttttctgcagtttctacagcagtataatcactacaaatccaatgtggagattttcaaattgcaaccaaataaacccagcaaagaactagcagagctggtgatgtttatggcacaggtaagaatataattgcttaaataaagaccagtattaacacacagtttgctgaatgttttttcactaatactcaaccttattccactctggaatgggaacttaattaaaatatttttctaactttccctttttgcaaattttattttctccctatcatgagttagagaatgtcactagatctttttgcataactaaccaggacaaaactttaagactattttttttcttcaaattcatcataaaagcaggtactaaatcatgccataaatattactaagactagagaaaccatgataaatgttggagaaattaacatgtagaaggaaaagaaggttgtttggaaccatctacttctatgaaacatagccttttactctcgttttgcagaacatcctaaatgtatgcatctgaattataggagagaaagagagcaacttcagaagagcctttgctttgttacagattagtcactgctacccagagtacctaagtaattttcctcaagaggtgaaagatcttctctcctgcaatcataccgtattggatccagatctgcgaatggtaggaccagtagttggatgaataaattgtgctgtgttcatgtgtgctgcgttcatatatatttaaatgagaacagcctctaagctaattatcttcagaaaacgtaaattataatgtattatcctttccta

SEQ ID NO: 32224 - DNA, 2300 bp, Homo sapien
ttgacaaacctgacaaaaacaagcaatggggaaaggattccctatttaataaaacgtgttgggaaaactggctagccatatgcagaaagctgaaactggaccccttccttacaccttgtacaaaaattaaatcaagatggattaaagacttaaacaagagtcctaaaaccataaaaaccctagaagaaaacctaggcaataccattcaggacataggcccgggcaagacttaatgactaaaacaccaaaagcaatggcaacaaaagccaaaattgacaaatgggatctaattaaactaaagagcttctgcacagcaaaagaaactattatcagagtgaataagcaacctacagaatgggagaaaatttttgcaatctatccatctgacaaagggctaatagccagaatctacaaggaacttaaacaaatttacaagaaaaaaaaaaccccatcaaaaagtgggcaaaggatatgaacagacatttctcaaaagaagacatttatgcggccaacaaacagtgaaaaaaagctcatcagcactggtcattagagaaatgcaaatcaaaactacaatgagataccatctcacgccagttagaatggcaatcattaaaaagtcaggaaacagcagatgctggagaggatgtggagaaataggaactcttttacactgttggtgggagtgtaaattagtttaaccattgtggaagacagtgtggcaattcctcaaggatctagaaccagaaataccatttgacccagccatcccattactgggtatatacccaaaggattataaatcattctactgtaaatacacatgtacacatatgtttattgcagcactattcacaatagcaaagactttgaaccaacccaaatgcccatcaatgatagactagataaagaaaatatggcacatatataccatggaatactatgcagccataaaaaaggatgagttcatgtccttgcagggacatggatgaagctggaaaccatcattttcagaaaactatcacaaggacagaaaaccaaacaccgcatgttctcactcataagtgggagttgaacagtgaggacacatggatacaggaaggggaacatcacacattggggcctgttggggtggggggctaggggagggatagcattaggagaaatacctaatgtggatgacaggttgatgggtgcagcaaaccaccatggcacatgtatacctgtgtaacaaacctgcacattctgcacatgtataccagaacttaaaagtataatttttaaaaaggggtggcagtgggggggtgggattttgactggagagcttcatgtacttgagatataatttatatttctgccctgttatttttctgctgatttgagtgctctgcatacatggatatggtagtaggggtcatttatttttatttttattttgtgagacagggcctccgtgttgcctaggctggagtgcagtggcatgatcatagctcactgcagtctcaacctccctgggctcaagtgatcatcccatttcagcctgttgagtagctggaattacaggtgcacgccaccacaccctgctaatttttgtattttttgtagagacaaggtctccctgtgttacccagtttggtctcgaactcctgggctcaagtgatcctcccactttggcctcccaaagtgctgggattacaagtgtgagccactacacccagcagtcgggatcatttagatagtaactggcagaacagggctacaatctgaatttgggattcatgcttctctgttcttacaccatgctgcctaaacttgtagtgataattccaaggaaaagttctttagattatctgtgatgtgctcaggtctttaaaaagcgcactttgaagaatgcagataaggcaaaaggagtgtttttatatacttttgcattatctttttctccatgtgatcgtcaacagtttctactaagaatttctctactgaatgtctgtactgagaaagtcatgtaatacaatgtgacaaacttaaattttatttttctgcagtttctacagcagtataatcactacaaatccaatgtggagattttcaaattgcaaccaaataaacccagcaaagaactagcagagctggtgatgtttatggcacaggtaagaatataattgcttaaataaagaccagtattaacacacagtttgctgaatgttttttcactaatactcaaccttattccactctggaatgggaacttaattaaaatatttttctaactttccctttttgcaaattttattttctcc

SEQ ID NO: 32225 - DNA, 2300 bp, Homo sapien
attcagttagccactcttagtcttagagttctcatttatcaaaaacaaatcctgccttccatgctgctggaggtaaaatgaactgacctatatgccctccttagaatagcaattaaagcctttcatatcaggacaatataaccttctcagctctttccctgctgcaccctgccctcccagcctttagtcacaccaaacttatggctattgtttcaatacaccagacattttcaagtacctgtacgcagtcttttttcttttttttttttttttgagacagggtctcactgtattgcccaggctggtgtgcagtgcttcactgcaaccttaacctcctgggctcaagcaacccttttgcttcagcctcctcagtagcttggaccacaagcctgtgccaccatgcctggctgatttttcaactttttggtagagatggggtctcactatattgcccaggctagtcttgaactacccagctcaagtggttctcccaccttggcttcccaaagttctgggattacaggcttgagctaccacacttagccagattttgttttgagaatactttttttgccctcactaaaacaacctagccaaaaaattttaatttaaatctatgctttttaaaaaagatttattgctgacatttatttcttaacttcacaggtaactgatttgataattaataaataagtcattctccaaaagcagctgaataacatggtttgtgaagcattctttattttgtgtgcaggtgtgattacagagttgttttgtttggggctcattttatcatcgtcacagatgaggttggcgttctataaaattgctttggttaagcagaaccctattgtctggctattttgccagaccagcaaccagctaccagctgttaggctatgttttttctcatgtagttacaatcaagactgtctagattgaaatctcatcttcctcacaggctatgaattgaggcagtcaacttccctgagcttgtttcctcttctgtaaaatgtagataacaatagcacctattttagagggttgttctgaggattaaataagttaatacaagtgcttggaatagtgcctggcacagggtgggtaattaggtttttttttctctctctctaattcacaacaccctacctcattcattcaacccttattgattttttacaccttgagattgtagaaatgtattctcctcttcgaattaccaggatctgaattaaaaactctgactgaggagtgcttacaaagcttataacgatggttgaattttaacgattaattgcatttattaatggtcaacatgatcacattttatccagccctcttttcccttgtatgggtcacgctaagttgaaacaaccaaaaccaaaataaaaacatatctaaaatcatacacattaacttatatgaccctcgttgctcttttttcctcctaagagggaatagtgttatctagcgccacggttcttttcagttttgttttgttttgttttgttttttatacggagtttcgctcttgttgcccaggctggagtgaaatggtgcaatctcggcttaccgcaatctccgcctcctgtgttcaagcgattctcctgcctcagcctccctagtagctgggattacaggcatgcgccaccacgctcgactaattttgtaattttagtagagacggggtttctccatgtggatcaggccggtctcgaactcccgacctcaggcccgccttggcctcccaaagtgctgggattacaggcgtcagtttctaattttagactgcgggattaaaaataaacgattaatcctcatttatgtgcttcatatgggtgtcggaatgacgatacatgctaacacacgtgaaaaaatttacatttcagatcctttcagaaacgcaaggcaatattaagtagtagcatatgcccaagggcgaggggcgggtcggcggtggctggctctccaatacaccacagagtattttggcaacgagagtaattttgacactctgaggcttccgtagcatagctcgctttaggaaccgctaaggtgtcgcctgcctagagtcccatgcgctatttccggtcatacccggaaacacgagtccaagctgcagctggcagggattgcggggtgccggccgtctgagtttttttaaaactgctcgccgcgaagtctgtctgcagccaaaatgtccaacagaaacaacaacaagcttcccagcaacctgccgcagttacagaatctaatcaagcgagacccgccggcctacatcgaggaggtgggagtgcggc

SEQ ID NO: 32226 - DNA, 2300 bp, Homo sapien
tgtgggtgcacatgcgcgcacacacgcatgcagtgctgagtccataatgaaaaaaaacgttgagaaacattgttttacaataaggaaatctccaatctttagctagtcaaccaaaataaagatgacgtttcttaacttcccctacaactaggtgtagccatgtgattaaggcctgcctccatgggaggtgatagaaaatgatgggtgcaacttctaggatgtctaaaaaggagggacatgccctttttctgccttctcatcatcctatacctggaaattggacatggtggcaagccacctttggccatgtgcatgagggcagcaatctagagatggtgacaacacaagaaaggagaagcctggaagacctcatgggaaagagccactatccaagtgctaatccacctacatctctcagggagaaataagcttctatcttagccactgttttctgttgttgttttttttttttttatttttccataagttattggggtacaggtggtatttggttacacgaataagttctttagtggtgatttgtgagatttcggttcacccatcacccaagcagtatacactgcaccctatttgtagtcttttatccctcaccccgctcccactcttctccacaagtccccaaactccattgtatcattcttatgcctttgtgtcctcatagcttagctcccacataccagtgagaacagatgatgattggttttccattcctgagttacttcacttagaataatagtctccaatctcatccaggtcactgctaatgccgttaattcattcctttttgtgactgagtagtattcgattgtgtatatataaaccacagtttctttattcactcattgattgatgggcatttgggttggttccatgattttgcaattgtgaattgtgctgctataaacatgcatgtgcaagtacatttttcaaataatgacttcttttcctctgggtagatacccagtagtgggattgctggataaaatggtaattctgctttttagttctttaaggaatctccacactgttttccatagcggctgtgctagtttacattcccaccagcagtgtagaagtgttccctgatcaccaagtccacaccaacatctgctgttttttgattttttgattatggccattcttgcaggtgtaaggtggtatcacaccgtggttttgatttgcatttccctgatcattagtgatgagcattttttcatatgtttgttggctattcgtgtatcttcttttgagaattgtatattgatgtccttagcccactttttaatgggattgtttgttttttacttaatgatttgtttgaattcattctagattctggatattagtcctttgtcaggtatatagattgtgaagattttctcccactctgtgggttgtctgtttactctgctgactgttccttttgctgtgcaaaagctctttaattaggtcccagctatttatcttcatttttattgcatttcttagccactgttaatttgggtctcttacatgcaactgaccccttattctaaccaatttattagtttaaaaaataatactgtagcaggaatgatacagaatgagcttaccactagtagaaaatgacctggtcccagaggaaattaaggtgctttaagttgttaagtgggcaatataagaaaatatcaatgtagccatctattatacagaagaatatgccataaatagtaagggaatttgaaaagtatattatttatctggactttaatatttcccatctggaaaccacatctccaacctttgttgtataacattagtatattcattatataacctattcttcacacaggtgagcaactgtgaatgtgccaaaggctatcagtgttgctagtttcacatcccttactataaaccacccatttatgtgaaatggaaataaaaacatgcagaaattcccttggatctgagactagggtttcccccagcacaatcaagtttgtggtcaatttagttagctcagctaaagatactagccaatcagagtttaggagagaaatgaatatcctaaataaatatgatccccaaaatgtgttctctaaagaatttctcaggctcaaaatccaatacaggagtgacttggaactccattctatcactatgaagaaaagtggtgttcttttcctcttgggcatcatcttgctggttctgattggagtgcaaggtaaggggttctgagttaggttgtaaagtaagagaagtgattcactgtaaaagaatcttgattagccagataaagg

SEQ ID NO: 32227 - DNA, 2300 bp, Homo sapien
accacctgtaccccaataacttatggaaaaataaaaaaaaaaaaaacaacaacagaaaacagtggctaagatagaagcttatttctccctgagagatgtaggtggattagcacttggatagtggctctttcccatgaggtcttccaggcttctcctttcttgtgttgtcaccatctctagattgctgccctcatgcacatggccaaaggtggcttgccaccatgtccaatttccaggtataggatgatgagaaggcagaaaaagggcatgtccctcctttttagacatcctagaagttgcacccatcattttctatcacctcccatggaggcaggccttaatcacatggctacacctagttgtaggggaagttaagaaacgtcatctttattttggttgactagctaaagattggagatttccttattgtaaaacaatgtttctcaacgttttttttcattatggactcagcactgcatgcgtgtgtgcgcgcatgtgcacccacacacacacacacacccccccacatttcaccttgctctgagaaaaaataaaatgaactgaaaactaaatttaatttcttcctgaagagagaaatcaaatgctaagaaataagattttgttgggtagggttgaaccttggtaggccactagtcattgcaatatctaaaattttttagctctccaagaaccaatattttcccccttgggagcaatttacctctcttcccattgacaatgcatgctgtagaattggaggaaaatggatattagcatttcatgtcacatggtgcacattttttgactgacttctatacagattattaatacttaaatggaattacagaattctttttgaataaaacatgtggtgaccattgatacagcttatccatttgctcatgcttaattttggtactgactgtggcaatgcatagagtgcaaataggttcacgttcctgctttaccacttaatgactgtgtgcaaaatacttaatttttgtgagcttcatctccctcatttaagaaaattattagacctcacagggtgttaaaattaatgccaaggacggattgtcaactgcaaagcctcacagggctagtggctgttctttccagcaaagaaaggaggatggaaatttcttaggataagaactaaggcccagcactgttggtgctacccacctttctagcctcttcttacacagctctctgctcccatcactttgtcttctctcagttttcttttcttttctccttctccttcccctcccctcttcttttcttttcttttctttctttttgagaccgttttttttttttgcccaggctagagtgcaatggtgcaatctcagctcacggcaactttcgtctcccaggctcaagcgattctcctgcctcagcctcccaagtagctgggattacaggcatccaccaccatgccaggctaatttctgtatttttagtagagaccgggtttcaccacgttgcccaggccggtctcgaactcctgacctcaagtgatctgcccgccctcccaaagtgctgcaattgcaggcgtgagccactgcacccggcccttctctcagttttcaaaggggacaatgctccttcccatggcactgtttttgctcatgccattcttctgcctggagcgactgtgcatgctcctcattcctgccctcctgcatagtagttactcaccatagttacccaggccagcatcatttccctgggaagactttcctgaaccccagaggggctctcaccgcacacttgcagaggccttgctgagcccgtgtccgcagcaacgctacgtttccctgcaaccctatggttaacatttccttccaccactaggcaaggaaggcctgcgacgctccccgtctgagcatggtgctaaacacagtgcctagcacccagtaagcgcacacgcatgagggaaggagctgggagctggctcggcaggtctggaagttggatagggtctgtaaagggctgcctggctccaggggcctcacacgcagcgacctcagccgggcccaaggtgcgtgtactgcgcatgcccagccaactggtcttccagaaccttcttcagtgaggaggttatacccggaggtctcgacgctcgctcgtgctgctcgtgttgccgctgggtacgtttgctgccagtgctgatccagccggaggcgaagagaagcactttgggggcaaaaggtaggggttgtgccttcaggatctctcctctctgtcccctgagcggcccgcagcctccccagccgagatggccgtgcttttgg

SEQ ID NO: 32228 - DNA, 2300 bp, Homo sapien
aaaaatagaagagtggctgggtcagaggtagatgttattataagaataaaatgagtcaatatggtcaatagtcacaaagcagttcaaacaatgcctggcacacagttaatgtaatacaatgtttagtaaaaatcaaatattttatccctaataacagatttttagtccatttatcaagtatctcctttttacattgtcttctatatagagacattttagctgacaacttagataccaactaaaataaaactgtcaccatctctcattttgattgtttaatgttgaacttttctaggcctcttccattcatgatgtcagacatttctctgaaatttgttggcattctattcacagtaaaatgtttgttctgcacaaataggtatggaaggatccctccattgtcactatttctcataagactttccctcatcagaacgaacgcctctttgctaggtgaaagtcttttgggttctgtcagtctctacctcacctccctctcttttgcctttccggtttcccacagctaattccactgacttattcacttgaaagcttagctctattccagttcctagaacagattaacatgggattcagctctctagcaaattccatttaccccaagcaactcactctctgctttaatgatggagttcctacatttgaggatccaagttttatgtgcacccagtttgcagatacaggctttattcttggcccctgataccaggttctgagacagtatctgcctagtacagtagcctgatcctaggatggaagcttttccattccctgaccaatccctgcattgttgcagcccagctgactatgaaaagaactcccatatattttcctaggttctaaatatcacttgcctcagatctctcattgcagggtggtgcctgcctttgaaacagtatttcatcttggattccctgttactaatcatttgcaaagaacacaaccaaggaccactatatccatggatactgctaaatttccactctcaggttcaacatgtgttccattatatgagtatcatgtgctttctactgctagctactatgaataatcagtcaagtactattgaatgctgtgaaattaagttttgccacgattcatcatccagttaaaattgtgccaatttcagttatcactgttactagctcaatggccaacactttttttttctttttctttgcatttaacagtgtcttggagctgaaccccatcgtaaatcaacctgtttcccttctgtctcaagctactttcccaaggtctgtctctatgcgtgcccccccgcttttaaattcatttcctcaaaaagcaccctttgttttttacaataaccctaggatagctatgaatccttttctcacaccattctagataccatcttatgatgttttcattcagggactgctataagacgtgaaacttgttttaacacaccacaaatcagatacccaaatgagcaatgttttccctcaaaatagttatgttggaggctatttacttaatctaatggtgttatgaatgatcaaagcatttattgaattatttaaaacttgccagttccagatctttgaccctgtcaaagcaggccagtcctattactttatagtatttgatcaaggaggactgtccaggtaaatcactgttctaataatcaggcacaacttgctgttaccaaaaaattaggtttacctataaaggatgaaaaatttctattactggggatattttgaaaaataacctctgaaagtaactgtaaaagtttaagtgttgagaaaaagcattatagttagaatggattgcaacctttgtttttttctatatgcaatgaagttctttttttcaagaaacagttcatgttttggaaagtgaaacctaattcactattaccaaaaaaagaggagcagagggaaattccgtaacttggaggctacaataaataataccttcgagtctgcaacatgggacttccccaggaacagccagcaggttttgctaagtcaactgtaatgcccttatccaatcagaattagggagggaaaatggctttgcagataaatatggcacactagccccacgttttctgagacattcctcaattgcttagacatattctgagcctacagcagaggaacctccagtctcagcaccatgaatcaaactgccattctgatttgctgccttatctttctgactctaagtggcattcaaggtaaggaacatcaaaggatacttaatttgtaaaatgagaaataggaataggtataaattctaaaaatacagaa

SEQ ID NO: 32229 - DNA, 2300 bp, Homo sapien
agccacagtaagagcatcaacattaatatatagaataattacaacaatattctgtaataaaagttaagtgactgtgtagtctctctctcttcaaatatcttattgtactatactcactcttctagtgatgctgtgaaatgataaaatgtctatgtgatgggatgaagtgatggagcaagatgatgtgagatttcatcatgctactcagaaaagtgcacaatttaaaacttatgaattatttctagaatttctcatttaatgggggactactgtaaagactttcaaaggttttaaagactagtcatggttgttaaagaatttaaatgcaggattatatctaaataaatatataatttcaagataaaatgcaaatgataattctcaaaaaaagaagttgaataagataaaataataatctaaaagtaataaactggctataaattccccgattataccaacttttattggtaaaactaggaaataggagaaaattcttgaaagaaagttacagtgattttctcatgttacaaagacaggagctaaaaaaatattattgatggttgatgtaaataattagaaaaattcaggtaaaaatctttttaaagaattttaagaattaatatcaaaatgtaaaacaatgtattcctttcaaattacttaaggaaggccaagcaccgtggctcatcccagtaatcctagcactttgggagaccaaggcaggaggattgcttgaggcctggagttcatggctgcagtgagctatgattgtgccactcgactccagaatggtgacagagtgagacccatctcattaaaaaaaacaaaaatggcttcaaaaagttaaataaaatatatttaaagttagaaagaaatcaaagaaaacataaagaatcagcaaggaagcattttaaaaattacagattaccagttatacagtaaatatattttattaagcttacccattagaaagctcctttgatatgattttcttaaacatctacaagtgacacacttaaaacaaagatttaggaagcttaagaggaaaagataaagacaaaaaaataggaattacatcaaagtagaatctcagaggtaaaactatcacatgagcaaagaggatcacttttttttatgatccctaatacaactcatacaacttcatgtactaagtaacagtgctaaaatatatataaagtagctttccaccatggccaccattggagggcagcagccatgacactgcactaccctatagctgtgggcctcaacaagggccacaaggtgaccaagaatgtgagcaagcccaggcacagccactgtgggcgcctgaccaaactcactaaatttgtgtgggacatgatcccagaggtgtgtggcttcacccctaacgagtggcgtggcatggagttactgaaggtctccaaggtcaaacaggccctcaaattcatcaagaaaagggtagggacaaacatctgcaccaagagaaggcaggaggagctgagcaacgtcctggctgccatgaggaaagcagctgccaagaaggactgagccccctgccatctgcctataatgaaagctttgcagaataaaataaatataaaataaagtaataaaattaaattaaatttaaaaataaaataaagcaaaacaaaataaaatatataaagtaaaaattgttgaaaatgcaaaacaatatggacataaatacagaaacacagggaaacttctttaggcactcatttacaggtaaaaatatgaaattgaataaaggtcatctggtgtcaaataatataggccttatctattataagagtttggactgaaaagcaaaagtgagataataaaaaaaagcttttcagaatattattttgtatagatatgtgaaggatgaagggtgggtgaaaggaccaaaaacagaaacacagtcttcctgaatgaatgacaatcagaattccgctgcccaaagtagtccgacaattaaatggatttctaggaaaagctaccttaagaaggctggttaccatctgggttttcacagtgctttcacattcttatcactttcaacactactgcaaataggaagggacagtaacatttagaagagaacaaaacagaaactcttggaagcaggaaaggtgcatgactcaaagagggaaattcctgtgccataaaaggattgctggtgtataaaatgctctatatatgccaattatcaatttcctttcatgttcagcatttctactccttccaagaagagcagcaaagctgaagtagcagcagcagcaccagcagcaacagca

SEQ ID NO: 32230 - DNA, 2300 bp, Homo sapien
gagtgatcctcttaaaaaataaatcagatcatgttatacctctttttaaaacctgtgatttgctccttttctcttagagtgaaagccagtgttcttacagtggcctgcagagattgacatggtcttcccaccacccccttacatctctgaccttatcttgtactactctaatgttccaaccatattggcctgcttactattcctcaaacaaaagtaggcatattcttgtctcagggctttagtacgtgctgttcactgtgtttgactgccacagtcttcatggctgatctctttcaagtctttgctcaaataccacctttcagtgagtcttccctaacaatccaatttaaattgcaaacactccatgcgctcctagtctcctttgtgctacttataaacaaaagccaaaaccatagcactcactacattctaacatacttgcataatttacgtacttattttagttatttgactgccttccctcacaagaatataaacttcacaaaggcaagatatttatccatttcgttcactggtatatctctagtacctaaaacagttcctagcacattttaaggactcaaatatttgttcaatgaatgaatgaaagaaatttggttaaaaactggaacaaaacaggaatggaggccagcgacaggagaacttctctacctcatttcctgtaggcctacatgcttggaacttaaaagcaggttgttgtgagcctaaggcctgaagacatgcaaactttcttttttctttctaaccaaactcctgctttttaaaaaatcatattatttctgggagtgagtctgtgctgtgtatttaatcttggattgccaagccagtgaggtgggaaaaggttggaacatatctctattctaaagagtagagttggattttgtaaatataggtgtatttcatgataatttaaaatgttttcttgaagtaatatatgtgtgtacaaaaaaaacacatatcataagtatatagctcactgaattttcacaaactgaatttgtcaatgtaattggcatccatagcaaaaagcagaacccagctaacatctcagatgctcctctgtgccctttccagttactagctactacccagggtgaccactattctgacttctcatgccttggaagtgttttgcctaattttgttcttgatataaattaaatcatacagtataaacatgcttgtatctctttttttactcaaaattttgtttgtgagatttatccacattgttatatatggtcagagtttgttcgttttcattgctatataaaatttcacttacagtctaaccattctactgttgatggatatttggtttccagtttgggggttattatgaatagtgctactatcaacattctattaatgtattttggtgtatgtatgcgtgaatttctttggacatttttgtgttttttaaatccacagtcagtgaaccctaagtgttcctcagcattgcagtcagtatatttaccatgtatgcgttactcaaatgacagctgtagttgcaggcattaccaaatccttccctccttaatgttatcactggactttgtctatacttgggattcttaacatgttgtattttggttaagtatgcgtattcatgttttttattagattttgagtgctttttagtactttgttttacttgcttatgtatcccgactcctgacgaggtacctgaaatatagtaagctagttgagcgaatggtgatagctgtcaccattgccagtgattaacagagcaagtttccctagttatgtgaatcacttagcctagagtaaaatccatgctttagtttgatatctcagtgtcaaaggattaggaatgggaagtcatttctctctgagagaagcccagaactgtgggctcagaactgaatgtgctgtgtggctaaagggaattgctatggctttacaagcctcttggagatttaaagtgttaacagcagtgattccaaggcatagtgtgggggggccagatataaatagcagaacacaagtagcgtagtgtgccactgccaagctactgctgggggtgtttataaaaagaaaagcattcctgtctcagctctcactgtcaacaacatcccatcctgaagacttgcttaccacaactgagagtggggagtcagtttgaggcctagcatcacttaaacttcctccaaaggcacaaaagccaggtaaaccttttgacttatttacactcagactaaagaaatgaacaatttttaggaaaatcctgatcaaagcttgcttaaaacatattgcct

SEQ ID NO: 32231 - DNA, 2300 bp, Homo sapien
aagaatcctccattatttttctagagtggggaagaagcattcacttggctgcacgaggtcagaagaggatttggggagctctaactgcttcttaaatagactttcaaccagttcctctcattttaacttccctttaccccaacttatgaagatacgtgatatctccaattcctgagcttctggcagattccataaattaatcattggttttcctttctgctagactgggagggctgtttgtttttttaaggtaagctgagtacttagccattagacaatgtgctaaatcaggggtgtccaatcttttggcttccctgggccacgctggaagaagaagaatggttgtttgtttttttaaggtaagctaagtacttaagcgttaggctatgtgctaaatcaggggtgtccaatcttttggcttccttgggccacactggaagaagaagaattgtcttgggccacacataaaatacactaacaatagctgatgagctttaaaaaaaatcgcaaaaaacctcacaatgtttcaataaagtttacgaatttgtgttgggctgcattcaaagccatcctaagccatgagccacatgtggcctgtgggccgcagctggacaaactgctggtaaatcaaagctccttaacatgctaaggaaggtctttcaagatctggtttccacctatctgtcattcattcattatttatttccccctgttatatgccaggcacttgtgatgggcatggaacaagagggacatggttcttgcacttatggaatatatactattgtaaggaaaaattagattgataaattatctgtgacaaacagtgaaagaaggcagggcagtgggtatgagagcatactcagtttgtaggagtcagacacgggtccaccattcaccaacttgcccaagccagaaagcaggaggttgtccttgaatccttacttcccacgtccaaatactacgagtctcatatatgctatttcttaagtatctctcaaatttattctcctaattccactgccagatgtaatccaagtcattatcatctcctacctgtgcaactacaacagactcctaaaagctctatcttcctcaggcattctggctccttccaatccattctccttatggcagccagagggatcttctaaaaacaaaattctagtcatactagtcctctgcctaaaaccccttaaaggtttcccattaccctcaagaaatagtctgaaatccttaccataatttacaaggcaatataatataatggtaatttttacaaattgggactctggagtggagaaacatgagtccaaaaccagactccagaacctacctgcaaggtgactttgggcaagctgcttaacaactccaaacctcaattctctcatctcacctgcaaaatacagttacagaatcttctctatttatttattctgaggattaaattatattacaagtacaacagagggggcccactcttcccctctttttcagtgctccccttagagctgtggttaggagtatttactctgtaaacagcctgaccctttggtacctgtttcctcttttataaattggagatagcagcaacccacctcataagatagctgattaaattatgtaaaatgtctagaagagtgcctggcacatagtaaacgcaacgtgtttgctacaattccattcgctttcatttcttccaacgtgcatcctctttactgcttctgctccgtctactcatccttcagcactgggttcaaataccacctcctcgtgggtgttgggggggttctcaaccccagccctgctgcccgacctcccaggcccgctagttgatgaggcagcaacttcaaccctaccacatacaaattctagctgtctaccgcgtatccctacagtaacaacttcagcctctgcacacctttcccaaagaacctccctacggcagtttttaaaggactctcaggcggcacaccctcgcgagcgtcccagcattttaccttaacagtgacaccccacagcatgtgaagcccaccggaagtgagctggctgggggcgttccctcacaaccacccacctcctacgcccttggcgccttccggcctcttaggctaggtcagaaaggaggcggaactcggtgatctgactggcggtttcccggccggactgagaaggggagcgcgctgcgcgtcgcaggagtaacctacttggtctcctgctttcgcgacatggccttcaattttggggctccctcgggcacctccggtaccgctgcagccaccgcggcccccgcgggtgag

SEQ ID NO: 32232 - DNA, 2300 bp, Homo sapien
caacacaaactcaggccccagccaagttgccttacagccaccccctcacccagagaaatggagacacacagagaatctaagggctggctatatgggaaccacggggaagatcactcatcctatagggctccttgaaacagcctttcaaggccatataagaaaactcacatatttactataattggattgctttactctagtcacccaaagcaagagtttacatcctcaaacacagctcaccatggatttggacatggacaggagtggagaaaggattcagtttcttttttccttgaacatgattgctcaaaggaaactgaccctcgagacgctcagacagtgggccttgtcttcccttggcaatgtgaactttaaaaattacattatgctttgccatggtgctttttgaaaaactgcctttaactgccagatttcaggtactcacttaattacttttggaaactcagttaaaggaagatatccattgccacctggaataaaatagctttactgactggagagtgcagtgattcaaagtagactaggcctgggcttttttatctggccgcagcaagtgcagaccagtgggagaaatgaagcgtgcagttatggatgctaacaagaaaggctgctgctccagtgattatttttcttttttaaggaaaaaatgatcccagtaattctcttttgttcctcttttgacacagcttggtggatgtgggggaaagggcagatgaaatgaccagtgaaatcaaaagatgaagtcttcttaaaggactggctctccagcccaatcatctagaggaagagacaagttcagattcttgtagggtatctaaatgcatctgtgcctgaaaattatggccgtttgagaaaaacaagaattcatggtgagacaaagcaacacagactgttggtacaagatacaaagccactaagtcagcgttcagcaaagactgatggatgaattgtcacccagcctaaaggactggcccagctaccaactgcccctgcccagcccaagagggcaagaacacaatagaccgcacacccacgtctcatccccaggcgcacaccacttcaaaggctacagcaagcagacaacataacctgcctcttctgcggtgtctttcattcagttctgtttcttcatgaagtgggaaggaaacaagtttgggcccacctgagattggggtgtagacggaaggagtggggagagatgcaaacgacagaacacaaccgaaggcctttttaaaagtcaggatccatagccttacttatcactgtaaagggaacagagtcggctccatccttcctcatccttctttaaccctcgcctaccaagccctggaagacagggacgcaagaagagctctagcgcggagggtctgcctgagtgctggtctttcccatacaagatgtagcagcagggatgggagggtgagctggacgactccacaacacacacacagcccgccccgcctcaccttctcgatactctggtctacagccttctggaagacccgggccaccagcagcgtgacgctggtcaccagcaggagcagggacaacgtccccgccgtgtagaagcagcatcggcccattctgtgcgccgctcacgggccgggccgggccgcacccgccagggatccaactgcaaggagggaggagccgccgcagaggcgtcgaagacccgggacccttcggcgccacgcccacgccctcccggcgcacggttcgtgcgcgcagctctgggctccgcggcctggcgagcgcggccccgggtgcaccgggcggatggggccgcggagggacgggcccggactcggtttcggtttccttcgccgggcagccgtggcgcccgcctagcgcagctcgggagagtgcagggagcgcgcagggacgtgacgttcgcgggccgggctcgccgcaaccccgcgaggcaaccgccggcgactgcgcggggaggcgggcgggggcggaggccgcagtcatgtgccctgcggcggcggcagtgattcggcccgcgccctccccggccggtccccggtggccctgagtggctgcggcgcctgagccaggcccggcctggccgctcccagcgccctgcaccgcaggcccagcgctcgccccaccgaaattgccgaacctggttcacacactcatttactcattccgcagataggtctgagggcctcccatgggccacgcgctggggattcaaggtggctgggacattcccctgctctagaggcgctcgcaagttagcggggacaccgttaccgcaattacaacacaat

SEQ ID NO: 32233 - DNA, 2300 bp, Homo sapien
agcctcagttctgcccttaccatctgctccagttatctactgagtaacctaccacaccaacactcagtggcttaaacaacaacaatcctttattttgcattttgagcagggctcagcagggaccactcacctctgctctgtaatgtctagggcctgtgactcaaaaggctagggacagctggggactggtgggacatttctcttcctacagactcagggcttctccccacagtctttcccatgttctctgcagcagtctccgggtagctgaacttaggggtgacttgaggctccaagagcaagaatttgcaaaggccccagcagaagttgcaaggcatttatgatctagcttcagaagttccaggatatggtcatttccactgtattctattggtttaacaaattgctaaaacctgcccaaattcaaagcgagaaagtatagaccccacctctcaacgaaaggagtaacaaataatttgccaccatttttaaaccatcatgctatctcaccaagtcctcaacaaagcctcctaactgatttgctgtcctcagattctcattagtgacagatcgggatgcagcaatgcgcagagtagaaaaagtgagggttttggaagccaacagccagccctacatcctggttcaagcaggatccaccactcagcaaccagttgagcttgttaggttacttaactcagagccccagtgttcttgagtgtaaaatgaggataatacactatagttgccaagaaaatgtacttcttggatcttgcagtgtagatagcataactgaccaatggctccgcctcaactgctgagctctgctgaaatccataccctgatatttatccctaggttgctgcaaaggccagcttcctaaggctgctcccagctcatgactgagcacagcagggatactaaggcgggcctctttctgggagatgccagacttctgggacaagcccatttggctaaaggattccccaccccaatggccttgctgaactttttatacatggactgtatatatatcaaatgcttccttccacccaaccttccttccttgcttgcctctttccttcacaaggatcacacctgcatcccaggtccagctccctgttttccctcaaaactctcttgcatagtacccccatctgggactgtttctggaggactgggacaaacacaacctcctattcataggactgccaagggtattaaatgagtagaactgtgcaaagaaactagtaaagggctggcgtagaagaaacactcatttaacgaacacttcttgagtcctggctgtgtgcaggtcttggtcctgggtgtctgggacaccacagtgagcaaagcaggcaagaacaccagcgatgcctgctttaagctccttcccaacttccacatctttaacaggataccaagagcccttcaaagtctgacctcttggggcctcaacacctccgactccaccccctgaacacctgagcctacagtcaaaaggaacttccttcttgcttcctacaggttttgctctttcacccccaatgcctttgctcaccgtttccttctccgtgaaatgcctcctcctcccttttttgcacatcttccattcttgcacatgccccttacgtgacaaacttatgcatcccccaggccccagttcaatgtggggccctaggtcatccaggcagaacatgcttgctggcatgatctcagcaggcacctggtagaagcacttgctacattgtgttgtaattgcggtaacggtgtccccgctaacttgcgagcgcctctagagcaggggaatgtcccagccaccttgaatccccagcgcgtggcccatgggaggccctcagacctatctgcggaatgagtaaatgagtgtgtgaaccaggttcggcaatttcggtggggcgagcgctgggcctgcggtgcagggcgctgggagcggccaggccgggcctggctcaggcgccgcagccactcagggccaccggggaccggccggggagggcgcgggccgaatcactgccgccgccgcagggcacatgactgcggcctccgcccccgcccgcctccccgcgcagtcgccggcggttgcctcgcggggttgcggcgagcccggcccgcgaacgtcacgtccctgcgcgctccctgcactctcccgagctgcgctaggcgggcgccacggctgcccggcgaaggaaaccgaaaccgagtccgggcccgtccctccgcggccccatccgcccggtgcacccggggccgcgctcgccaggccgcggagcccagagctgcgc

SEQ ID NO: 32234 - DNA, 2300 bp, Homo sapien
agattttggtgcacccatcacccaagcagtgtaccctgtacccaatgtgtagtcttttatctcttgtccccgtcctatccttccccccaagttcccaaagtccattttatcattcttacacctttgcatccccatagcttagctcctacttatgagtgagaatgtacaatgtttggttttccattccttagttacttcagttagaataatggtctccagttccatccaagttgctactaatgccattatttcattcctttttatggctgaatgttattccattatatatatgtgtatatatacacatatataccacaatttctctatccactcatcgattgatgggcatttgggctggttccatagttttgcaactgcaaattgtgctgctattaacatgtgtgtgcaagtatcttttttgtataatgacttttcttcctctgggtagatacccaggtagtgggactgctggatgaaatggtagatccacttttagttctttaaggaatctccacactgttttccatagtggttttactagtttacattcccaccagcagcgtaaaagtgttctcttttccccacatccacaccaacatctaattttttaaattttttgattatggccagttttgctggagtaaggtggtattacattgtggttttgatttgcatttcccttataattagtgatatctagccttttttcatatgtttgttcaccatttttatatcttcttttgagaattgtctattcatgtccttagcccatttgttgatgggattgcttgtttttttcttgctggcttgtttgagttccttgtagattctgaatattagtcctttgttggatatatagattgcaaagatttttcccactctgtgggctgtttactctgctgattatttcttttgctgtgtagaagctttttagtttaatcaagcattgtttgggcaaattgttacaaatcattcctgcaggactccattcagcctagataaccatacttttggcccagttctcacagaatttctacagaaaccctacctcctcaaagtaataaaaagtttgcattacaatcggactaatatcaaagaaaataaaaataacaattgggctaattataatgattacctacatagctttctccattaactaactcacaacagctctgttaagtagtcaggacaaatattaccacccccggttcacagctggaataatagtacttgcataataataattcttgagggattcttaaatgctggcactgtgttaatttctttatattcatcgaatatccccaataaccctacaggtagatactattattttccccattttcaggccaggtaattaatgaagcttaaaaatgtaagtaccctgcccccaggagtgcataattattaagtagcagaaccaatgcttatatttaaatcagaaacactcagaagtagcataagaatttagtaaaaacgaaacacaccctcgtgcaatccgtattatgtggccacgtgcctaccagggtcagctggatggtacttgtctgctagaagtgagtcgaggcagaagaatcaacacaggagctggaagggcctctggaaatcagctggggactagagacaggtgtgcagccctcggtttacagaggctgtgagaccaagagagttccaagacctccaggaaaacatctccctgctaaaaggctttcccaacctttagaaatctattcattttccccactttccatcctctttctcttgctatctctttatcgctcctcctgccttcttcctttctttccttcagtaaacgttttttgaaacgatgatgagcaaaaaacgcctgatccagtctatggcgcgtttcggtgggaagatgaacacgccttcccagcagagtaaaacgtgattacaccaaggaccggtaccctctcccttccctcggccaggtccacgtccccaggcgtcggagaaggggttggaccgcgcagcggggcgtcagagttgccaggcgcccggggcaaataccggcagcggtggttgtgcggtgtcctagcaacggggcggcagcagggcacacacaccgcccaagcccggacggtggccgcgaagctagggccaccatggcggaccgcaggcggcggctccggccggggacgttggccccggtgcgcgagggcgtgaactgcaggtccaggtaaacactcagcgcccgggccgagggcgcatcccacgcgggccgcgcgggggcgcctggagacccgcgcttgctggggcgggggcgaggggagaggtcc

SEQ ID NO: 32235 - DNA, 2300 bp, Homo sapien
atggggtactatgttcactatttgagtgatgggttcactagaaatccaaaccccagtattacacaacatactcatgtaacacacctgcacatgtacccccgaatctacaataaagaattaaaaggtaaaataaaaagtttttttttaaggaaaaaaataaacatgaaaacaagtgtcatttgttcgcattagcattccttacagctgctgaaattccaggagcttttaataaattaaagctgcatctgcctgaagagatcagtgatattactgactggttcaaaaataattataggataagtaagataagaagatggtgttgctactggatcaccagtattgtttctgccaactttggggtctgtatatgagtatatgtggaatggatttccctatacccagaacaacatagaagtatggcacagaagaggggaaaatgtaatagggagtactcacgtgagtgtatattgaatcacagaagaattttaaaaagagcagtgcatgtagaaaatgaatatgaacgtattctccaaggagagccctaaaagaaaaaaagcaactatttactatgatgcaagacttcaaaatatagttaatgatcataaatgcctgccagttcttatggaatacctctgtgtaattgcccataatctatctctcttatacattttttaacatgttgaattttcttcttagcttttttttagtgccccccacactattttaaattgtaagtgttattttttacaattcactatgttatgtgtttcatctttgcatcatttctaatgctggagatgtacattgtgtaaagacttttatagagctctaattcatttcatgccttttttgcaaattcgacttcatgaaaatgcattgtcacaaaactaactttgtgtgtaagcattgtggatttacataaaaacattgaaacttcatcaatgaatgaagagatgtccttttttgttcatctgtatttgtgaaagataacattttttgatatcttggttctttgggtaactgcacatagagtggtgtcccatcatgattgttttttgtttgtttttttgagacaggttctcattctgtcacctaagctggagtgtagtggtgcaattatagttcactgttacctcaaactcctgggctcaagggatcctctcaccttagcctccaagtatctaggactacaggagggcaccaccatgcctggctaatttaaaaaaattttttaaatagaaacagaggtcttgctatgttgcccaggctggtctcaaactcctggcctcatgccatcttcctgcgtaagcttcccaaagcactgagattatatgccttagccactgtgcctggccccattgtgctttttgattgattttgtcaaaaggcttaggttgtacatcactgtgtttcagatgactgaaattataaagcagagtgcacacaattgccaaacatagtggtatgcgtttatacatatcactttttgagctatttcttcatgaatatggtttccctgctcatattatagccatgtgactgctagtacacctgactgtttatgcttgcaaaactatgtatattgttattgcctaattcgttgtgtaaaatggccaatgaagtgttctctcatttttacatttctcaaataaatctccatctaaaaatttaagtgcctttaaaatactttttttgcaattttttttcagaattatagttttgggattttaattttggggattgtgattttgaggattttagactttagggattatgatcttttaggattttaacatttgggattatgccttttgggatatggtccaaatctatccatagcacccagcataatacttggcacagaagttggtgaacagcactgatggactgaaaaggaaaagtgaagggcaagttggtctgttttgttgtagaatggggactcccttcttcagcatgtttttcttttcctctaagactattttctgtttgtagctcttatcaaaggtgctggaagtgcttgatcctgaccggaagctggaggacacatgggcttattgtcaggacaccaggaaaggaatgaaggaacccacgaagcttttaaaaaaacattctacccaagtctacctgggaccgtgagtattgttcttaacccttcgatcattgctgtcacctgatgaaacattctaggaattaccttcttaaaacttctcatctttagaatacttctaatgaagcaaatgtaactaagttcccaaggaagagggaaaggagtcctaggtaccgctctaaatagtgcttat

SEQ ID NO: 32236 - DNA, 2300 bp, Homo sapien
gccaaataatgttctttaaaaatgttgcattagcttcttgggattcccaaagaaaaaagtaaattaaaaaaaatgttgcatgatcaatatgatacaatgtaaaaataattctgatgggttgagaaaataatttttggtattattttaaataaatgaatggacatttatgacagcaataaatattaagagccttttaggtattataagtgaatagtggggcttacatctgaaggattttacagattctctgggatttttatcccttagacaggagtccccagaccttggtctgaggcctgttaggaagcaggctgcacagtaaggaggtgagtggttggcaagtgaacattacagcctgagctgcacctcctatcagatcagtagcggcattagactctcataggagcacaaaccctatgtgaaccgcacatgcaagggatcttatatttttatcagattttttgagacagtctccctctgtcacccaggctggagtgcagtggcatgatcatggctcactgcagccttcacctcccaggcttaagtgatcctcagcctcctgagtagctgggactataggcgccactgccttgcccagctcatttttgtatttttccatagagacagggttttgctatgctgcccaggctgaaagaatcttattttatacagtgacattcattctcttaaaaatatagctttacggttactttttattatacataaaatgaatttcaaggaacggtaatatccacatgggctaaaaatgcatatggaatctacgtaagaaaaatgccaataatgctctagggtgaaattacctggggcttttaattcattcattcaacctgtacttctaagcgctcactccggagaggttacaggtgctaagaattcagcagagaacaaaggacaaccatccccgctgtcatttacactctgaagggaggaaagagaaattaaaccacagacacacagattatagagtgtattagaaatgacgccctaagtgctaatgagaacaatggagcaggggaaggatatagggagtaggattgtaattaaaactgggattgtcaaggaagggctgggcaggggagggggtagtggggatgcagatgacacttgtgccaagacctaaaggggatgagagagagaggatgtctgcaggaaggatgactctaggcaaggaagccagtgtggttgaaggtggcaagatggagatgagtgcacagtggtcatggggaacagatcctgtagggtcttaaaggttcttccgtgtgatctggagcaactggagggtcttgagcagagaactggggtgttttaacaggatcacgctgactggtggtttgaaagtggcctgtgggagcttgctgtgttttgttttgcagcaatgggaaggatgtggttgccacttcctgagatggggaaggtggggagagtagtaggtttggggagttaggtggggagttcaggtctggatgagttgggtttgagatgtctattagacatccacgaggagatgcccagtaggcagtcttcgccctcacctctcctctacctcctctcttatgattacagaagttgtggcctgcatcaaggcgtgcatcagccttccagtaaccccactggcagaaccttgcaccccgttaagggctactgtccattcggagcaaggggcacattagataatttgccctaccagagagagcaattatagcaattactccaaggcaggtgtttggtatctgtggcctttagcagttgaatgtcggagtccaagggaaaggtgtgagctgcagacatagacgtggggatcatcagcttgaagctgttgtgcaaagtcatcagatcagcagaggaaaggatttacaaagaaatatatataacaccgcacagggttgttgtcttgtgaggattaaattaaatacacacttaaaacatccggaatacagacagtgcttaataaagagctgctgtttttattaacaaacttatctgtaggagctcgtccatggacaacatccagttcatacagatgcgtgcgcatttcgcagcagccatacacgcccaaagaggacgagactggatgtgattgagctgactggcatctttagatggatggtcctcagtccagtccttccattttacaggcgaggaggcggaagcttggggaggctaagcgcgctgagctggcggcggagcggagcttccactagggctcccagtttccccgcaccgcgcccgccgtcctccgggccacccatcccacccgaacgcgccaccgctctagcccg

SEQ ID NO: 32237 - DNA, 2300 bp, Homo sapien
tttgctatgctgcccaggctgaaagaatcttattttatacagtgacattcattctcttaaaaatatagctttacggttactttttattatacataaaatgaatttcaaggaacggtaatatccacatgggctaaaaatgcatatggaatctacgtaagaaaaatgccaataatgctctagggtgaaattacctggggcttttaattcattcattcaacctgtacttctaagcgctcactccggagaggttacaggtgctaagaattcagcagagaacaaaggacaaccatccccgctgtcatttacactctgaagggaggaaagagaaattaaaccacagacacacagattatagagtgtattagaaatgacgccctaagtgctaatgagaacaatggagcaggggaaggatatagggagtaggattgtaattaaaactgggattgtcaaggaagggctgggcaggggagggggtagtggggatgcagatgacacttgtgccaagacctaaaggggatgagagagagaggatgtctgcaggaaggatgactctaggcaaggaagccagtgtggttgaaggtggcaagatggagatgagtgcacagtggtcatggggaacagatcctgtagggtcttaaaggttcttccgtgtgatctggagcaactggagggtcttgagcagagaactggggtgttttaacaggatcacgctgactggtggtttgaaagtggcctgtgggagcttgctgtgttttgttttgcagcaatgggaaggatgtggttgccacttcctgagatggggaaggtggggagagtagtaggtttggggagttaggtggggagttcaggtctggatgagttgggtttgagatgtctattagacatccacgaggagatgcccagtaggcagtcttcgccctcacctctcctctacctcctctcttatgattacagaagttgtggcctgcatcaaggcgtgcatcagccttccagtaaccccactggcagaaccttgcaccccgttaagggctactgtccattcggagcaaggggcacattagataatttgccctaccagagagagcaattatagcaattactccaaggcaggtgtttggtatctgtggcctttagcagttgaatgtcggagtccaagggaaaggtgtgagctgcagacatagacgtggggatcatcagcttgaagctgttgtgcaaagtcatcagatcagcagaggaaaggatttacaaagaaatatatataacaccgcacagggttgttgtcttgtgaggattaaattaaatacacacttaaaacatccggaatacagacagtgcttaataaagagctgctgtttttattaacaaacttatctgtaggagctcgtccatggacaacatccagttcatacagatgcgtgcgcatttcgcagcagccatacacgcccaaagaggacgagactggatgtgattgagctgactggcatctttagatggatggtcctcagtccagtccttccattttacaggcgaggaggcggaagcttggggaggctaagcgcgctgagctggcggcggagcggagcttccactagggctcccagtttccccgcaccgcgcccgccgtcctccgggccacccatcccacccgaacgcgccaccgctctagcccgcgctccagcccgcgcgtcaccgacgcccgcggcctctcccacctctaagttccaggaagctctcggcctctagctgaccgcgttgctgctgagcttccctggggagaaggcgccgaggtgcccggtgcgggccgaggcagggctgggcctcgcgggcagcaggcggaagaaggaagggcggtggggcaggtcccggctgcgcggggcagttgtgcgcacttgggttcttcacgcgggacacacgtggaacgccgacccctgcgcccctggccgctggcaactggcaaggccgggaacagaaagtgtagggacagaagagcgctggagtcttccccgggagggagcccggggctgcagcccaggggcggggagcggggcggggctgggaaagttgagtactggtcgctcagggccgggctccgccggagtgcccggcgcagaaaccgtaaaaggctggagcgggcggggtaggtgtggctctgtgtgcgtgacctgagccccggtcccagtccctgtagtctcctgcggccgcggcctctcagccatgggcgccgtctggtccgccctgctggttggagggggtctggccggagcacttttcgtttggctgctgcggggcggccctggcga

SEQ ID NO: 32238 - DNA, 2300 bp, Homo sapien
aggtgctccagagtcatgtgcaggtattgtgttagacgacacagacctacaccctgggaagagaggggtcctcctaggaagccttaccaacacagatagagaccagttaggaggcactgtggcaatccatatgcaaagtgatggcagtccagacctgcaggttgggcaggatttgatcaacaattgggtatgaggggcgagggacagggaaagacatggtgactttgtgagttcaaacttagactggcaacatggtagtgcctctaacagagaagagtcagaaaggattgtaggggaaggccctctgtgaagaaggaataggaatgtttgagtcagagtttgcagaagcatgccatgctgggggtttctgacagttagttggaaacgccgaattagagttgccatattcacattccctaccctagtcaaaggaccagatactttcaccaccacaaaccaccccagtctaagctcccacctctcttgtttgctcttccagttgccttctcactggtctccatgcttctccccctacccccacgccaaccactgttttccttcataccagagccagagttgtatttttaaattgttacactacatcactctcatactcaaaactgtccaatgacttcctgactcactcacaatgcatgctcaagttcttacattgcctctgagcaacctgatcattcccttggcccctctctgacttcatctcctgcttaccccaagctcacttcactccagccctactgatgtccctgctcttccccagacacgttacctgtacacagagctcttcccagactgtccacgtgtcttgtccttatgctcaggagcacaaggagcatctgcttagatgttacatcatcagagaggcctttccttgccaactgtggcagggtccccaagaccgaccccaggtttgatgattccctaggaggactcgccagactcagcatataatcatacacaaggctaggatttattacagtgaaaggatacaaagcaaaatcagcaaaaggaaaaggcacacggggcaaaatccagagaaagccaggcatgagcttccaagagccttctccgagtagagttatgcaggacatgcttacttcctactccaccccctgccccagcaagacaccgtgacaacatctgtcaagtgctgctaaccagagaagctcattaaagcctcagtgcccgggtttttatattggagtttggtcccataggcccctctacctggcaggtatccagattccacgttcccagaaggaaagcaggggttcagcatgaacacattgtttgcacaaacagtttaggcacactgagccactcttattagggtggtgggaaccctcccaaaatccaagttcccagacgacagtcaagggccaaccttgtaagcggcctttttgaggagagcacccaaacctgctatgtgaactctttctgcacaccagcttacctcaagtagcaacccctcccttgcattcattctgtacccctcacctgcttttattattattcttgccacttctcttacctgacatattaaatatttgtttgttttcttctcttcttactagaggaggacatgaagacaaagacattgttttgtttattgctatccagggccaggactagggtgaggtaactgaggtgcccaggttagaggccctcacctagctgcttcacttgcattaccctagtcatagccctgcttctatatcccttgcttgtaaaatagttcctgccacaaagaaggttcttaatatgtattttttgagtgaatggagatagaataggaataatgaagggttgttgcaagcaatactaggaattgacatctaaggttaaaagaaagtgaaatattttcccactttctattgatgctttataataaaatacaaatttagtgtcctgggaagtaatgaaaagataataaatatagatggaatacagataggaggcagaaaaggatattaagtaggagactgttgtcagattttaggactgtgttagcagctatcaattataactatacatgtacatattttttacttctctatcctttgtatttatccatatatttagatattaaaagataaaaaagatgcaaagatccgggagcttgaggccagagtgagtgacttggagctggaaaaggtgaagctggtgaatgcaggctctgagcggctccgtgcagtgaaggacatcaaacaagagagagatcaattattaaatgaggtgaaaacaagtaggagtgaattaaacaatctttcaggtatgttgct

SEQ ID NO: 32239 - DNA, 2300 bp, Homo sapien
ggggtatgccctatgtaaatggggagaatgaaataaagttacaaagtcatttacagcctacaccctaaggagaggatatttcctgtcacagctgaagtgtgaatcagccttatgttccctgcctccagaccctattttcctgcctcactatttttcacttgactttcgtgttcttatgatggtgctcttctgtgtgcagatagtttttaaaatttggtgttcccatcgaggatggcaggggttagggaatgaatggtgtaggcttctattccgccatcttgctctgcctccagcctctcctgtcttctttctcgatctgcttcttcatttagtcaaaacacatctttgttaaattcttaagaaagagatatattttatgcatctttgcatgtctgagaatgactctattttacactcgtacttcattgataattggctcggtaaagttgaaagtaatttctctcaatcttttgaagatactgtgcttttgcattcagtatcgctactgagaagatgtctgtctggttcttgttcctttgtagatgattttttattttttacttacttgaatttcatctttaacatcttttctttgtctctgaaatgccaccataatgtacttagatatgaatttttgttttttttcattcaccttgctagggactcagtagacctgttcgtctgtagatgtgtgcctttcagtttggaggaattcagttgcgtttttttctttggccgtttcctttcttctgttttttcagttctgtctttccaaagttcctgttggaaacatattttcacctcggttaaatctctacatctcttactttttgtttcaaaaatttgtctactttttctacctttggaggaaatttcttgacttgcaacatttctattgaattgaacttttttctttacaaccatatttttaattttcgtgaccctttctcccctgatcacttatttggcatagcatcttattcttgctttatgctgataatgtctcttgaatttctctgtaaatacaagtttttgaagcgttcttcttttccttgcattatctttctttagttcctctggttcttttttttctgggtgtttgcttgtttatttgatcttgatctatttattactttgggatttttcttcaagtgttcagtggtttttggttttctgtttatattctacaattaggcaataaaaaatctgatggcaaactttctattcatgggcagaatttgatggctttgctttgggaggattaggtatggcatcaactatgtacgggagcatctcctacagcatctcctattctgggagatccctcagtgcctgatcttagaaatctttgtgtatttctctgtagtaggacacctggagttttggatggtggtgtttgctgccaggtattttaagtgggtaggaggtagggattgacttttttatgtacagaatttcaactaattctcatgttttcatgtaaaaaatgtatttctatctccatgttgagctggaagtaagatttgttttagaagcagagtgttggttgtagagaatggattaaaaggggtcaagcttgatacagggagactggttaaggtattctcataatctaagcgagaaattattaattagactttgaactgcagcagtgagggaaggaagtagacataaaaatgaattgaaaatatatatagatctttggaagttactagctataaggaaatgtgtttctctaatgaagattaatttgcatggctttttttttcagagcaatgaattgcatgagaaacaaaagttttatttgaggcagtcagtcattgatttgcaaacaaaacttcaggagatgcaaatggagagagatgctatggctgacatcaggttgggatttgtgaaattattttaaagtcacatattttcattatgtgaaattattttaaagttttactgtttgtagtaaaactacttgtgtgaatatgagttttatcaatgttatttattttctttcatttatttcatagacgaagggagagtcagtcccaggaggatttaagaaatcagcttcaaaatacagttcatgaacttgaagctgccaaatgccttaaagaggacatgctgaaagacagcaacacacagatagagcaactacgaaaaatgatgcttagtcatgagggagtgcttcaagaaatccggtcaatcctagttgactttgaagaagcctcaggcaaaaaaatatgtgaacatgacagcatgtctactctgcacttccgcagcttgggctcagctattagtaaaatact

SEQ ID NO: 32240 - DNA, 2300 bp, Homo sapien
ttgtcctttctttcccttcttgaaagtactactacactcttgccttactgtgtgtattgttttttaataacctggtgccagtctaatcttcttgcctttgtaaattatttcatcttttttgcctggacacactgaggattttttcattatctttaaagtcttaatattgtattactagtgtatgtctcagagtttatcattcttgatcacttttccctgatatggaaaatgtgtagattcgggtctttatttctagaaaattttcttggattatagttttaaatagtagttctgtttcatgtttttcctttaggaaacccagttgtattatattcaacctcatttacctgtcttcaatttcagtcctctctcactccttttttttgtcttcttttcttcctttttgtggagaatggggtcttgccctgttgcccaggcagttcttgaactccggggttcaagctatcctcctgcttctgcatctctaagtgctgggattacaggcatgagccaccacacccagctctcaccctttttacttctttattttattttttattctcatggtggctttcctgattttcttcagtgcctttattaaatttttattacaacctgtcatcgcttgtgtactttgtgattcagtctttatttctgatatagttttgttttttatttctctgtctttcctaactttaatcaactctcatttcatctcttcctgtttgtttgtttgtttgcttgttttgtttcttgtccatttttattctttggctttacatttctaattcaggggtgatttttcataccctaaattcttgtttgagcctactgggttcagtttggagtattatgtttcagttttctttggcttcatgtttgttgtttgtgggagagacttttcatcagcagaaaagattgtattcatgttttctgacattttgcagtagatatagtctgcttttatctattcctattcattttgtggacaagggtcctactttgagactgccttctgccatgcactttctttatgggtagtggtgttgggtgggaaggatggaagaagggtggtatatctagcttgtgttttgcttctgctggttccttggtgttcctctctcatttccttctttcccttgactgccatgtccctaggggagaccattttttctctctgtatctcattcaccccaagaaaccctgcttctctgaggccgctacttcttcaaacccttaccccattgtcagggctatggactatcaagttccaacctgtgcttaatattttggcctttactttttcacctctggggatgaatttatctgtactttttctgtcttctgcttacctcttccctcccattttctgtacccctaggcttgtagtgttggtaggtgggctgcgggaattgttttggaaaaagatttccctgtacttgcagattatttgaaggttgtggtactctctgtcttccagtgatgctaggggtgtggagtgcctggttgattttatggttatttgggaagatgtgaggaagatttgaaatcagaccaccaccattgttctccacatttagaattctcctcttagcttaaatgaaaattgtgagcactatttgacatcagagaagttcttcaacttttattagtgacttccattttgatgatttgtggtttttgctaaggagatattttcttccattatttgatggtgtaaccttatgagaaacctctacaataattagtttcttattttcaggttgtctttaataatgtacttggctattaaaatcaataattttcaccataagattgtattcacttattaattttatgtaatataatgtatttctgtataaataattatttttctggagaagaaattattactaaatttcaatgttaaaaagtcagttcctgttcttctatgaacttttttcacatagtaccttgttaataaagattgaatctctgtctttcatagacaggaaccaaaagaaccaaagagggaaccattcatacttcaagatctctaataagaagtagcaatatttaatatggaatcaaaagcttgggaatcaaataatgaagatcttttatcaagtagtggtgtcacatctaatggaggtatgtgctgtttataaaacaaaatggggaaaaaatagaattaaccatgatattcattcaagctgctgtttctagtatgttttatttttaaccatgtgggttacagaccatgatcatgaatgtctaccatattgtttataattctactttttgaagaagagattcctttg

SEQ ID NO: 32241 - DNA, 2300 bp, Homo sapien
ataaacacatgtaagttcatgttatgatccccaattcaaccaagtgcagagttttttttttaacaattttatgatttattgaagcaaaaaaccttgctttttctagaaatctttaatcatttcataagctttatgcctgaaaataggaaaaatatttcaattcctatagtgtcacaaaagtagagaaacactgatgacttgaccaaattcaggatatatggtcagtctaaaatagtgaaaatgaattacaaatattatttaaatgcagattttcattactctaaaatacacacacaaaataactaccagcattggcaacagagatactaagcatcctctttacaaataaacagttgttttaaaattcttgttgaaaccccatcaaaaagtgggcaaaggatatgaacagacacttctcaaaagaagacatttatgcagccaaaagacacgtgaaaaaatgctcatcatcactggccgtcagaaatgcaaatcaaaaccacaatgagataccatctcacaccagttagaatggcgatcattaaaaagtcaggaaacaacaggtgctggagaggatgtggagaaataggaacacttttacactgttggtgggactgtaaactagttcagccattgtggaagacaatgtggcaattcctcagagatctagatctagaaataccatttgacccagccatcccattactgggtatatatgcaaaggattataaatcatgcggctataaagacacatgaacacgtgtttttattgcggcactattcacaatagcaaagacttggaaccaacccaaatgtccaacaatgatagactggattaagaaaatgtggcacatatacgccatggaatactgtgcagccataaaaaatgatgagttcatgccctttgtagggacgtggatgaagctggaaaccatcattctcagcaaactatcacaaggacaaaaaaccaaacaccgcatgttctcactcataggtgggaattgaacaatgagaacacatgaacacaggaaggggaacatcacacaccagggcctgttgtggggtggggggagcggggagggatagcattaggagatatacctaatgtaaatgacaagttaatgggtgcagctcaccaacatagcacatgtgtacatatgtaacaaacctgcacgttgtgcacatgtaccctagaacttaaagtataataaaaaaatatatatatatatacatatatgtatataaagaagtgaaactcctgactactctgggcacactgcttatggggtagccctgctgcacaaggagcagtaaaaaataataataataaaattttttaattaaaaatttaaaaaaacaactcttgtttaagtgaataaacctatgctgtcttctgtaaactactaattttctaagaaaaaaattcccctttgaaggactgctgctttccaacagcctgttatgaataacacaagcattcatagtgagttatgatgaataacgcaagcattcatcatcttacgtcgaagtagacaagtgtggtttccacatcagaatattctaaagccaaaccttcctctttcttcttttctctactctctaactcctattttcaattctgcttaccttgatcttagattctgtttcctgcttaatactaaagtctttgatagtgaattactatatgatttgccagtatttggttgtggttctatatctgtcctactcattcctttatgcttctgattgatctctaattcatgataacattactcagcaatttgaactttcttagtgtcattcattatcctgaagaatcccaaaatgtatcatgttagtgtatcagtaaagttatacaacaaacattcacaatgaaactcgtttaaatgagaaggcatccttcttgtacacagcatagagtcgttttttataagccaatttgaaaatccttttctttcaataggcaaggtttttttttcctcaagtagcagtctcttctatttagaacatttaaattgcctagcaatcttgactaacattctatttgttataattctttatggaatatctccctacctactacttacttcctaaaaaacgatagcacgaagcatattaaggtagatatgttctatcgttaattgtagttttgacaggtggcatctcagtaatcaaaaggaagaaaatgtgagtgaaataaaaatgaattccgtttaataaaaactgttaagctcagggtttttttaaatttttagagactttatgcttacaatcatgaattaatgtaaaaatgataagcagcg

SEQ ID NO: 32242 - DNA, 2300 bp, Homo sapien
ctgttctcagttagaatcccaacctttctttccactgtcagcaccttgagacaatagagttgcctttctcttcttggggaggagtctgattgcattctgtaattaagagtttgcatccaaatcacatatcctaacagaagttcttcttacgaattagcagtgctatgccaaaagaaagttgtcttttcaccgtaaactatgcagaacacctgacttaagctaggatttcattcctaaacgtctgaagatttaaatttcatgcctgcctgtgttgcttgcaggattactctggtcagatcatttaaccttctggtggcctctgtgtccttacctctaaaatcaagggtgtgggaggattgtctcttgcagctttaacattctttgaatctgatcaacagaagatggaggaaaaaagttcttccaaacctggtctatcaactgctatagtgaaggtccacaaaatgaagttttacatttttttttcagattacatatcaattttggttctatgtttgtttcttcaatatttttggtgataatctaaaatggagatttcatcagtctgcaagcactgggttcatattatcttttccttatttcctttgcctttagcttcattactttttttgtttattattttttaaattgacaactaaaaattatatatacttatggtgtaccacatgatgttttgatataagtatgcattgtaaaatggctaaatcaaggaattaacctattacctcacatactaattttttttgtggtgagagcacttaaaatctaatcttagcaatttccaaatatacaatacattgttataactatggtcatcatgctgtacaatagatctcttgagcttatgcctcctaactgaaattttgtatagctatgttacttttaatattaaatgtggattctgtaaaatcccagtttttacaaaatgtattaggagtaacataataagagcctcataaattaattttttcagaaagaaagctgttcatttacctaggacttttatttaaaatacatatgttctttgaaatgaaagaaaagctaatgtttctccatttattctaacttacaaattaagctgtaaaagaaaaccacaatagaaattgcgtaaattacccttaagaatcagccaatttttaccacatactttcatttggtacaccttaggtttccttatgtttccattcacatactaccattacataaggttttacttttttttttttttttttgtctttgagcccttcaagtgaagttaccattgaaaatcaaacaatacctgtccagtgttgtaaattaaatatcgtgtagtttgatatcatatacctgcctttccatatcagcctttcattaattataagtacaaacaccaaaataattgttatcaagccccacagtagtttttaacttcagttttcaacttaattctcattatcccatacttttaaacagaaaaaagttttagtacatatattacctggaagtaattctaatctgttccaataactaaatagctgaggcttctgggttagatatggttatcttctactgttcaaatttttaatacaaagcatgaatgttaaatttgtatataacattattacaaaatgacactggtaacatgaaatcagaacaacattctttcccgagtacctagtacttacccacaaggcattgtagatttcttttcatttaaagagtggataacaatcttggagtagataacaatgaaaacctagaaaaaaaaacccacctcctgtttttattgagtcaaacaagcagaactttgattggaaagtcccatttcatatattacactggtagtattttcttctaacgaaaaaaaaaaagcccttgtgccaccaccttgacatgtacttaaacgtttacccaaatcacttaggcattgcttctcaaacttggctgcatagcagaattgcctggagggtttttaaaaacacaaatgcctatgtctcactccctgaaattctcctttaattggtacgaggcggggctattctaggaactattttctatcccttggcaattagccatctgtatagtatttttaacttcctacgtgttattaactgtaagactgtttgaattgtcaggtctttgtggtgagctgaattctgcatggcagtgcttactgtgcagaaaggttgcaatgcctcactttgccttaatccatgttcctctaacttccttactctttctctcaagaggaggcaagtggctgtggcggccgcagcagtggctgatcatcactgaaaatacca

SEQ ID NO: 32243 - DNA, 2300 bp, Homo sapien
gtgagagcacttaaaatctaatcttagcaatttccaaatatacaatacattgttataactatggtcatcatgctgtacaatagatctcttgagcttatgcctcctaactgaaattttgtatagctatgttacttttaatattaaatgtggattctgtaaaatcccagtttttacaaaatgtattaggagtaacataataagagcctcataaattaattttttcagaaagaaagctgttcatttacctaggacttttatttaaaatacatatgttctttgaaatgaaagaaaagctaatgtttctccatttattctaacttacaaattaagctgtaaaagaaaaccacaatagaaattgcgtaaattacccttaagaatcagccaatttttaccacatactttcatttggtacaccttaggtttccttatgtttccattcacatactaccattacataaggttttacttttttttttttttttttgtctttgagcccttcaagtgaagttaccattgaaaatcaaacaatacctgtccagtgttgtaaattaaatatcgtgtagtttgatatcatatacctgcctttccatatcagcctttcattaattataagtacaaacaccaaaataattgttatcaagccccacagtagtttttaacttcagttttcaacttaattctcattatcccatacttttaaacagaaaaaagttttagtacatatattacctggaagtaattctaatctgttccaataactaaatagctgaggcttctgggttagatatggttatcttctactgttcaaatttttaatacaaagcatgaatgttaaatttgtatataacattattacaaaatgacactggtaacatgaaatcagaacaacattctttcccgagtacctagtacttacccacaaggcattgtagatttcttttcatttaaagagtggataacaatcttggagtagataacaatgaaaacctagaaaaaaaaacccacctcctgtttttattgagtcaaacaagcagaactttgattggaaagtcccatttcatatattacactggtagtattttcttctaacgaaaaaaaaaaagcccttgtgccaccaccttgacatgtacttaaacgtttacccaaatcacttaggcattgcttctcaaacttggctgcatagcagaattgcctggagggtttttaaaaacacaaatgcctatgtctcactccctgaaattctcctttaattggtacgaggcggggctattctaggaactattttctatcccttggcaattagccatctgtatagtatttttaacttcctacgtgttattaactgtaagactgtttgaattgtcaggtctttgtggtgagctgaattctgcatggcagtgcttactgtgcagaaaggttgcaatgcctcactttgccttaatccatgttcctctaacttccttactctttctctcaagaggaggcaagtggctgtggcggccgcagcagtggctgatcatcactgaaaataccaaagaaaagaactgagctgcctccttcatattttttccattgaggattaatttaccgtgctttttcattttctctacatcctgcaaaagtttttttctctcctaagaaacaaactatgaactgattgttgaaaaaaagaagtaaaaagttttagcacagcttctctgtctcttcgggacaagttagaaaattctgaagtgagccgaagcatagtaagtgctttctttctttttaagctacttctggggagggaggaggctattgtaatggtaaatttcactccgagaggaagaaagggttgataatcaatcaaaaatgaggtattcctttgagtatttgtgattttcttactatattgtaagatgcttttaattttctctgtaaaataggcagaaatggttttagtgtgtgtatgtgtgaaataaaagctcagaaaagcaatcttcagagcgccactgaaggaagttttgacgaacggagtagagatgtataccacttgggggcttcagtgagaacccagaattcctggaggaggatttacattcagaaatgttgaagtgaaaattccttctggttcagcatcttggagttcagcttggaagaacattttacgtatggaagaatttgcttctccaaacctctcttttggccattgtgtgtcctgaaggatgggacaacttgtgctgtagaagcactgcttgcctgagtttgcttcaggcattttaaatttaacttgagggatcatgtgtttggcatgatgaggacca

SEQ ID NO: 32244 - DNA, 2300 bp, Homo sapien
tgactcttttaaagcagtttaaagaagcaatttattaaaagctttaaaagcaaatggaacagaactccctatttttaaggcaataaagttgacaggaagggttgaaacttttctagaacataaaaagcatatttttttcttataaattgacaatctgcaagccagattgtgtagcacgaaggtgccaattctcagatatgaaattgcaaacagcatgaggaagacattatatcatctggattccagtctcagttctgctgtggtctggccatcataccacggtgctactcaatctctctaagactaaatttcttcttaaaatggaggagaacagttccatactgagttgctataaggatgaaataagatagtatatataaaatgtttcatcatagtaaaatattaatctttatttcataaggagcttctattgtacagtctcatgaaaagttacctgaccacattctctgatgattgctctatttaatggcactgatttgactcatttttgtaaatgagaacacataggttttaaagcttctgattataacctttctgctaagaggaaatgtggctttaaaggacagtaccaactaggcccaagttcagaatgggattttgtaaaaaaggccatattctctggcgaacgtaagttgaaagagttctaactttgaaccatgttgaagctcattggtggaaggttgagctccaggagaggaagctcggattgcaggaaggggctctctacgcaagtgtatttgcaccatctggtgtttttttgttccaaggactggtcaggttatataggcacatgtgacccaggctgagcaatttgaaaacataatgttctttagacagcacaatatgctgcctctgggaaagttatgacatcaaaagataactatcaagtgggcaggcagtgggaggtgaggacaaacagaaaaggtgcagtgacctttttataggcaattgcaaaactggtcttgaagctcaaggaactcacctctgtgcataaaagtgtggcttcctctacctctcctggacacagaagacaaatgagaaatatttctgtgccatggtaagttccaagaactgactttcaagacacaaaaaaaggcccgatgctgtgctctgtggttaactcctgtatgaaggggcaggaaggcagtgtgtccccaccacgtgccacaggaggaaagcacaggagctgaagtggcagccagcatggcaggcagtaccactctatggttctgtgttaggagcgtctcgtgtctgaaatgttacctctcacctccacatgtctcctgaagagctgtgaccaccctcccatgccccgctctgctctcccttcattacttcactcatcctggtcatctgctctttgaagttcttaatttgggcaaagggctggcagatgcctgggacatgagtacaaatcccaaactgcacttccgtttgcacccaggatgagacttccctagaggggagatcagtataactgagaactgtggtaacttacccttctaaacattttttccacttgagcaagtggttgagaggagaggaaggaggcagctgcagtggcctctgacccccagaaacttttccaagaggcctggcatcatggaaatttgctcagtatgctttgaggaggtatttcaatcctgctgggaccattctcagagcagttttcggcttctttggacttctaggcttgaatgtcactgtatagaagtatagtattttatttcctaaccagttgttccttcccatggaaaattcatgtaacacattattaggtttcctgagaggtatgcaataagactcccttactgtaatgaggaaggggacatctttttcccccgtagcacataatgataactgctatttttattcaatgggttacatatgcttactggctatgcactaaacactagcttcatacaaaggaatgttctattgttcctagtgaaggaggtttgatgataaaagaccacatttcattcttgggctagcacagctttacttcagacaaatgtattccagacaggagccaaccttctataccattaaagaattaatgaatgcaccattaaagaatggcactcaaggctgggtgcggtggctcatgcctgtaatcccagcactttgggaggctgaggctggcagattatgaggtcaggagttcgagaccagcctggccaacatagtgaaaccccatctctactaaagatacaaaaaattagccgggtgtggtggtgggtgcctgtaatcccagctattagggaggctgaggcagg

SEQ ID NO: 32245 - DNA, 2300 bp, Homo sapien
gaaagcagtcttaagacaggaactaaagggcagtgtgattttacagagaacatctttaatagtggctgggagtttacacatacacacacttgatatgtgtaactatttcaggtcattctttcgtcttgtggaggaagggacagacaaggagaacggaggtaccagttgagcaaactaacccccagctcatgcagagagacattagcataattttgtattgttgctgaaatttcttcatgtcttacttttgatcccatgagacaagttgtttgcttccatctaaaaatatcggatgatgcctctacattgcagatacaagttaaaagtgtttttccagaatctatgttacaaaggaagcccagggacctctggtcatagtgatgaatttcactggtgtaacatccatgctgtgtgggaggtgagatttggacccaaactgtgtttttaatcaccaatttacagtgatgtttcacacagaagtagagggatctgttccacccttatgagatttcacctgacccagagcacttagaaaacaagataaagcagcagcaggagaggaggccttatctgttctgcccacagagctcctggctgtgttctccagctaatacttcttactcccccccacgcgcaatggcagcggcaatgtgcgttataaactgcaagggctgaccacttcttcaaagcttaagttctggacatcacctccctctcccccaaacaagattgccacaggacacgaggacacagaacaaaccatattaacctctctgcttccaatgcctagcaacaatgtttgtggttaccccatgactgtgtgacagctgtgtatgtgttgatacctgcttgtgataccataggtaaaacaaaatacaattttaaggaggataatactttatggcagggaggagcctgtccatgaaggtttcagtaaagaggtttattcagtggttgccatggctgctaatgctcctgcattctgtcaggatataagagcacagacaagtaaaggtaaatgtggtatcagctgtttggtaagggaggtttctatttcctacctagtgaggtcttctctgtgtctatatgcatatttattaccttaaatatagaacctggacatttaacaacagggattctgcttgaatgagaataaagccaatttcaaaccttactgttactttcatctctggaggtgacacgtgagagcaattaagagaggactctgaggggaaaaaattcctacctccgttgaaagaggctggaagaacctttgaagaaagatgaaacttaaactagcaccatcccttcctttagaatattaactggacgcctatatcataaatgcaaaacaaatgcaaatggatatattttctaaaattccaaagtttgcaaagctgaatccaaaatctctcgaaattacagtcatgacgaccgaaagaatcacgtctcttgtctaatcagagacgatgcttatggaaacaaaaacaggcccggaaggaaggcttcagcggcattcaccaccacctgcatctctgctgtgacttacactgagaagagggcatgctgagaaaaaggatggttattttccttgtaatgcgagctttttttttttttttttagctgtgaactttttaccttgcttcattcatgcttcatttgatcaattactaactgtatagcctctgaaaagcgagcgcgggcttcttaaagttgatattttgcttttggattcctctgcattttacaacggggggaggttaattaaggcacctttctgattgaatgggcagagggactgagggtgtgtgcttcggtccggtccccttaataccgtaaggacccaaggaccgcggaggggcgagtggagcgcgacgcttccaccccagaatccgttttcaaaccttagggagccttctttgccattgaaatgcaaatccggtcctgagctcccgggccaatccgggaggcttcctgtgggattacctggtggcgagcgagcgccgagccagcgccgagccagcgcggcccctcgggtgcggcgggcgcggggtggactgagcgggcccgggcgggacgagaggtgggcgagcgccccgcaccctcggcgcgccgcgcgggatcagcgtcctccagccgcgctgccccggcccaccgtgcagctgtagccgcggcgcggtggcgcggtggcgcagggcgctgctgggccgcccattgttgagcgcgttgggccccgccggcgatgccgcgcgccgcctcctcggagcggcggcgaagtttgaacttggcgtcggcctgga

SEQ ID NO: 32246 - DNA, 2300 bp, Homo sapien
gtcccccaagaagtctctctgcaacccaactgttactgatatgggactaacctaggaaatcagagtcattctcatctagttacgctcagatcctacatcctgtttgttttgctttttacttttttgttttgaaatcattgtagactcacagaaaagttgtaaaaatagtacagagatttcctgtatacctgtcacccagctttctctaatgttaacaccctttataaccgtagtacaaatatcaaaactaagaaatcagcactggtgtaatactattagctaacagacttaactttatataaactataaactttactcagatctcaccattctttcccattaatgtcctgtttctgttctaggatcccacattgtgttcccttagcctcctctgatctgtgatatttcctcagtctttccttggcttttgtgaccttgacacttttgaagagctctgggcagatattttgtagaatgcttactatttgggtgtgtctgatgtgttctcatggttacattgaggtgatggcttttgacaataccacagaagtgatgttgttttcttctgtctcatataagggttacatgatgtcaatatgtctcattactggtgatgattaaccttgattacttggttatggtgaagtccgccaggtttttctattttaaagttactatttgtccctttgtaattaataaataaccttggaaagataattttcaggctatggaaatatcctgtttctcctcaaactttcttcactgatcttggcatctatcagtgttgcctgtgacaactattactataatgttctaaatttgattctttatttctttcattttttctacatttattaattagaatttttaaaaaagcctatttctctcctctacttatttattcattattcattcatgtcagtaaggactcttccatatttattttatcctgtgggttataattcagtactactgttatttattttgttgttcaaatggatctagttttggccatcgagagctcttttgagctggctctggtctaagtcctgtttggaaatgtggaaaaggatgaggtagtgatgccttgtccttacacaaaagactgcagaccatgatgtgctatcatcttcttaggagtcttataaatgttgaagtgggaggttgatggtgggtatggagcagttctaatttgtgacatgtcacagaggcctatactgattttggaattggaaagtgctgtggtcacctcatgagctagttccaagtccatgagtaacaggtatatatatattcatagctccttcattgtggagaaaatagccaggaaggatcttctcacttatctataagaaaaaagaaaagccagaagctcatttcccaggtatatataggagccagtgaaacaaccaagttaaacagagagagacacttttagtggtccagggcttaatattctcacagatccaatcccacccttcctttcccgcttagatccctgcattctctcttatctatcaacaggaattcttatgatctaacttatcttggcagaaacttctctctaaaatctatcaagccttgggctagggtaatgagtcggtaaaggagacaaaatgttctagcttgaaactgaagattttccaagccgatgcttttctccataagcttctcattccttcctcaccttctcccacaagtcattataaaaatagtctgatgtaattattaagcatttacccttatatggggatctcggatcaccatgcttcataaagtaaatcaagatgaatggataatagaagctcagaatctgactcctctaattcattctcaattgaacagcaaggttagttctgcggtgctgtcccttggcagtgagttctgtccctgtgctgctgacttagtgttttcatgacagtacatcttaggaagatgcggtgagatgttgttatagaaccactgcttcagtcgactccctaactatgggaggcttaaagcaactagcacttttgtagacagtggcatttttgcatatggaggagggcatgtgtttagcagagaagatcatttaaggagacttcctgatttcagtttgatgcattctatcatcagatgattttccttgcttccctcctcctcttgcccacaaaaatagaattccagcatttctaagctataggctattgttcaagatgccagctcttctcagggagtcattaagggtcaccttctcttcttccctcttacagagcaggaattgaattttaattggccaatttacagaggggactggcatt

SEQ ID NO: 32247 - DNA, 2300 bp, Homo sapien
gcctatccatttaaaaatagaaaatcttgggcaagaacttctagtgatttacccttctttagagaacagtgagtcacaaacatttaaaccacttattccttcatatatgccctccccgtgtgtgtatatatatagagacagagacagacattttttagagcagttttagtttcatagtgaaattgaacaaagtccagagatttcccatatagtccctgtccccatacatgcacagcctcctccattttcagcaacccccaccagagtagtacatttgttacaactgataaacctacattgacacatcataatcacccaaagtccatagtttatattagggttcactgttgctgttgtgcattttgtaggtttggacaaatgtataatgacatgtatccatcattatagtatcgtacagaatactttcactgtcctaaaaatcctctgtgctcgcccattcctccttgcatcgcccctaagacctggcaaccactgatctttttattgtgtccattgttctgccttttccagaatgtcagtcatgtagttggaatcatatggtttgtagccttttcagactggcttttttcatctagtgaaatgcattttagtttctttcatatttttttcatggcttgacagctcttttttttttttttaagtaatgaataacattccattgtgtagatataccacagtttattcacctactgcagaacagccttgttgcttccatgttttggcaattatgaataaaactgctgtaaacatccgtgtgtgggtttttgtgtggacgtgagttttcagttccagtggataaatgccagggaatgtgatcactggatcttatggtaagagtatgtttaattttgtaagaaactgccaaacttcttttaaaagtggctgtgccattttgcattaccacctgcaatgaatgagagtttctcttgctccccatcctcaccagcatttggtattgtcaatgttctggattttggccgttctaataggtgtgtagtggtatcttggttttgtttggttgttttttgtttttgcctatgacagagccctcaggacgtcctgagaacatgttccctagtatcttgttgttttaatttgtaatttcctagtgacttatgatgacagccttttcatttgctttttcaccatctgtatatcttcttaggattggccagtttttaaatcaggttgttttcttattgttgagttttaagtgattttttaaaaacacatatattttgagtttctaagtaattttattttgagacagctttctggagtttacagtgattgatagtctttttcctcttctccagacgggctctgaaaaccatctggaggagcttgtaaatgagaaaatcttgccctcctaaatgtatgaggaggctttgctttggcttttggaagtcatccacaggtgttggaatcccagcaccgaagagcccctgtgattaagccttctcataaagcttccctctccttccctctttccccttagttctgcctctcatgagctttttctgactctaatttctctcattcagctttgtgtttagctttcccaccacaaacaaattgtttctagtgcagttaagattccaggaagattgccagggtgtatccttcaattccataaaaaggaaagatattaactaaaaacatatacatgtgcacacaaagtctccttcacccgtgcctattctcttattaactttttcccctcttcccacaaacagccccagtagacacacagtttcagtctcaatcactcttctacctctctcatttcttggcacatgcaaaatgtcatttccagcatgcagcaaatcacatcaaagtgctgcctgtgcccaaaggccacgtggcttcctctgagctcctcattcctctccttgctagcctgggtgattaattagaggcagataggttagagtgttgggcagttactcctagcgatgacacagaaggaggctgagcaaggcccaaatatggccctttttacccacccttccaaacaccaaacctcttgcacaagagaacatttataagctgggtcctctgcctgtaagcctactaaatgataacagctcagtggtactgactgctttgtctttcttccagctcctctactagtgacctctccaactatgaccatgcttatctaaggcggagccctgaccagtgcagctcccaggggagcatggagagcctggagcccagtggggcatacccaccctgtcatctttcccctgccaagtccaccggcagcattgaccagc

SEQ ID NO: 32248 - DNA, 2300 bp, Homo sapien
cttctgccagcccttagaacatgacttgctgtccccagtggagaagaaaccagaagctacagccaagtatgtcccctccaaagtccatttctgttcagtgcctgaaaatgaggaggatgcctccctgaagagacatctcacacctccccaaggcaacagcccacattccaatgagagaaagagcacccacagtaacaaaccatcttctcatccccacagcctcaaatgccctcaggctcaggcctggcaagcgggtgaagacaagagatcttccaggctctcagagccctgggagggcgatttccaggaagaccacaatgccaacctctggaggaggctggagagagaaggcctaggccagagcctgtcaggcaactttggcaagaccaagtcagccttctcatctctccagaacattcctgagagtctgagaagacacagcagcctggagctaggccggggaacccaggagggttaccccgggggcaggcccacctgtgcagtcaacaccaaggcagaagaccctgggaggaaagccgctcctgacctcgggagccatctggaccggcaggtttcctacccgcggcccgaggggaggaccggtgcctcggcttctttcaacagcacagacccaagtcccgaagagccgcctgccccctcgcacccgcacacatccagtctgggccggagggggcccggcccaggcagcgcctcggctcttcagggctttcagtacgggaagccccactgctcggtgctggagaaggtctccaaattcgagcagcgagagcaagggagccagagaccgagtgtgggcggctctggttttggccataactataggccccacaggaccgtctcaacttccagtacttctgggaatgacttcgaggagacaaaagcacacattcgtttctctgagtcagctgaacccctaggcaacggggagcagcacttcaaaaacggggagctgaagttggaagaggcttcccggcagccctgcggtcagcagctgagcggaggagcgtcggacagcggccgtggcccccagaggccggacgctcggctcctccgtagccagagcaccttccagctctccagcgagccagagagggagcccgagtggcgggacaggcccggctcgcccgaatcgcccctgctggatgcccccttcagccgcgcctaccggaacagcatcaaggacgcacagtcccgtgtcttgggggccacctcctttcgacgtcgagacctggagctgggggcgcccgtggcgtcgaggtcctggcggccacggccttcctcggcccacgtggggctgcggagccccgaggcgtcggcctccgcctccccgcacacgccccgggagcggcacagcgtgacccctgctgagggcgacctggccaggcccgtgccccctgccgcccggagaggtgctcgccggcgcctgactcccgagcagaagaagcgctcctactcggagcccgagaagatgaacgaggtggggatcgtggaggaggccgaaccggcacccctgggcccgcagagaaatgggatgcgtttcccggagagcagcgtggccgaccggcgccgtctcttcgagcgcgatggcaaggcctgctccacgctcagcctgtcggggcccgagctgaagcagttccagcagagcgccctggcggactacatccagcgcaagaccggcaagcggcctacctccgccgccggctgcagcctccaggagcccgggccactgcgtgagcgcgcccagagtgcctacctccagcccggccccgcggcgctcgaaggctccggcctcgcctcggcctccagcttgagctcactgcgggagcccagcctgcagccccgcagggaggccacgctcctgccggccacagttgcagaaacccagcaggctccccgagatcgcagcagctccttcgccggtggccgccgcctcggggaacggcgacgcggggacctgcttagcggagcaaacggtggaacaaggggcacccagagaggggatgagacccccagggagccatcctcctggggggccagggccgggaagtccatgtcggccgaggacctgctggaacgctcggacgtccttgcgggccctgtccatgtgaggtccaggtcatctcccgccaccgcagacaagcgccaggtacgtgcaaccagcaagtcctggcctcgaactgtcccttcctccctagaagctttagtggggctccccaaccccccacactctcacccgctctcccagttcagttttccttgtgattacagaaaagtagcat

SEQ ID NO: 32249 - DNA, 2300 bp, Homo sapien
ggttttataattaaattacttcattcctgtcatgaccatctaggttcatggtggcactgaatccagagtgtaaattcaaacactgtacaagctgttttgcatagcagtgctgctgtgtacacttgggtttgtcaacatcaaaacaaatttaaaatgtttaacgaaaggttgtattatgtaagtacttaagctcatggcaatgaagctaggttgcctggttcctgtcctgatttggacaagaccttcaacttcttagttttgtcatttgtaagatggaaataatagcaatagaaaatgggtttcctgagaggataaaatgaatttatacctgtacaaagttcatagaaaatgcctggcacatagtagatcctcactaaacatttggtattattatttttaataccattcaaagtatacagttcacttaaatttccatctatgcagaaagcaaagaaatctagttgattcaaaaggtgctgataaaaatttattgataaagctaaataattttcattatgcttctacacgagaaagatgtctgggtttctcatttcaaatgaaaaagactatttaactatctcctgtgtgtagcaatcattagctattatgtcattaaacagaattatgtccaattgaagtcacataaactaataccagtcaaattagaagcgctgatgttgcccggaactgaaactcagacagagctctgaaggattcaggcttatggagaggtgaggggtgtgtgtgtgtgtgtgtgtgtgtgtgtgtgtgtgtgtgtgtgtgtgtaatgctactatcactcatgaattggaaaaatctaaatggaaccatgcagtaaactttatcaaatttctgctaaatttggtcacgatgaagtcactgagttgggttaaaaagtattgacctgactattcttccttcatgatatgaaaatgacacttcctgatctctagctaccaagcttgactcctattttctacttttttggggggtggggtggggtgggggttgatcctttcatttattcagactttactcatcatcacattctgagcccctttctgcatctaactcagcgtcctcacacaactcacaggctagaaaggacttcaaagtgtgatcacagcactgaggggtcccaagtaaggcaaaagcgtctgggggagtggtaaggatccagcagggcctcataaggtgacatctgagctgggtctccaagaatgagccaccacttagctaggcctctgtttccatattgaatcactggaatacaatttgctgaattcaacagattgatgacctgggttcaggttaattagctttgtttatgttttacttttgttttctctgtctcccccgctagactatcatcccataagaatggagacctctgcctgcttcactccctgccgtgcttccatgtctggagcatgcaataggacctcagtgaatgtgtgctggaagagggaacactgatcggaatttgtcctctgaatttgtcccctcacgctgcagtgtcagctccttgaggagagcaacgtcatcagtcctgttgatccctggatcagcacctagaagggtttggcacatggtaggtgatcactgactggctgattacaacaggacacagcagcaggccttgaagctgggagtgaaccccaaatcctaccttcaagcaggaagccctgttcctttgtattatgcctgaaatggggcctgtgaaggaggcggcaggagaggggaagaagtgctgccttgggttcttgtgtacacagaagacagtggcgtgggaggacatgagcaggcatatccaggaaatgaacagagggctcgatcctgaacctgctctctcaggtgtcacaccctctcccactggaagcaggtgagcagctcccaagttcccttggagatagaggccacatgacctcaacctggccaatcagcagagcccattctcttcagccatagtgattggctgaggtctgggcacgtaaccagtcgggtgccaaaggtcagacctccgggttggaaccctgggggaacagaagctctatttctgttaggttgctagaatggttggtgccatcttgtcaccttgaagggaaagcccacccaagaatgacaccaacacagagggaagtaaacatagccaagaggtcagcagaggtggttcctggtgccattatccagcacccagctacagaccaggtgaagttggccgggcacatagtcacaggcactggagtgatccataggtcacacacgaaagtgtgcagagcaactccagctgtgctctttcg

SEQ ID NO: 32250 - DNA, 2300 bp, Homo sapien
tctttttataaaactctactcacattatccagtaggaatgaacatctcattccttcacagaattgttttgagagttaactgagaaaatactgtattattattattagaatgacctataatttctgtccaaactgagaaacttttgaggctgggaaaagggggtttgtgctgatagtaatgatgtcaggacaataggaaaaacaaggacttatggccaccccagctattattgccagtaaactctgctttagacatattaagcaatcaagaagtggtcgtactatcacgcttctgtcactagactatgaatgtctcaaggtaagagtgcttttttgtctattagcttctgtcacatggtctggtatattcaataaattttgagttggagatgagggtaaagactaggaaatgaataatttttattgccatactaaggtaatgaagagtcaaggaggtctttaagcaaagaaaatttgcattttagaaaacagctatagtgaatatttggcattgttagtaatttagggtctattccctttttaattgaaccccaatttatttggagagcttttccaatgaatgtttcaacttggtaaaaagtaaatgcctcttaaaaaagaggttctgggccaggcgtactggttcatgccttgtaatcccagcactttgggaggccaaggcgggcagatcacctgaggtcaagagttcgagaccagcctggccaacatggcgaaaccccacctctactaaaaatacaaaaattagtgggatgtgctggtgcatgcctgtaatcccaactactcgggaggctgaggcaggagaatagcttgaactcacaaggtggaggttgcagtgagccgagatcgcaccagtacacttcagcctggctgacacagccagactccatctcaaaacaaaaccaaaaaaagaggttcctcgctggctgtggtagcatggtgtagtcccagctactcaagaggctgaggcaggaagatcacttaaagccaggagtttaaggctgtagtgcgttatgattgagcctgtgaacagccaccgtactccaacctgggcaacatagcaagatctcacgtccaaaaaaattaatttaatttattttcaataagaggctcctgaagagacgttccatcacacccttcctttcatcaccacagtacatacattcttaagaaagtatgtgatctaagcttggccaattagatgctgttacatttgaattttgaatcaagagacacaaagacaatacaaattgttacagtttatgcaggccataaattattttttactttttggcaaattgttacagtttatggggtctacaatttatttttttattttctggcttaagttatctaggatttgtttctgtggtttacagtcaaagaacccaaagaccagatcactcttgactaccataaaaatgattaattataaagggatacaagaaaaacaggaggctgggcacagtgtctcatggctgtaatcccagcactttgggaggccaaggtgggtggatcacttgaggtcagaagttcgagaccagcctggccaacatggtgaaaccccatctctactaaaaatacaaaagttagccgggcgtgatggtgggcgcctgtaatcccagctacttgggaggctgaagcttgagaatcacttgaaccggggaggcagaggttacagtgagccgagatcgcaccgctgcactccagcctgggcaatagagcaagactgagtcacagaacaacaacaacaacaacaaacaaaagcacacacacaaaacaggtgataagttagctattgccactttaattttggatggtttaactgactgtcctgaactgactgatcctgaactccttctgcaacacaatatgtaaaaatgttcattaaaacattgtaaaatgcatctacatttgagaggaaaaagtaaaactctctattcacagataacacaaatatacagaaaatcctaaggaatccactaaaaaatcattagaagtaataaatgaactcagcaagtttacaagatacaggatccactgagattctgataaacatggaaggcaaaaacattgaaaccgtcatttataaactcacataggctccagtgattatctcttcttttctttgttaaaaaaatgcatttaaaaatcattctagaaaattgttaggcaatgttaaatttaccaataactctgactcttctttgcccctaccactttttattatctttgaaaatcaagacaatatttgcccttcttcaatcttttatcatttcttat

SEQ ID NO: 32251 - DNA, 2300 bp, Homo sapien
gtgctgctgctgtctgatcctccttatggagaaaggacaaaatgtccatgtaccagagctgcagaagaaagtatttgtcttccccctccctttgcacagcacccatctgtgtgtaatcttattattatatattttttgagacagggtctcactgcgtcacccagactggagtgtagtggcgcgatctcggctcactgcaacctccgcctccagagttcaagcgactctcccacctcagcctctatagtagctgggactacaggcaagcgccaccatgcctggctaatttttgcatttttttagagccaaggtttcaccatgttggcccacctcagcctcccaaggtgctgggattacaggcgtgagccaccgcgcccggcccatttatgtgtaatcttaattcaacacttattgagcgcctactgtatgtttggcataaaatggtggtccctaatttcaaaagatttggagtctagagggcagaaattgaagaggttggtgctctgcacgtctgagtccgcccacagactgaataaataagctctgcgtcggcgcccctcacctttctttcatggccagacttttctctggcggttccacagctgtcctgacagtggaattcagacggggtgaccaagcccctagcccacctaccagcgaaatccagcatcagttccagggcagccggacccgcgcccggggacgactgacccttagcccaaggctgcgggggcgtcggagtcctgaagcgcaggcgaggcagggccagcgggacagggagactcaaggccccaggggatctgggcgtttgaagactcaggtcagactctgaggcgcccgtctaaagagaccggttgtcttttccctaattcaggaggccaggctgtcccttggggcgtcgtaccgagggcagatcacagcccttccctcctcaccacactccctgtgcttccacccagctggttccccgccctgtccatcgctgtcctcaatcgcttgttgtcgtgggcccccctctccggcccacgtggggccgcagggatccacagctcatctgacacacctcgctgccctgcacgcaccgggacccctccattccgccggcccctcagacacgcagtaacaccccaacatctgctgggaaaaaaatcttccccacggcggaggagttctcagtcccacgcgcccagagtcgcacccactcgagccacccgcctgttgccgtcgccacgccctccagccgcagccccagcgcgcattcctacgggtcgccgggtctgtcgccagcgatcgaatgaagtcggctgatcccccacgtgtggctgctccagtgacacccaggggaggcctcggtccttacccctagagcaaccaatggctgccttaattcttcagcgggggcgttctttttcttcctcccaagcaggcggccgttgggtcggccgaaggcagcagcgactactacggctcttcctctccaatgggatcccctgtctgcccgcgcgccacagtgacagcttccagatgcctgtctttagtctcccttctcaagggaagcggtgggcgaccgaggtgcggcctggagggcccccatgtgggaagggaagacttgcggaagggcaattcttccagtgcggagacgaggaggccagcccagccgcacttcggtcgcccaccgctccgcctggtggtccgcagccccttccaggccggcttctccgggtggggcgtgctagtccggggctaactttccgccacgtgctgtccctgcgacccgtctcccccggtcgcccttccttctcccggcggccgctggagctgcccgcttcgtggagccggtggcaggccccggggctgggagctcgcgcccaggcttttactcagattccagcacctgatggagcagggggtggcggccagcgcacaggctgtcggcatctcatggcagcggagacggtcgtttggggacggaggggcgagccccgcggccggggccagtggagctgggctcggagcccgcccaccatcctcccgcccaccaccgcggccgggcgcgcaggctcacaccccttcctggggaagcgaatggtcccttccaggcgggtggccatgttgctctaataaagcgggaggggcggcggcgtggggggagcagatgccgctggctgccagcgggacgccggcgagcagagcgcagccgcgagggaggcgcgagggaggcgagccggagcccgagcactagcagcagccggagtcggcgtaaagcacccgggcgcagccggagccggtgccgcagctgc

SEQ ID NO: 32252 - DNA, 2300 bp, Homo sapien
agagtaagatgaatatacttgaccaacttttatcctataagtgaatcatcatagttacaggcaagccatataaggcttttctaatcagagaaagctcaaatccagaaagacttcatcctccttcacttttgtattatgttagaaagcaatgagtatacaatacagaatttataactagtaagtagattttgtcattatagtgggagggttgcccagagcttttcttttttccatagaacactaccatccttaaagtcattatagcagtccttagaagaggggatgctcctaggaacatattgggattagaagtagttgaaagggctgttctatattggcaagtttaaattgagctggaaatctaattgaaaaattttccagattaagaaagaaaaaaggtatccctagggctaatgtttctagatttctacctgcttctctccatcatcatatgctcagccaccaccaccacgaacataaggctgtttttttctcattgccaactgtctttgactcaacaataagaattagaattaagagagaatttgcttggtgttattttgagggttgggctgcagttcttcatagccccacatttgggtgtcatcatgtgattggtacagtggttacagatacctgctactctgctttgcacatgggagatctcagtaaacacttactgagttgaattatcagtgtaaataaggtcatttgacatcatttactttcattgtcacaaacttcacactgaagctgggaaaactatctaagaagccacaaatgtttggcttcttgactccagctggataaagaaaaataaaaacaatatggagagattaatataaccataactggaaaatgttaggcagtcagttttctgtgtaatagtaaaatcaggctgctgtcttggttgagtgcaggtgttggaaccatacagacttgagttagaaccctggttccaccacttagcaatgacttcaggcaagttactcataaatcttatctaagcctagtgttccatcttgaacatggaggaaacagtagtacctatttcatgggagtagtactagggtttaaatgagataatgtagccgggcgtggtggctcatgcctgtaatcccagcactttaggaggctgaggcaggtggactatttgaggtcaggagttcaagaccagctcagccaacatggtgaaaccccgtctctactaaaaatacaaaaattagccaggtgtggtgacatgtgcctgtaatcctagcttctcaggaggctgatctgggaggatcacttgaatccaggagatgaaggttgcagtgagccgagatcgcgccactgtactccagcctgggggacagagcgagactctgtctcaaaattgaataaataaatacatatatacatacatacataaaagagataatgcactagaagctcttgccaccggggttggcacaaagtgagcactcagtgatgttagtgattattgtcatcaagagtgttattttgaataatgtaattcttttctacgacatggtatcatattgatgttgaattaactgatcttttaggtaattcagtgtaaatggaatcacttgtttcaagtaacagaaattcaacagtatagtcttttatcccttaagtaatatagatttatactctaacatttaggagagaaagagacaaagttcatgttcttgttcttgtaatatacaaactgagcacaggcaatcttacaagtacaatttttctattcagaggtaaagaagaatctcttgatctgtaaatttgaaatctctctgctaaatagtttctgaaattcattgaggcatttttaggaaggtattccatagattacacatagaaagaattatctcttcacagtgacatttctggtgacagtttttcttttttaaactttataatcatgactaataaaaaatactgatgaattgaactgatgtctgagagacattgacacattctctgatttttcttttgtggttatgtaggtgagacaggcattggcaaatccacgttaatggacactttgttcaacaccaaatttgaaagtgacccagctactcacaatgaaccaggtgttcggttaaaagccagaagttatgagcttcaggaaagcaatgtacggctgaagttaaccattgttgacaccgtgggatttggagaccagataaataaagatgacaggtacatcttgggattttggggggacatgaatggatgaggagatagcaggatccatcccaggtaaatttaaaggccaaatgttttggggatttttt

SEQ ID NO: 32253 - DNA, 2300 bp, Homo sapien
aacagaaccatatttggactactattgagaggaggaggtgctaaaagctaaaaatcagacacaggggaggcaggggagcaattgctgtgagctgcttctcttaccctttgggataagaggctgctggggaagagccctaatccccaaatctgcctcagtgtcaggagacagaaggatcagccccagactcaaagggcaaagggcatgggtggacctcactggagtggcttgctctacttccctactggacatgagctccatagcagaacagataaccagcagagaactgggtgaatgtaaagttcctttttttttccttaggtttttctaaaaagtcaggcttgattctatagtggtggttgtttattatataattatgaaatagttatatctgacttttatgtgccagccctttacatgtattgcatgtattggctcatttatttgtcacaatagctctctgatagaactactatttttgtctctgatttacctgtgaggaaattgagacacagagaggtttagtgacttgcttaaggctgtgcagctagtaagttgtgcggctgtattatggttttaggcttgaatccatgtttctaaccaccatcctctataactatctcattaaatattattattattatgcaatatatgtctatatttcaagattagaaaatatagaagaatcttattgctcattcattcttcttattggaattttgcctgtcatgatttggaactttattattgctgaggtacatcctaccttttttttttttttaaagcctctagagattttgtctactctaattgaaccaatatattgtgataaaatcaccaaagaaaaatatcaaaaagctttttatgactgctttcagttttgctcataagtttgtttgttgttattgtttattttggggatgtttgtttttcttaggatgtctgcgtcatttttattataaaagatttgtggttccctttcaagggtttcagtttaacttatgggtatgggatttgggtgttgaaaggtttttatttttcttaaaacttgtatcttcggaaaggcaataaagtttggggagaattaactcttcgtattcctaatagaacagtctctttgttgctaaaacgaacttcttctgagtagtccctttggagaccagaaagaattagtgggtttcccacaatgacctaatatactacttacttcctggacatgtggtttatggaatgtgtatccccaatatgctattagtcattgtgtttatggtcagttaataggattacacataattatccaaaacagatttgaatgatttggtgagaagagagggttacgacatttacctttaaatcatgaagattttgagttgaaaggaatcttgaagatcataatagtctaggcgcctcagttcctagatgagttatggattatgcacagggctatgggagcacagacagcccccatctctggaggaatagggcagatgaccagggaatagctcgcagtaggtggtggtgtcatatcctgaaaccacacaccagtttcattttgtgcaccagtggcaatcagtagggagaggctatcacagtcacttttctgagatggatttttgaggcccagttttggcccagcaggaaagaatgccacagtctcttagcaatatcttccacggataccccttgggggagtggcagtcagctccacgtatgtacagtctctgttttagaggatgaatgttagccaggagaagagtaggaaaaagacaggtttctcgcagaggggccagcgtgagcaaagacacagaggaaataagggcttgacatgggtggggggcgggctgctacaaatgattgggcgtggctgggacaggagaggtgagcctggagcgctgttcagggatcaggtgatggaaggcctggatacctaggtaaggacttgggctttagcccttaggagagaagaagccattgtgatgttgaatggaggattgtcctgtgaaagaggtttgagactagaaacatgctgtttctgcattctagctataagccgatagtagaatatattgatgcccagttcgaggcctacctgcaagaggaattgaagattaaacgttctctcttcaactaccatgacacgaggatccatgcctgcctctactttattgcccctactggacattcactaaagtccctggatctggtcaccatgaaaaagctggacagtaaggtacttgctgccattctgattatcatccactctccttttagatcttctttatcctaatgccctaatttgt

SEQ ID NO: 32254 - DNA, 2300 bp, Homo sapien
ggctcctttggcttccagcaggcacagacacagtagtttacagaaaaatcttctaatggcctggaaggatcactgcagctagagtactcttcgcagaataaatagaaaccctccttcatcccatctgattcctcagctccctgggagctgtgccattagccatgatagtggagagatcacgggcagtgagggccgcttccgggtctgttgtgtccttggaagcaggggcagacctccctgttctcaagagtgccccattctccacagacattctgaaggaagtagagtgaggaggcttcctaatcgagggctgagtatgcagacccagccggataatatccaacactattattatgtttaatagagttcattgaaaacggaaaagaaaaaggcaaaacaggcacaactaataaaagcaaacagtcaaccataaagcaggttaaactttcaaagaagtgatattgttggagagttggagagctagctagcatctgaaaatgataatatcaaagttttatttatacaagtaaagggaagggttaagcaaatgtatggtcatttcagaaaagactttcaagtccggctagtgaggaaaaagaggttttaaaactaaattgcttgatttctctatctcctctgatcaatttggccaagaaagagtgaatctctgccattttgtctatgttgacattaattaaatactaaatgtgtatcaaagatagccaataagaacaataggaagtttcttgttcctctggtcctgatccaaacatttcccccaccatcaatgatgtttttcttagtctgcaacttgctggaggaagcccaagcatggtgagcttaggagcaggttgaggaataggttgaagaataggtctttctctcagcatgtcatctcattcgggtttatcaggatttctaatttggcctttggataaaaggagaagcaaaggcatgcagatgggacctgaacacctcccgaaagactctctgttccctggctaggacagcttccttaccgagtctgttttctctcacctgaactgggtgaagatcatagttctatatatcggatgtcagtaacgtcttattgaaacctgtgtttacagggattaggggaaagttaatcttaaaatgcgaatttaagaaatgtgtcctgtgcacagggctgggggcagccggggaaagaatgtccacatggggtttggaagttgtgctctggggtatccttggctccctttctgggcttcctgccactaatgtcaaattctgagttctcccctgttctttgtaactgatgctgtgaaagtgagccttgcctttggcgctcgattttattctggcatgaaggagtaatttgatggaattactgattttcaaaagaattagttggtgtgattttgaaaaattttacagtgggcaacaccatttttgttttggctaatacataggttctcctctcagcaattttcaggtcatcagaagaaagaaaggatgttgggctgcatagaactgaatactccactgctcttacaaaaactttgctgttatactgttaggaggtgcgaactcaagagcctaaagtagatgggaggggtctaaaaggagtggttggtcattcaaagaataagttcctttgttatcactatttgtcatagaagagtaacacttcctttactctgtaaagaaaaatgaggtagcataggagaggaaattacaagtatactttcagtgcaggatgggaggaagtaaaagtgtttgaatatggaactaaaagtttatctcaggtcttcttaatttttcacctaggtagaaagtctgattttcattatcatctctaccccaaaaaaaaaaaaaattgtaggtacataggaggcgtatatatttatggggtacatgagatgttttgatataagtaggaaacatctttattttttacagtaaggttttgcaatttttatttgtttgctatgttttattcacttgtctatttttcttatgttggaattgtgtaaaaatggacgtgtctgttttacaggtgaacatcattccaataattgcaaaagctgacaccattgccaagaatgaactgcacaaattcaagagtaagatcatgagtgaactggtcagcaatggggtccagatatatcagtttcccactgatgaagaaacggtggcagagattaacgcaacaatgagtgtaagtcctcaagtcaaatgggaacaagtgatttttatgaacgcctgtcttagtagcagcattgtagagtggctggagcactggactgactaggaacctg

SEQ ID NO: 32255 - DNA, 2300 bp, Homo sapien
gattatggagattcttattaatactaaactaagcagtttagcttatttctggtaggcattggggtgccgctggagagagcagggaaggaatatatgatgctaactaaggttattttgacaatgctgtaattgaaagtgaggaagagagacactttactacaggtaataatttaaaggccttccatgtacagtcattgtgccagaaacttagggataaaaagatgaatataatacaatgccacacctttggtcttgtagtctataatggaaaggctaaatggttaaatagattattatactgaaatgtggtaaatacgttgaaaggttttagtgtcttttttttttttttttaagacagagtcttgctctgtctgttggcctggctggaatgcagtggtttgatctcacctcactgcaacctccacctcctgggctcaagctattctcatgcctcagcctcctgagtagctgggattacaggcatctgccaccatgtcctgctaatgttttgtatttttagtagagaaggggtttcgccatgttggccaggctggtctgaacttctggcttcaagcgatccacctgccttggcctcccaaagtgctaggattacaggcatgagccaccacgcctggccataaatatgttaaaaggttgatatagaaacagatgaccgtggcatttagagttttggggtgttgagggagtcaggggtaactccagaaaggattgatatctgtgaattgtcctgaagggtaagaaggaatcagcaaaactcccaaattaaaaactttaccaaaaacatttcatcttagtgctaagtctactattttctacaaaatacatatttctaaatttttcatttactattttaaaattcttagcttccctcctcatccctgattaaaaaaaattttttttttgccctttggcttcttacatttttaatgaatgtgtttatgagtactttggactccactgaaaaaaattagaagaggccaagagagtaggatgaagggccttccagacagggggaatagactgaaaaaaaaaaaaaaaaaaaaaaaaaacagacgttggatacaaaaaagtagtttctgttctcatgtaaatgttcagcatacattgcaaatacaaaactcaagttccaaagataattatattagaaatacagatttggacctaatttctaagatgatgttgatggatgggtagctggataaataaatgagttggaggtagatgtggggagagaaaagactcagcggggacggaaagcacagggaggaaaaatggccaccagagataacagagcagcctatgttaattaatgatcaactgtgtgtggctttttttttttcctggcccagatggatagctcccagttgatccattgtcgggagcttgtggcacatcacctttctactctgcagtcttccctgcctctgaattccgtttatgtctaccgtcccctcaagcacaccctggtgacctgtgacaaaggagtgttcagattacatccctcctctgtcccaggcccagacttctccaaggacaacagcaagccagaagtgccagtcagaggtacagcagccttttaccatcatctcccagctgccagtgggtgcaagcagacctctactaaacgcaaagtagaggaaatggaagtggatgacttctatgatggaatcaaacggctctataatgaagataatgtctcagaaaatgtgggttctgtgtgtggcactgatttatcaagacaagagggacatgcttccccttgtccacctttgcagcctgtttctgtcatgtagtttcaacaagtgctacctttgagtgtaaactaaggtagactactttgggaatgagaacatgcaaaatcaggaaaggctgtagaaggaaatataccttaacaggctgatttggagtgagccagaaaaaaaaaataaaactctcattatttgtgtggctaattataattcagcgttatttaagcacataaagaccaaaaaaaaaaaaaagaaatccaaaagatccaaactttttttaaacttaaaaaatctctttgtagtatgtcagttgcactttttttctgccataatgtaacgtagcttgccccgtcaaaaattcaattaaaattcatggccagcaatcctgttccccctcagcatcctgatttaattttcctgttgcttttgcttgcttctccatttaatagttactgaactttatgcatgttgatctatattgattttcactgcagttgaatgaacaaattatttcagtgtgacagccatgac

SEQ ID NO: 32256 - DNA, 2300 bp, Homo sapien
tagttgaatttggtgtttttctaagaaagttataattgatcttatagcaaacattttaagaagtatgtctgaagaaaatgaaccaggcaaaaaaataattttttttttaaacaagtatgtcagtgcttccaagaattttaggctctagtttgtgagcagaggggagctcagtcttttcataaaaaggttgatgatcagagcagtatgttagctagagatctacctatgtagtgtaacatgggctgttttttgttttgaagggatatcttaattgtcttagattaaaataattaaatgctgtaatgagaataaatcctaggaggtagttgctacttagaatttttagaaattatgataaaccaccatttaaatgaataatatgacacagaaaatttactttgctcaccctggagtgttagaaagaaaagttgaatattaatcactcacattagactgtgaagtagaggaataggcttaatagaaaacctcctacattacattatttttattggaacaaatgacatctctctaaatgccttctgacttattctctgtgcttactctcaagatagtacagaaaaagattgctttaaagtgttagtgtcagaggacagattttgaagcataaataataatgttgtaaatagcatgtgtattctgtagctttgagatcatgttttcctagtgaaaaacactggaaaatctgatactcttttgtaagttttctggtgctagaggaagagagtattcactgaaacttttttttcttcttagctgaaggagtattgcaaacctgggatttgacagaatctttggagaagttatttcattcacctcctttattttatagctctggtgtagggaactggagactttcttagagccgtgtagagctacttagtagtgatttaaaagaaccaatgctttttttcataccacacaaaccttaaaaattctagttcagtggttttcataatttgttttagaagtggaaccctttcccagtcccccttccccaaagaaaatcttgtacacacacaatcccagaatatagaatagaagaacggagctatacttgtgtttaagggcagatctccactcaacatagcgttttcccttccatagctagaaatctacctatgtagtgtaggtttagattatattatgtaggtagtctttggacgtagtttgaaaactggaaatacagtgaattttttttctttttaagagatatgccccatgtagtatataattgcagtggggaagttagtgaagaaaaggaaggtcataaatcttggtagagacttttgggacttgttctagcagttctctaacaccaacccatgtggtccaaacatggatggctcctagttctttaggactcatttctgtttttgctaagtttgctgtgttcaggtagggaacaccaggtctaatatctttgtgtttagacgtgtgacaaggccacaatatcagatttcttcctagttttctggttttaatataggaaagtcttgcatcagattgatgagatcatgccaaaattatttgcgacatgattcccagtgtcttggtttgaggagagtccatcacagacataccgtgctgtgaggaggccactctcactagttctgcctgagcccccactttgagacaaagtatggtgagtgttcccaggtttgaaaggcaatcttccttttgtccctgttaacctcccactacacccccttaagctcttgcgccacctgttggtcaccattctgggatggctaaacctctttctctccttagccttataaactcaggctgttaactctacctagattagtgtggtggtctttgtagttcctagctgggcagtagtcaaagtacatgttctagtttaaaactagagtaggtgcagccataaaacagaacaaaatcatgtcctttgcagcaacatggatgcagctggaggccattatcctgagtgaattaacgcaggaacagaaaaccaaataccacacgttctcacaagtgggagctaaacgttgggtacacgcggacataaagatggcaacagtagaaactggggactactagaagggggagggagggaggggagcaagggttgaaaaactgttgggtactgtgctcactacctggttgacaggatcacttgtactccaaacctcagcatcatgcaatatatatctagttaataaacctgcacatgtaccatctaaaagtaaaaagaagcaaatttaaaaaaaaaaaaacaaaaaaacagacccctccccaccagtctcctggttcttttt

SEQ ID NO: 32257 - DNA, 2300 bp, Homo sapien
gtttgagatatttatgaatttcctactatgaaatgtaaagacgtggcttttattttaccctcttccaatatccatagttatgtctccacatcctgccaatgtagttttatcatattgcgatccctatccagtcttttcattattattgctgtataaatattgtgatacattactttcttaaattcttttttctgaagttaattacctttttagttgcttacctttcaacaaatccagctaagccttttcacattcttttttgtttgtttgtttgtttgttttgagacggagtcttgctctgtcgccaggctggagtgcagtggtgcaatcttggctcattgcaccctctgtctcctgggttaaagcgattttcctgcctcaggcttccaagtaactgggattacaggtgcctgccaccatgcctggctaagttttgtatttttagtagagacgggggtctcaccatgttttgtcaggctggtctggaactactgacctcgtgatctgcccgcctccacctcccaaagtgctaggattacaggtgtgagccaccgtgcccagccaccttttcacattctttagcagtttcttaatccaattttctacacacagtcaaacctcaagtctgtagtttgcttctttttttttttttttttttttttttttttaaacctagaagcctgcacggtggctcacacctgtaaccccagtgctttgggaggccaagccaggaggactgcgtgaggctgggcaacatagcaaaactgcatctctacaaaaaaaaaaaaaaaccccacaaaattacctgggcttggtgatgtgcatctgtagtcccagctatttgggaggctgaggcaggaggatcacctgaacccaggagttcgaggctgcagtgagccactacaccactgtactctaacctgggcaacagagtgggactcttgtttccaaatacatataaacataaaacctagagacatttctcttggactctatgttgtcttgcactgctaaacttgctatttagacatgctgctcattttagagtgctagtcaatgtactgtggagctttctaggtgagcactgttcagtagaacttactgtattaataggaatgttccttttgtgcactgtccgatatagtatccactagccacatctggttattgaagtaaggctattgtgactgaagaaatacattttttttttttggtttgtttgtttttgagacggagtgtcaccctgttgcccaggctggagtgcaatggtgtgatctcagctcactgcaacctctgcctccctggttcaaacgattctcctgcttcagcctcccgagtagctgggattacaggcgcccaccaccatgcccagttaatttttgtattttcagtagtgatggggtttcaccatgttggccaggctggtctccaactcctgacctagtgatccacccgcctcggcctcccaaagtgatgggattacaggcgtgagccaccatgcctggccaatttttaaattttattcagctcatagttaaatatccacatgtgtagctaatggatactgaattggaagcgcaatttaagatgatttcatactggagggtatggtttcatactgaagaagtgggaatgggtaggatttaatgtaatatattttctttttaatgaaggaaaaatgttagtggtccttatctgattaggtttttaagaggaatgtttggaataactacttctaagaattcctggtaaaaaagccagtgacaaagttttgacaatttgaaacagtaataacatgttttgatcagagtccaaaggttccatcaattacatggccttgtttttattctctttataactgaatttcagatttcaagtgtgaatgttttagataactgattattttggtattttaatacgatattttaaagagctataaaatcctatactgcctcatagcattcttattttgttttatgagttgcttaattagtactttatataatgctacacttattctataactaattttaaaacttacttgattctgtaggtagctacagcaagctgggtagcaggcagatccaaaggatatcatgaagtttccagggcctttggaaaaccagagattgtctttcctgttggaaaaggcaatcactagggaagcacagatgtggaaagtgaatgtgcggaaaatgccttcaaatcaggtaatgatttttctcttaagacagatgaattttattagaaataaacatactactgccatacataataatatcttgacactacattggagg

SEQ ID NO: 32258 - DNA, 2300 bp, Homo sapien
gagggagaattgctagaggccaggagtttgagaccagcctggacaacataggaagtctcatggcacccccatctgcgccacggagccagaccccatctcttaaaaataaaaatttgattgtacatagatgtatcacatttgatttatacaggcgccagctgatgaacatttaggttgtttcatctttggctattatgaataatgctaacgtttgtaaaaaagtttttgcatggacaaatattttcctttctcttgggtatatatttaggagtggaatttgcattattcttattggagtgaaaatcagaagcaatttcatggtctaacaatggaattatgttacactctcaatagtattatgcagaaatgctacagtctcaagagtaacatgcagaaaaatggtggcttttttgaatgaagaccatataataataggctacatgaagtgaaaaaaagaaaaaaaaaggatacaacccacttgaaatcctcctagggcttcccattccttcttctgttctatggcatctgtcctctgcttccacatcctgcctcagttgtctgagggccagccacactagctttcagagatttttagaacgtctcagcttcggagccttttcacataacttcctctgcttgtatcattctttgcccagtggtttcaagtctcatcttaaatgtcacttcttcagaaaaaccttctctgatatcccaaaccaggcggaaaggcaagcgtttccacagcagccggcgattttccatcttaacggttttaataccagaattgtttacttggtcaaatattgagagccttttatacacagggatagagggtgaaacatgcaagatccctgccgcctgcgaccttatattctagggaggggatacatgcacaagtaaacaagtaaatgtacttggtaattttacatagtgataattagctcaatggttatcctctgtttggactgtaaactccatgaaggcaggagctatgtctgtcttggctacttccagtttgctgagtctggccactaaataaactcaacacatattttttcactgacagttaaaataactatataaaaaacaaatggaaaaaacaaacgagacttctataaatggttgagatctagctcttcctctttcaaaactctgtaatactacatatttttaaataattaaaacaatcaaaatagcaaaaagttaccgtttgtactaacagaaccccaaataaaacccatttatgtcaccacacattctttaagcacctggtaataaaacctattcggaaatactcagacgtgttggttgagtggataaaatccccttgccacattgccaagcaggttcctcgccgtcagcagtataatttacagtgtttcactgaggccttaagcacccatgatttgattctccctaattttccgattcctaaaaccctttagaatctccctccacccacacaatgtggcagtgagaaaaaccgcaattctatttacatgtcaacggtaagaacacgtaatactttgctaggtcaacaaatctgcaagatctccacccaagagatcagtagccccttcccagtgaatccttctaagagcctggggacgagtagggctagataaaaccaagctgctgtaaagctggaccacaggagcggatcgtgaaatcccctcccccaagcgcagcgctcggccgcttctttcttccccaggcgcatgcgcagcgcactctccggccaccgcacgccccctcagtgggggcccagagacgctgacgtcaccgtgcggtctgcaagcaacccttccgctccttcaaggaaaatgagtccacggaccttcggcttttcttagccacgagaaaacgtcctccctccttccatcctagtgccaacgacttccccagcccgtctcctttcggccgcacttctctgtactttcgttggaccgggaaggcggcggggaggaacaggaagggtgaaagaccaagtccgcgtagtttacaaggagtgggcgagtctaggaatcggtccgcgagggcggagccgaggaagccggcacttcttcctcccttcccctctcttcccctccctccccagccttccccgcgagcggacgcggcagcgcctctgtctcgctttttcttatttttcccccctttcccctttctttttttttttttcttttcttttctcccctccccccctttcaccatttcccctcggaggcgctttccccgggcaggggcagagccggtctcaccccccgcctctccccggcccccgccgccctatggcgaga

SEQ ID NO: 32259 - DNA, 2300 bp, Homo sapien
aaaattatgtagcctaagcaaaggacaatttctaaatcttttcctttttgttttatatagtctgttatttttaaagtcttctaccacataaatttgcatttcctctttcacatcacttataaaataacgtatgttccttttttacctttgccttcttacttgaaaaaaacatccccagtctccttcatgctttgatcacaaactcttcatttctctgatggtggatagttggtcgagctgctttctgtctgtgggccctgtccactcagcctattgatgctctgtacaatgagctgtcatctctgtaattttaatcttagctctagtctctaagttagtttcatgctcctattatgtttatcagcatagatttccagcaagatgattatgtcaaataaaagttatcacttaatgtttaaaagataaaacaagcattggataaaattatgtagcctgtaaatcatttaaaactggtgtgctaattttatcttattttccaaaaccctcaccaagctcacacctctctgaaataagtgttagctttttgggctgccttcccccagttgctctgtgctccaaacagatgcctgtgtttagtccgagctaatatgcaaagggacctagttttaaaattccttagctgctccgcaaagaagagcgctgccaaagctatgttgtgtgccttcccatatttcacaagtaacaaaataattcacagaaaacacatagaagaacagaaaggagaaatctcttcccagggactatctgattatgtagattagaactcacgaatatggtattttctaatttaggagggagagagtaaacaaataaatgttccagggcagtcaaccacatgccccattgatattccgtgtgaaagtgtctctggcctaaggcacctggtttgtttgctttttgtcccgtcctgggagacgtgtcgcctataataacaacgctaattataatgaacaataaatgataatttatgggttaccaaggaccaagaagctctgggagtcttcattaaaacaacagcactacaacctctggaggtacgccgtaattattagatgtttacgtaccctcatcagcgtgctaagtttttattgaaaagcccctccttcagtccctcctgaatttttttaaattatggaaaaattccaagacacagaactagaaagaatactgtaatgcagcctcgagtacccatcacccagcttcgaccctcaactttttgcctatcttatttcacctctcttctccatttttttttctcttggactgtaaaattttaaagcaaatacccaaacttgtagcatttattgaatattttagtaaacgccccgacaatgttataataatttggtgggttattgcaaaatggaacgccaagacaaaataaagaaggaatgtagaaaactctcccgtggctgaaaaggctgtcacaaaggttagctgttaggagaagcgccgcgagcgtgacattcccccaagaaaggcggaggcagccaggcgagaaggcacagccccgcagggcaggtaactgaataccttctccgctgcacacccaggcatgcgcaatccagaccctggagttgctaaggccccaaggcagagagaggctcaggctacggagaaagccaatcagagggctccaagactgataagttagccaatccagattcgagggtgaatcaggtcctcagcatgcccatcgccccacccgcatccaatcagagagccggctactttgggcggacttttcaaaacagcgaaaacaaaacaaatcggggacctttaaaaggcgtaatgagaccagaaacgatctccttccgcccctctgtcttcccccgttccccaacgcagatcaatcgcggaataagcccgacgcccagattccgctctccgccctagcgccaggcgggaggactggctcggcaaagccaaggagagctagggaggccgcgagagaggctcgagacggcagcttaggggcgggactcttttttaaagtccgtggaggaagtgcaggatccctccgcggggagtcacgtgccccgcccccttgggggcgtcgaaactcttaacaaaaacaaggggctcggggaggtttccgctgaggcggcgggggtgcggcggtgggctggtcttccgcggccggcgttgcgccgcggcggagggtgggcgcgcggggagcgggatggagccggggctgtgaggccgaggcggcggtgcctgggaggaagggtcggatgccggaccgggggcaccgctgaggcggtgggtccccgacctgc

SEQ ID NO: 32260 - DNA, 2300 bp, Homo sapien
ccaacttttatggcttggaactcatctcaggtgccagctttatgggaaacttttactaacacctccctttcctagtatagactagtagtatttgctacaaaagcttttgcatgtctctatcctagcattcacttgtcacattcatgacatatttgcttgtattacaagatgggactcagccttagtttttgccaaggaccaaaaagcagccaatcccacaatccaaagtgaggtgctatatgcctagacaaaacttgtagagaagaaacaagctggctcctggccatatccaggccattttagtgatggttaagaattcagtcaataaattggaatctaggaaaaataatttctttggagagtgttattagtatgctgtgggcctttcctaccacacagaagagaggtagagggttctttcccattcctcaagcctagcaatcagggctttgatgagctaagagagtctgatctatgcctcttgcagttcaggggacagagcagcaaaaactccagaaggatttaagggccagaaactgtgacaattagccaaagacagtagagcaaagagagctcaaccagctgcattgggagccagctgcgttgccttgacagttcagtgttctaggtttcttttcgtctgagacagagagagttgcagagagagagacagagagaccataccagtttagagccattttaaattccacccaaaaggactttatggaggggcagttattccaactgagagatggcccattcgactgccaggcttggaggtaggagatataagcagccactggaaagaaaacgcatcactcatgtcagagcagtttgctttgcattcctacggggagccttcaaataacccacgtgacagactgtcagtcaaacacttgccctggcccaagggagccaacatgagattacctgaaagccagccaagccctttcctgcctcttagaactccagccctcaccttcaccttgggctccagccttagaggaaccagatgcagccgggtgagtgggagaagaggggcagagcttcaggacaggggcatggagaagctgtctgtgcctcgggagcaggcttaagctagtagaagggaaatcttgatctttcaatgaaatctgaaacaagccctgttgtctctggaagtgaccagaaggcattatttggaatataccagaaagatcacgagacgtgtcctagatttcttccaaaggtcaggaagaactttttttcccttgaatataaacttgaagagtgaattagaacaggtaattgggaataagaggataacattttctaatcacagccttgagaccccttgtttaacaatgcctcatgtgtccaatttctctaccagaatgagctctccttaaggtgaaggaccgtcctacccaattttatatcctaaaatattcttagtgtataggcatacaattaaggtctgagagttggagtacatataatggaaatacactatagtttatttaaccctttaggtctcaaatgaattagctccctacgttatcaattccaaaggactgtaaaacaagtacctacatgttgaagagagaaggtatatgcacgttgaagaaagaaaataatttatcaagagtaagtattgaacattgctggtgagattgagttacttttcatttatagtacagctttctccaactattaatctatttatatcttccatatgttctactgataggattttaacttttagcccaactttataagataagcaattaattttggaacatcccttaaatttattttcctctgagatattaaacaaggcctatcaagagaatccaaagttctgttcctagcatgagaaattttagacttggtatgtctctgaggattctttatctctaacttcagactgaggtagactgctataaatattctgcaggcacacatgcacatatacattaccctgagcatttcagggtcccagttgtcacccttgtaaaatgagaggattggacaagttgacgaaggtccccaggtcccacagatttaatctaatcatctctgactactcttggaccattacatttattcaagggagcgaaaggagaagatgtttgaaaaaactgactctgctaatgaggtgagaggttgaatatgtcaaccctaccaattctccagtggctgggtaacttccagagttaatgtctatcattctttttgaactggggcagccctcatctggaatttgtttccaagttatactaaggaatgtgtatgttctatttgttctgagtctcaaatca

SEQ ID NO: 32261 - DNA, 2300 bp, Homo sapien
agagttaaatccctaaacacctcactttgagaaatgtagaagcaatggagcagttttttcccaaacagattagatagtcagacagacaggcaggctatttattgaatacattctacatgccagtatttggccgaaccctctacatataccaggtgctttcttctccaaacaaccctttggaattcctattatcctcatgtggaaagtggtaaatatgaggcatagagaaattaagtgacctgtccaaagtcattgccaggctgagctcagactttgtgctgttaacctctagtttataaccctgagtgacactcaaaggtggcctactcaactctctcttaaagaaataacttgctggccagcggcaaggagtgcagttagctgacagcctctactgataacctcctcgggctctgcttcagctttcaaccagagaccatgttgtttctgaggaggcccagctaaggaccgagcacggttggggtagaagagtctgaacatttctgcccaccatgggcccctctaataaacagtctttcctctggagctccccactgagctgttgtagacttcaccagatcagcattgcaatctgaggctccccctgcccaattcagcctccttcctccttctgtctatcgcaggagttgttctgaataaccttcttttactccaatgtccatctcagcatctgctttgcagaggacacaactggcacaccctgccttcatatatttggattgccatcatatagaagactgtttagaattgttttgtgttgtgataaggggttgaattaggacaaaattcaaccccttatcacaacacaagcataaacaaactgctagggaagcagctttcacatatacataaggaagaacatcgtaacaactagaagtgccaaacaatagaataacctgcctcaagatcaatgagtgccctgtcactgcgttcaggctgactggagaactgcttttgtgtgaaggttgtgtggcattaccactcctccacttctacccccatgaatactgaggcacctgggatgctaaacatccacaatgctaattgattagcaaaaaccaaattgtttaggaaatcgcgccaggaagcccaaacctctgatttcttagcagatcagtgggtctggtttgatacatcatccttgtccacttccagggcagtttagtggtactctaggccagactagccagtctacatactttttttttaatcaaagagcttctagaaaatgggataagctgtgggctgattgtccccatggactagttggtgggatcaaaacctaacttcacatatgtttatgtcagactgtaatatggggttcaccctctaatgcagttctaatgactccctcccctgccacatggttctcaagctcatggacttgcacacgacagccagagagattctcttcctcaaggctgttgtctccctcccttcatgcagacacaggcacacaaagcaggggactcctactgcccccttctaagaattccatgatggtcagattatataagtaatcatatatttcagatagcaaaataagagatggaaaagactggtaggaaaatcaatagcataatcagcgttaggatctgtatataaagagacattcatttgctgtgcaaatatttactgagcacctaccaaaggccggaatcccttccacatgctagggacgtgatgcgctcgacggagtccccaatgtcatggagtatatatctaatgccactgagaaacctggctcaccctgcactgagagaagcactcaaaaccaccatcaccaatagcgctactaaagacagtgctttggagcttccaagctgatagattatcctttctccccaccctcagatttctccagtgtctctggcacttatagtccatgtttgcaagaaatattttattatagtgctctgaaacaaatttataaagtttgcaagagaagttttaaaaaagcaagctcagcaatatttgggggcttttaaagctgatgatgcagctgacctactggagacaaaggcagtgggagggcccttactggtataaataaataggagtctctggtactgcaaacccacagcctggactcagagctcaagtctgaactctacctccagacagaatgaagttcatctcgacatctctgcttctcatgctgctggtcagcagcctctctccagtccaaggtgagaaatttcatttacatttcactgtttgttgaacagaaatagtctttaaccacttcaattttctttcgattaaaaaccgcagggaag

SEQ ID NO: 32262 - DNA, 2300 bp, Homo sapien
atatttttaataaacaagaaattttccattatgtgaatgaaattttaaaagacaatagcctatatttgtgtctcactaatatataaagtataggtcaaatttaaattatttaattagttttaaatatacacaatttgtctcctctttcaaacctgacatcttcggctgttttattagtcttaaatgatgcatttactttggtcattttatgctaatttcttccatagtaaattaatcaggctatataaggtaatatttccccagagggtaattttagtgggacgagggtggtgggatgatgtcatatcatacatgggattgcatcagaagggttctgtaaagcctgaactcccttttaaaagtgcctagtgatagaggcgttgtttgtcatctattataattggaatgtcattgtagttcagtgaattttgatgtaaataaaatatcttttaaaaatgttaaagtaccaggataaacaaacaaaaagaaacaacccttaagatgacagattttcctcaacatgcaggtttcccttcttatatacctcaagtatccaacatctagccatgcaaattgattacctgaagcatagtactggaaagtagaatagcatgaaaaacttaattttgtggacattacctttttttgtaatcagctactgtatgttttattttagatcttttgttttgggtgggttttctgctctggaggtatatgcactaacaaaacattttcctcctttcatatacgcatgttaattagcaatgtgagcaatatttcctaccatacttcactcccaatattttttgagatgtttgtataaaatggaatttaaagttcacttatgattgtatatgaaccacagaggagcccatttattaataaaaaacttttttaatagttaaatgtagagggaaaaaataaaaaaaaatgggaaacattgtaaacagcttaagtttattttgtgtatgatcgaggcactctgttgcaggaaggtgtgtaattgggttctctctgcttcaaatgcgctctttcaaaccattcattatcctgtgtatttttaatgtggttttagtaaatgttggtagtagctctgttgaagtaggtaattgtgttatgttttgggtggtacacacttggggcatggtaacccaaatttcatgtgcacggtttccctttagcccactgcccaaatttcacatacccttcaccctttgttccctttgtaaaaggagtggtatctgttttgagctgccaattcagatgatcagaaatgctgctttcctcagcattgtcttgttaaaccgcatgccatttggaactttggcagtgagaagccaaaaggaagaggtgaatgacatatatatatatatattcaatgaaagtaaaatatatatgctcatatactttctagttatcagaatgagttaagctttatgccattgggctgctgcatattttaatcagaagataaaagaaaatctgggcatttttagaatgtgatacatgtttttttaaaactgttaaatattatttcgatatttgtctaagaaccggaatgttcttaaaatttactaaaacagtattgtttgaggaagagaaaactgtactgtttgccattattacagtcatacaagtgcatgtcaagtcacccactctctcaggcatcagtatccacctcatagctttacacattttgatggggaatattgcagcatcctcaggcctgacatctgggaaaggctcagatccacctactgctccttgctcgttgattttgttttaaaatattgtgcctggtgtcaacttttaagcaacagcactgcctaaaagcaagcagagaacagaatcccagcaccattctataggcaactttttagaattcagatatagtaaatctgttccagatttatgatgttttatgtaaaaaaaattttgtataataacatagctgaatatttttgtttcatttctttgatgtaaggcgtgtgaacattcgtttgaatatcacatgttgaagtcaggtatggcacaatgggttctgagaccagcttttcctcccctcccatttgccttgttccaagctctttcttttcaaattacttttctgatattcataggcaggtatttaattttactaattagcatcctgtgtgaatgtattaaagaagccactgtgttttagtgtagttggcaaaaatataaaagctgtttcttatttgcccctatttttttggtgtcttaaagttatatattaaatcacagagaagcaagggagaaagttgaaagatatctaaggc

SEQ ID NO: 32263 - DNA, 2300 bp, Homo sapien
atatctcagtcattgtcagggtaagagcaggatcttttatctacatggtacttactttagcattttagattatttatagcttccttcagagtcagaaactcattatgtacttcatacacagaccttttttatccttcttactgcctgcctttgagcatctcactgtttactagtacattttaagcaagaaaggagtgagactacatcagggctttttttcccctgtactttttgtagaggaaaagattattttggactagagtattgatttgaattattcagaccatgcatatgtgtcaaaccttcttttctcaccatacttcaatttattccttatcaaaggtaatctttgatatgaaattttggactttttacttttcttagcccctccgtttttatttacctttatgtcctttacaatcttattcttcccaaagtttggtacttttttttctgatattgtggagaatatcttttggagttttactcctcttttaatttgcggaagagtaattctaaatagtagagacttttacgttctgaaatacatatctcttgtactcatagaaggggaatttagtaatatagtgcttatggctctttgaaggggaaaatttttaatattgtgaatacttaatctatagctaaaagtgacactgtaaaactgggaaaagaagatcgcttagaagatttggctacagacatttatgatcaaattgcttttaaggtgactatgtcagatataacagatacttcagtttcttattttctcaacattgaagataattatagcttggtgagactggaaagaaactttaacaaactagtagacttagaaaattaggtcttttcccccaaagcttatattccaatagaaaaatttgagacgcttctatagaaattataaaagaaaaattaaatttgtatgtttacggatagtccaatggtttaaaggtatgtaaagtaaaaagtgagagatccctcatgtcattcatactctagattatagctcttgttgatttctctatagagttactaacatacagaatgtgagtatatgtattaatagttttatatcttgaatattttatggacatctgtcagtaaatgttaactatgtttaattttcaaaaatcttaatgtattccatctaccatttggaaagtactatgttaatgtttattttaacagaattaaaaaacatagaattataggaataaaaaaaaaaccttagagatattctagttgaatatttcacttcccaaaagaatctggttaaattactgacccaaaactacataaaataattagtaagaaagccaagtctaaaacccacgtgtccagacttttatagcacactactctctaattctgattttaaaaataatgttatttcggtatatggtgtgaatttgttcaggtagcagatgactttcttattttatcttatataggttaatataatttactgcctttactgctgacctatcacagttgtgctgtgttgtgcttgggaaatgcaaggtgaatgagtactagacagtagtaagaatttaaattgaggtttaggtaactcaactgaaaacctgccttactacattattgtgctatttaaatgacagatatttaaagggctataccaaatttgtgggccagatttagcccatgggctacagtttgccaacttgatctaggagagtaattcccatagtaggattaccagaatctcagccctttagcttctaagaattactttatgagataaaagggaagttataaattcatggaaaagagtaaagaagtagctgtggatcatattgagaaaacctgaggatgccacatttcttcaaacataaagcataactttgtcttctttttgtaatgtttaaatttaggtatgaagcctattcatgctgcagacaaacagctgcttatagtggcaaatgcccacatgcattgggacccagagtattctgatgtgaagctcatccagaccatgatgtttgtctcagaggttaaaaacattctggagaaagcctctagtaggcctggaagcccaactgcagatcctaattccatcccgctggtgctatgtgcagatcttaactcattgccagattcaggtatttataatatcatttcctcactgctttcaatttcacttttactcttggttcaaaggccagctagctcctaaattttgagtagataaattaaggaatgtatcataagaattccatggatgggacacaaggtaatagaagagagtttaataaagaagctattaccaaaggtgttgc

SEQ ID NO: 32264 - DNA, 2300 bp, Homo sapien
ccaggcttaaggccattttgacatgtttcacagaagatggtgtggggctggtgttgctagggagggaaatggaaaattaacataggtagaaaagaaaatagtctgtcgtcttgtgaactgaggggcttttttactcactcattcacccatcctggtgccaagatgaaagtggtgcaatagttctgcaattatggactcttgtaacagctgttcagttttagctaaatgatgatttgcattttcaccgcaccttttcccccaagagatgaaggcattttacattcagtaataaggcctaagatgaattgcaaccaacgcaacgtgcttagtgtgctaaacactcctgtgggggaaaaaatactgaacattgctaatatacccttgaccaacactggtaaatacacgagcccgggcatgcattgagaaagagattaaaattgtgcaaaactgcaacagcagtactctgcctccacagccggtgtaatttgctttttggactgctggcccaaaaaagctgaagctggcccacaaaaacaaaaacaaaccccagaaacttaaagtatcacagccaggttcaccaagtaaacactactatttctagtttgcatttggatgttttcattctgtagatggcatggataagctacaaacaacaaactaaagtctacaacgagaagggagaattagaaaataggaccgggttatcgctgagcgtcacaggttcttttatttacctttgacgatacaacttacagatgctatatgtttttaaaaaaaatccaccgaatatgtcaggaaacatttccttcggtcacttcacctcccctggcgtctcagccacctagacctacgctctgcttcgctgtcaggtcgcctcgggcgaggagggtgcagtaaacagcgcccacacaagaacccggggtgaggcggtttcccgtctcttcgccaaggctctgtggatgtgggtttctgaaactctaccactcttctcagccccgctcctcgctcaggccaggaaaaaagagtgagaaaacagccagagcaaaacagaaaaccattaagaagcccgggcctccgcgcgctcaccgcgacaaaacgcggcgcacggggggcggggccaaggcgctgcgtaggagctccgccccgtcaccgccccgcctccttcccctcaccccaaccctccgcgccggggagtgactgactcccgccagcccctccacgtcaatcaaccctcctcgttctcgcactctctgcaccttgttattaatctcaataccgatatcgcccggacgcctctcccccggccctcgggggtgtgaacgtgtgtgagcgggagcgaaggcaccgaaagctggcgtctctgttcaacctcggccccagcagcacccggcgcagcggcaacccccgcagcggcggcagccccagcaccaggaggccaaggccaaggccaggctctgcgtggctctcggagcagtagccgcggctccggccctgcgggggcgcagcttccttcggctggggccttcgcgccggcggccgcggccgcggggcctctcttgcgcgcctggggtcactgtcctcgaagcccggcggcgcggccctcgtcccccttcccgacccccggtctgtctcctcgctcccttcagccgccttccgcgccgccgcctctgccgttcgtcaggcggcccggcccggcccgcccgccccgcatcccctccggccggtgcctctcccctccggcgggctgcctgcatgtctttgctgccctcagccccgccgccaccgccgccgccgcctcccccgccgccgcagcaccagcaccagccgccccgtcgccgccgccgccgccgccgcccggaccccggcgcgctgaatgcaggtgaggagggggcgcgggccccccgagaccccgggcccgggttccctgcgcgcccgcccgcgagccccggttacgggccctgtgtgccgccgcggcttcccctcggggcgggcgggagcgaggcccgccgtgggtgtttgtgtttgcgtctgcgtctgcggccgcggctctggaggggaagcatctgtgggggcctggtgcgcgcgcgcgcgcgtgtttgtgtgtgtgtttcccctgccgcggggaaatggctgctgttgcttctgggccagaggaagagaatgaggtagagtgttcttttgcctccgagtaggaccgagagtgttgggaagaggagcgcgtccccggggaaatgaggtgggagagggacaaatgtgcgtgtgggtgtgcgagttgggactttggcgggcggggaggcggc

SEQ ID NO: 32265 - DNA, 2300 bp, Homo sapien
gtaagctgtacctgtacaggacattactttaattaggctaccactataagcatactatatggtatgtaagcatactatatggtaatagtttcaatataggatgtttaaactctcttgttagaacagtagacataaaaaagtccataaatggggcctgccgtgttggttcacacctgtaatcccagcactttgggattgcttgaagccaggagtttgagaccagcctgggcaaaaaagaaagacaccccacactccccgctgtctataaagaaaaataaaaataagttagccaggtgtggtggtgtgtgcctgtagtcccagccccttgggaggctgagacatgaggatcacttgagcccagcaggtgaaggctgcaatgagctatgatcttgtcactgcactccagcttgggtgtcagagtgagatcctgtcttgagagggggaaaaaaaagtccacagatgggggccaactgaccccagctgtggactgtggaaaggaaacagatatagggtctaaggaccagcacctctaatctgagtgtttgtttttctctgaaattgactgggtaaacttgctccaattctggtacttactctcaaattgaattagtttttttcatttatgcatagccaagtacactgcttgacacatggcaggcactcatatatttgtgaaaagaagggaggatgagagggagcgagggagagaaggaaaagtttacaaagatagatttaagttcttcgatttttttgcataagtcacaaattgttatagaatctttgaagtaactgcttaggtgttaacaagacaaggcaatacattagaaatcttattttttcatgtagatgagtactatgtataaatatgaataaagcatctgggaaatgcctttgatccagttcatctgcctgtgggcagcttcattgaagcaagttaattttgcaggcttgccattctaattgagtcactaattcatgtatgcatatattcatttattcagcaaacatttactgagagcctcctatgggcctggcactgaagtatgtgctgaggttacaaaaatgagtaagatggtttctacccataaaaagctcagactggtgacaagaactgatatattgtggtgatggctgcacaactctttgagtacactaaaaaccatttaattgtacaatttaaattggtagattgtatgctatgtaaattatatctcaaaactgtttaaaagaaacacagcctgaggcgaaatctttaaaaagttacctaggtgatgtagggtacggtacacacgaagcagagaagatagaatgaaccaagttatggaggtgagaaacgtgtgtgtgtgtgtgtgtgtgtgtgtgtgtgtgtgtgtgttgtgggggaggtaagctgggaagtgataaaatccgtaatcagatttgttttagataaaccacaccgacagctgtgacgtaatggaaagtacactcattctgttttgtttttgtttttttttcctatcagaataacttgtgcgtgggtcttggagctgccattttaaaactagaaatgttttataaatgtcaagtattattattcaattgatcctaatggtaagtctactcgcttgccagcagggggtaaatgtagagattaatttaagattttaaagctaaggttgatcttgcgctgacagaaagtttgacaattagcaaaaaaagtttgtcagtgagttggacacctccctcgggtagcggcgaaaacgcctagagaatttttaaaataagtctttccaaggccggaaaagtggcggaggaagctagtgggtttcagggttcctgtttttcaagattttacgttgggtattaagtactctcacagcctgttaaaattgtcgctctgagtacacttgcaggatcaaaaaagaaaaagaataagaaggaaggattaaaataatcacagcatcgccaacaggatcgtattttcccgaaggtggttaaccagccataccggaaccacgaaacacacagggtcctgggcaacacggaggactaacagtaacaccgccacgccggcagcaaagctcattttggtccccgccccgttcctctttctctttttaactccttccctctttgcggattctagaacggaacctttttttaattcttcccagtagaaacgtaggaacaatttcgtgaacgcaatccggagtgcccaacatggcggcggccgtaaggtgcatgggtagaggtaaggcgaggggttgtcttgcaggggaaatggctctggcaccgagtctctggttgcagcagagtgc

SEQ ID NO: 32266 - DNA, 2300 bp, Homo sapien
gcaaagggcttgaatggaaaggaggtaaagaattgggaccaatgatacaattgacccatactcaaacttcatatcccccaaacttgaactaatctctgtgactgcctccctcaccagaaacctgttttgccctctttatttctgatcttagttaatgattctattctatgcctagtcacccaagctagatacctaggaagtattttggagtctttattctctccttttcccatcttcaatatttactttttttttttttttttttgagacagggtctcactctgtcacctacctggagtgcactgacataatcagctcactgcagtctcagactcctgagctcaggtgatccttccaaatcagcctcctaagtagctgggaccacaggtgtgtaccactatgcccagctaatttttttgatttggtagaggcagggtcttgctatattgcccaggctggtcttgaactcctggcctcaaacagtcctcctgccttggcctcccaaagtgctggaattgcaggcgtgagccctcgtgcttggcccagtatttagcttgacaagtattctctaatctgccatcttttccagtcttattactgttgctactctggttcaggttctcatatctctgagaagaaagggcgggaacagactcttaattgttttcaatcctacttccttcaggtctctctcttatattgcagccagaataccttgcctaaaatacagatgttactcctgtttactgacttcttattgcctctagaggatgcccccctatgctctgtcttttctaacctcatcttccactcttgcctgccttctcttttaccgttttagttcagaagtcagcaaactttggcgagtcagccaatcttgtttaccgactatatttgcactacagtggcagcgttgagtcattgcagcagagaacatatggctcacaaagctaaaacatttactatctggtcctttacagaaaaagtttgccaactctgctctagtcatgtagaacttataatagcttccttcttataccattttattttgtgcctcagtactttttattacgttgtttctttacctggctaactctattattttttaaataatggctttattaaggtatcatataattacatatcacacaattcacccatttaaagtgtacagttcattggttgttagtatactcacagttgtgcagccatcactgtaatcagttttagagcattttcattgctttcccagagaaccccatgcccatgagcattcacttcttgttcccctaacctcctcttctagcactagacaaccaccagatctactttttagtctcttaggtttgctcattcttgatatttggtataaatggaataatatgtgggcttttgtgactggcttctttcacttagcttaatgtttttagggttcatgcgtgttgtagcattgatcaatatttcattcttttattaattgttgattaatattccattatatggacataccacattttatgtatccattcatcagttgatagacatttgggttgtttctactttttggctgttatgaataatgctgctaagaacatttgtgtactagattttgtgtcatatgttttcacttctttggggtgctaacacttccttatccattaagaattgactttgaggtcatttcctctataacttttccctagcctcctaggctggattgaatgtcttttctgtcaggctctgatgatgctcttgtattactacattatattgaaatgacctgttagtatgtctttctgatctactcctctgtaagtttctggagagcagcatcagtgcggtaattcaacttattcatgacttcagacattggaaaagttcacttcatgtttgttgaattagaaaaactgtaaagcagtctatgcttttgaattaaaatataattcatcctttgtttttttttctcttatgtacactggctttttttttaaaaaaaatctcttaggatatatattgatataactcaactttattttcttttaaggtctgcaaagaaaacaaaaaaaggtgctaaagaaaaaacaccagatgagaaaaaagatgaaatagaaaaaataaaagcatatccctatatggaaggcgaacctgaggatgatgtctatttaaaacgcttatacccgagacagatatatgaggtggagaaagctgttcacttacttaagaaatttcaaattcttgactttactagtccaaagcaaagtgtttatcttgatttgacactggatatggcactgggaaag

SEQ ID NO: 32267 - DNA, 2300 bp, Homo sapien
caagtgattctcgtgcctcagccttcagagtacctgggattaaaggcatgtgccaccacacgtggctaatttttgtatttttagtggaaatggggtttcaccatgttggccaggctggtctcgaactcctgacgtcgtgatctgcctgccttggcctcccaaagtgctgggattacaggcgtgagccaccgcacaggccctactttctaaataaaaagggaggggtctttttttgggaggaggttaaggcccgcagctccccttgatatggccgctgctctcaggcacttaatccattatttcaacaaatgtttaaagagcacctactatgtgcttcaattatacaaagatgatacaacctctgtccctagaatgaccacagcccaacagagagactgagggcgaaatgtgcaaaccctgggtcctccaaatacttaagattcagagccaggttgtcagaggttctcctttgttctggctgaatagtaacactgacagggacctgccagtttcaagttattccagttattcggaaaagtgaattgttccaagtggcgtcagtgcacgttagaacgtgggcccgcgtcatggtgttcgtgaagactggaaacaagtgggacccccgccagcacagctcatgcaactgcttcccctccaacagtttcgcccatcccgactcaattgagggacccgagacgtttcttctctgggccaatcagaacccagtcagcatctctctgatgcaactgttcccttataaaacgattaaacgtggaccagctatttttattcggtcctataaaaatagctgccgtcagtcagtcctggcggggaatcaaggcctctgctcttcaagtgcgcgccccagtcggccgtgtcctgatgttactttcccagccattggcatctgggggcgcagctggacccacagctcccagaccgcgttgtgttccactgacagagtctcctagggaaagggaaaggtgcatttgctctcaggctccgcctaggacacacacaccaagatcttcccgggctgctggtaaaagccaggatgcaacagcctgagggtcccagagcgaggaagaaggatcaatcaggtcccccggacgcacttagttcagcaggagtggcgggctgtgggggtgggaggtagccccagggcctttgatgtgggcacacgctcccccagcccgccgaatcggttcctcccctaacaagggatgtggacacggttcatctgccttccggtgtgcctgagcaagaactgtgcaacctatctccaccccctccgtccccggtatgagcacttttgattcctccccagacaaagccaatctgaactccagcagaatgaataaagggatcaggttgctctcccggcctcccctcacctccctcctcgcttctccctttccccacgtgactctctggaatttcgccaaagctccgagtctctgggtccattttcacaccgagcaaagcagagaggaaggaggcaagggagactagaggaaggctgaacgtgtgtcctttaaacacggggtccagacccggcgtattttgggcgtttccaggctctctcgccagagtggccttgagtttgggggtcttttccagcctcgctagctttttcctccgtgcaattaaaattatggctcttcttccactcccgtaatcattgcacctctaccctgcagacctcctccggggtgttcagcgcggaggtgggtgttggtgtgcagcaagccgcgtccccgcagccctcctcacccaggcgaggggcggggacgagaaagtagcagcagcgccccccagtctttcctctgaagcttccgaacagtctgcttcagggagcgcagcctgaggcggtgtggtgcggtgcggctgcagggcgggcgagtccccggagctgccctcagcgctgcacagtttccagcgagcggaccccggcagatgaggtctgccgagccgggtggctcgaccaaggagtgggtgtgggtgggtctttcggggctcccggcgacccgcggtgccgacgcaacgccgacgtatggtgccaagcgaactttaaaaagctgcttcggacaaaccagagccaggatttccactgtcggggacccgggatcggaagggtctagcccgagggaaatgctggaagatcccatcggccagtgaccagcaactttccggcgagattttgacgcggagaactgtgctctgcctcctcttattctcccaaagctcacgttggcgtcctgccttgcgggggaactcggcgcgctctctgcctgagcagc

SEQ ID NO: 32268 - DNA, 2300 bp, Homo sapien
tgctgggaaaataattcagcgatatctctcttacttgcacgtccatttataggctgtctgcaagaagaaaaaatatggctctattctacccgaccccacaggcagtcagaccttatggttaccttcccttattccctgattatcttcccttattccctgaaaattgcttattctgttctttttcaaggtgtactgatttcatattgttcaaacacacgttttacaatcaatttgtacaatagttgtcctgaggtgacatacattctcagcttgtgaagataacgggattaaaagattaaagacaggcataagaaattgtaagagtattattagagaggtgataaatgtccatgaaatcttcacagtttgtgttcttctgccttggttccagctggtccctccgtttggggtccctgacttcccgcaacacatggcgacaccccaactcttctctttcttgctcagtgtggctcaaagatttcctaaccccattccgtattggaatcaagtgcaacaccttgcacttggaagggcgcagtgtcccagagagtgagattggaacaaatccttaagcgcccttccaaatttgagattctgtgagtttctgatttacagttctgcattcacagctcctgagaagcaagggaatagggaaaagatcctttgatatgattccataaggctaaggtggttccttttgcctccttagtggacagaaaaaggaataactcagttctctgtctgtgtagtatcatcaacactatttctgttggcttgtctttgagatgacataacatctttctccaagacacacacaacaggaagcatgccttttatttgtctttacttatttgtctttatttatgaaataaagacatgctccccatgtaggtgtcactgaagaaattatgcccacctagaaaccaagacacccagattttgttcagcaagccagagtcagacttttaggccctctcctcagaatccacgcttgttcccatactctttttattacactttgtggatctgtgtccccttccatttttataactaggtagtgtataccgtataataaataggaattattgtcattgctgtattaggcactctcacaacatgtaatagccagaatacttttatttaacagcaactggaaggtacactctattcttgctttttctcattaaaaggatacctcatttctttctgatccccagttattccatttccagcaatcctttatttacactggagaattccagggatgaaaaaatatgcccaagaattgatgaaaggaaaatgcttgcctgatgcatttcagatgtcacctaccagaaaaggactgacagacattttgggctaaaaaaccaaccctacaagtgaaaatacttggaacaacagagttgggggtggtgtggggagtaggttgtctgagtttgtgggattctttcttaagtcctaagaggccttctcattgactctccatgagaaagactttggacgtatatttcctggaaagattggaggatcaactggggccaacaacataatttgcaaaaatgtagggtctcttgttcaaaaagaaagaggagaaaaagcttttttgttgtttttttgtttgcctctgtgatctctttctctcaacctgtcatatttggcatgttttttagttgctatttaatgttttcctcctttgggcctgggaatgaagggtgggaggataccctcacagacaccccaggctctaccctgtgacttggtgcatagggcgcatgcaacctcctggcaccagcccccacgagggttggggatgacagcattcattgggatggagtggaggagctggtagctgagaactcatcccaggaagccagcagcaggtgggaccacacatgagctgagcctcaaaacttcacctataaaacacaaattcagagatttcaaggtagtgactgcagagcattgaacaccaaatgcaggacctccttctgtgcactgggcttctgaccaactgcactggctgcacgcccatgcagtcagccctgggatcaacaaatgccatccccctagtaatccttgtttctttgaccttccagaaccctgttcctatgaaggccatgtgtttcaggatggggaggactggcggctgagccggtgtgccaaatgtctgtgtagaaatggggttgcccagtgcttcacagctcagtgtcagcctctattttgtaaccaggtaaggaagacaacctcagcatgcagccttcacgggctattgaagaacttggagtctcttctgagattat

SEQ ID NO: 32269 - DNA, 2300 bp, Homo sapien
ttgacatccgttctcacacatctgccctccacccactccagccaccataagtcaccaccctcatgtctgactctgccaggaatagtaactcagtacataaacagcttttctcttctcttcacagaaaacttgtaggaaaaaattaagttgaagaggattagaaatataaaggaatgtgctggcaagcagaacctagtttaagaaccttggtgaacttactgttcacatgtcttgagggggaaaaaaagggctattattgattaccatcagtttacatttagctttgaggctctgtggatgtttttctgctttggttggattttatgcattgacatctggagaccgtcccctcacacccctgccatcttacactggggaaaacctggcggtggtagaagacagagggaagggaggcgagaggctgttggtggtagaacctgcaaactcaaaagtactattggatagcctggataacgatgtgcctaacatgtagtaagcatcaaataaagatgagtttaacaaattgaatgaatggatgaatgaatgagtgaatgttctgtcttgggagtgcctagctggtccagaaaaaggttacattactcaaaagcaaagaacacataaaaaaataaactcaattacttcccttactcgccagccactctaaaaaagactaaatagaaattggggtcatgactctcagtagaaaatctgaaactaagtattaggggataggtgcctcacaaattctaggcaggtcacttgaaatctgaatgaaaataactaattgggaaggatttttatatgtgctagatctgtgctgcctgacacagtggccacatatgtggcttgcattatatttttattggacaggattgttagactgagtttttctttgaagagacaggctttatatctgtaatggcatcttcaactacaaggaacagaaatcccactctaaaagtgcctaaaatgctaacattaattatgtcatctagaggtgggatggggcagctgcagggtttctcaattcaggtctcaatgatgccttcaaggatctaagctcttttgatctttccacctgccacccttaacatgttggcatttgcccttcatcttgtcccctcccatccccaaggagacctcctcagccctgggcagctcatcctcacacagctattactaaaggttggtagaagagaggggtgggattttgtttcatgtgggaggagaatttttactttgacctccaccactctagcaaatttcccgtgaggtcccctccggttggacagtgtccatgccctagctgcaagggaagctggcaaagtgagtatatggcagtgagggctgggtctcctggcaaaggcaagagctaaagaatgccatggatgagccagtcaacaaggtctttctacccatctcaatgtctcgggtctctatgtgcctggcacagagtgggccctcaacacacctgtagaatgaatataggtgaatgaaaattaaagtctcctttggacatttattgactgttttcatagaggctattcctatctaaatgttttcatttctcaagagtacattcaatgtggctcatcttacaaatgtaatgaaaattgggtgtcttatgtgacagtgcttctatttgatgtatgggacatttgattttccatgttcttctttcctgtcttcatgcagcatggtgagcagtggagcgaaaatgcctgcaccacgtgtatatgtgaccggggtgaggtcaggtgtcacaagcaggcctgcctgcccctgagatgcggaaaggtatttgagagtgtgtaccttacttgtttaagctcttttctgggtcatttaaggaatgcacttcttattccggtgtgtcctttgggggaatcaaaagttttataatgtttgcaaagttacataaagatatgaaggctctgcttcctaggaagaagggttgaggtgcaagggaccctgcccatcgtgggtcgggccagagaaagagccatgtagagctttggtattttgggtcctcctgcctctgttggcttgggtgtttcaccgtctcctgaggactgcccctcaccttcctctctgtgtcctagggtcagagcagggctcggcgtcatgggcaatgctgtgaggaatgtgtgtctcctgccgggagctgctcctatgatggagttgtgcggtaccaggacgaaatgtggaagggctcggcctgtgagttctgcatgtgtgatcatggccaagtgacctgccagactggagagtgtgccaaagtggagtgtgcccgggtaaga

SEQ ID NO: 32270 - DNA, 2300 bp, Homo sapien
tgtgacatttaccaaacaataccttctctagctttcataatgagagaaggaccttacttgtaagctttcagcttgtaaaacctcccaacaaagtcagtattgctgtttcttcctaacaactataggtcagggcttgaattgcagagaaagtttttgtgggtgtatgttgaaagaacacagctgaattgagacttacaggttatcctcttcagtactgaaggtagcaaaactgctaaggctacatttacctgcttttacacacctgtgaatttctgtggcttacttttaataggtaaaaacagtgaattgattgcaaacatgagcatcagcgtcaatgttgattctgattgggcccactaataactcatgtttattgaacactcattgtgtgccagttcatcacatatattatgtcatttaattctggttgcaagcacaggaagttggtcctgtgattagtaccatctgcattttacaggccaagataagattaaggatgagattagagatgttaacccacttacccaacgtgtcacagttagtaagtcctggagctgggctctgaatccaaggagcgcacttcagagggcacatatatgatcactgtgtcatcagccttcatcactgatctagtttccataagaccctctcttgcttctcgacatcattttattcacttccttttgatgctttgtggttttgaccctcatggccttcccacgcactccctacacactctcttcactctcagtctacaactctgctttcttttttgtttagaagatttatattatctgataaaacaaaacaaacaaacctcatcttttctcctcaaatctttctcttctattacctctttttccttcctttgagaaaggagctccctcattctgccctggggagctcctcccccagtgtcccagagcccatctgccttcctgagctgatctctccactcaggtgtttcctcttctgcttacagattcatctccctccttttctcttcatttttcctgctcctcttcctctcccatcttctttcctccagggcccttgtgtctttcacagcttaaatcttcatttctattttctccttagatttcatcccaagtgcatgtgataatcccctccagatcctcatttctctcttcctgctggacatctgatcacaggaaaactgcaaagaaaacccttcatcttcatccctcccacctccacaggtgcttttcttccttctcttgacttccttgtccacccactactgatttttcaattggcacaattcaaaaccatttagttacctttgcttcttgacaacccctcttccatattgcaatcactgccatatctcatagatactgcatatctctgtttctgctgcaaaaaccctaagtgcttctttcttagatgacagcctcgtttttctctttctgctagagggtcttcctcactaaagctctcctagtccttcccaagacgagggaggagaacttttcttgaatatcaactttggtttataaaacactctttgacactgaaaacttgtcgatgccttcccattgcccattgcattagctgtaaatccttcaccctgattttcaaggtccctgatttccttggtttctgagtgaacgtccaaagctccagccatgctggttctcttccccacgccacactgctctgttcctgtgtgcctctgtgctgttacatgctcttcccttctaacaagggtgtcctcaactggcaccatctgcaaacatcaaataagcactcaagttcaagttcctcttattcactttggataaaatattctctgatccttctttgacacctgttgcatttgggatgtgtatgtgtgtgtgtgtatgtgtgtgcgtgtgtgtgtgtgttttttttttttttttttggtcatcccttcctaagcatcttgagagaaggattgaagtctgattcaatcctatattaccttccacagtgcctcatactcagctgacttgccataaatgttaattgaagtgaactgttttcttttgtggagctaaactgagtaaaacataaattggatacaaagcttcaagataggggaggagccaagatggccgaataggaacagctccggtctacagctcccagcgtgagcgacgcagaagacgggtgatttctgcatttccatctgaggtaccgggttcatctcactagggagtgccagacagtgggcgcaggccagtgtgtgtgcgcactgtgcgcgagccgaagcagggcgaggcattgcctcacctgggaagcgcaaggggtcaggg

SEQ ID NO: 32271 - DNA, 2300 bp, Homo sapien
ggtaacatggccattatgaaaagaattattctgtaatcttcttttgttgacagatatactatttttaaagtgtcttttgcaatgatttctatgaagtttaatctctcatttcttactatgtttaattgataaatattgaacattctaagtagctaatattaaaattgattatactttgatatatctcaaactcaatattgctttcctcatggaatcagtcctttttatatgtagtatctatttctattaggagaaaaatagtatcaataaatttcaaaatagactgttatcttggctggaacatatttcccttcccacagtgccatgtccacaataattccctctttttatcactttattattttaaggacatctagattttcagaatatcgcatggtactctgagaatgttcagttattatgatagttttgatattaaaaggtagcaaacagtaccaaacaaggtacagagcctatacttttttgtctgttagttgtacccacatgtgtacatgtttataggtgtgtacaaacatgtattggaaagtaacaccttatatagggcatatagttttaatttgttgtccttacttgttttatattagggtgagagaccagctgctattcgcaattctaattttccttgctcattacattccagacctgagcaagggcctgaaatatgactctttactatagggggattgttctaacctgcaaattctgcctctccccaggacaaatacgccttggggacaattacaaagcaactgcaacctacaatcttttcatggttaaaggaagaacaccacaccctcctctatgagcattactgagccctgcttaatccctttctaaatgaggagattccatctgaaagaaggagggcttcaaagagcaggagagcatgtcacactctaacccaccttcaggggtcagttaggaagagcccatgatgagctggatgtttttgttctgttttacaacagcatgcctgacccaggcgaggggccccagctcaggctagtttcccttttctcctctccacactgtttttgctgctgtccccaacccaccaccatgcctagcaatgggagtctgaagctctcctttttgttttttaagtgttgccactgttagtgagttatggatgtacacaggggaagggatagtaaaagctacattcgcatcagccgtctgattaacattgcctcattcattcactgggtcctgaaagctggaagagaaaaagcagtatctagttcttttgaccagtagaatggagaaaaagggaaatactggctattgtatgtgctttaataaacaaatacctcttaaacctctgaatgcaaatggtgagccttttttggtgtttggggtgggttcacttttagccctttgttaccagaaggcatcacagtttccattagcaaaactggggacctgggggacaatgctctgaagaacttcttggggcggagacttcaatatctcagctgagtccttagaacttctagccagattcaacttagcccattaagtcagaggagcagcagtgagctatgaccactgcactccagcctgtgacagagccagaccctgtctcttaaagaaaataaaaagttagaggagagacacaatgagccagctgtgagtagcaagatagtagaatagccagctgggatgcctcatttgcaaacgtgttccacctaggaaaaaagtaatagcagaatcccaaccgcgtgcactggcgtaaccctgcgggcagttgggggagaggagactagagtacaagaaaatctgaaaaggactctctaaacctaggaggggaggcttaggaaaaatctgcaatgcaagagaccagatccttcttttgaactctcgaaaatttgactaagtgtgactaatttaaaagcccagagcaatttttttttcttaataaggtctgtttttgcctctggcttttgtttttcataccatgtgttcctcttccttcttaaactttgtttaggctagagaagatggcctgactgttattcagcctcattccctctccttcataaactctgagaagccaagtggaaagattgtctacaacatcactctacctctgcatccaaatcaaggtaagatgtgcagtaaatgatcttttgagtgatattattatcttctagttttttaccagtcttaatatctctggagttttgtctgcttgtatacatagagatatttgttgaggtttcaaggaataatgattattcatatttctcgctcctgtcttctagtttagaactaattga

SEQ ID NO: 32272 - DNA, 2300 bp, Homo sapien
taatacattagaagaataaactaggtttgttggtgtggtaatctatgaagctgtcgttacatccctgggttaattcacagtgagtcttttttctcacagaggatgtgaacttggggttgattcgttatgtgttgcacaaggagaagatccgtgagatgatggatagttttcagtttctggtgaaagacagtaaacccaatgtggtcagcgacaatgtcttccatatccagtggtcactcatcagctttaaatataccaggtacaagttttactgtgctttccttcttgagaaatcaatcaggcaagcagagggagtcaggatgaaggatgctggggggcagctctagtcacctcttgatggcggtgatggtgatgatggcagtgataaaagtaataatttcaccaaatatttattgagtactgtatgtattaggtgctgcactaggactcgacatgcatcatcttatataatacttggaattctgagatgaattccattcctgtctccacagtggcaaagtaatagagacagaaacttgtttatgtaacttgtccacagtcacatagctaataagaagtaagaccaggatgtaagcccagtgatcttaacgatgtgctctactgctgctcagacaaatgtttttgcttctgtctcttcaagttttagaagagagtctagtagaactgataggaaaaataaaaataggcattcaagtttggaaaataatcactggcccacactatcaatatcttcaccttccatctgtattctccttgttcccaaccctgttttctcccctggcttctttgggtttggtaggaatgtatatctgtagggctaaatgcatggcttaatgtggacagccctttaagatgcttttctaatctgttggagagttagaaaggcaaacagagagatactgattgttaaaggtagtgtgcaagcatggtgctgattttataggttagattataactaggattataatttatgtgggggaaatattctttaagtctacatttcagagactcactatccaagaaatcaacttcatgaaaattcagataaaaattggaacttgggggaaaaaaggaagacttaaaaccttgatttcatgtgccccaaattcaggctattctactcttacacacatttggagaattagaggaaaattagaatcaacttttacatatgtaatgttttgctgttatttacctctcaattgtatcaccttcaaaattcaataaattcaataaaattcatccctttttctggacaaccctctaacatttaatggactaagtggtatagacggtcccaaagctggcaatgaggactgagctctcagagtcactttccctgctgtcctcacagcaacaagacatgcacccaggtctaggggccatcctcagtggtgaaaaacaaagcccagctcatgccctactttctgtggcctttccaaacctagatacttattatgaatcaatagcatatgaatagttggccttctactttacaaatgcaatagagattctgagcagcaagctaaattaatcatgtccttcccccattgtcataaagttctatttgtctaaacatctctgttatgtaggcttacctcacattttcttacctctgcttctgctctgactccatcacacagttcctggagatctggtccagtcagttcccacctaagtcattgattgccttcagagcagctttcttccctaagaacccactgacctattgtgattactcaaccccaggagggagagattgtttttcctttctctgtgccctgaaatctgaagttcattgctcctatgtgctgtccatctcccaaaatgactcttagcttgcttgcaaagcagggaagacgacattctgcatccacagcttccctgtttgtttcgtgctctgattgttcaggtgaactcattccctcaatttacagcctggattcttagaggaaccaaacttcctcttctctgactacctaatgccaagaaccaaatggaagagacaggcattaaacaagttgttttttcataaccatggggcatagtttaagagatgcctttttgtgtgcttccagctacaatgtcagtgagaaggcagggtctgtcagtgtcacggtgcagaggactgggaacctgaaccaatatgccatcgtcctgtgtcgcaccgagcaaggcaccgccagctccagctccagggtcagctcccaacctgggcaacaggactatgtagagtatgctggccaggtaggtggggtagtggggttgggggaggctcc

SEQ ID NO: 32273 - DNA, 2300 bp, Homo sapien
aacttttattaaataaccttttctgaattctttttctggataaccataaacctggattctaacagcatcctctaatatttccttccaagaaaactcatcctttggggaaaaaatagttttataatatgccatagcatgtttctaatataaatggtggtaattgggctgttgatacaactagaaaaactcaaaaaatgataaaagtgcatttgttaaagttaccatcaggaaatcaaagaagttaaatcctgaatggtttaaacaattaaaataaagcctacatgtaaaacatcacctgttactcattttcttctggctataaatctagccctatgacttcctagttgcctggaatacaactcgtagaacttactgagtccctctgagcctgtgtctgtatctgcaaaatagaggcaatcatacctaatttacagctagttggtaagcatgacatagatcacgtacgtcaagtgcattacccagtgtctggcacaaataataataaatattttcccccatttcatgctaatctcagaattttttgaggtaacatgggatttaacagtttattgtggtgaagtctgaatgggagtcaggaattactatgcagaacagaatgcagaacaccatcctatcttctctcttgcagaaagcccatcacttcggatttgtagatctgagagggctcccagggcactggccttttaagcatgaccacttctgccttctccgttgtagctcctcttaaaccagtggttctcaaactttaggatgcatcagaatcacttgatggcgcagggtttcagggaatttgcatttctaatgagtttctaggtcccaggactcagccttaaggaccaagactgtaatctcttcaactcacactcaagcagctccagccatgcttatcctctaaaaatcctctgtgctccacctgttcaccctacctcctctcaactcctagaaaccagtgattttttttactgtctccgtagtgttgccttttctggaatgtcatatagttggaatcatagtgtgtagcattttcaaatgggcttctttctcttaataatatgcatttaagtttcttccatgtgtttttatagcttgatagctaatttcttttcagtgctgaataaaattctattgtatagatgtatcacagtttatttatccattcacctacgaattacatcttggttgcttccgacttttgatacttaggagtaaagctactataaacatccatgtgcaggtgtttgtggaggtaagttttcaaatccttcgggtgaatacataaggggcccagtgatgactgagtgcaagcaatactttttacttacgtggtctcggataaatcacttcacttttctaagcctcagttttctcttctgcaaattgtgataaaaatagcacctcctagagttcccttgaagataaaagaggtaaggtattcaagcacttcaatgcctgatactcaatacatggtaactttttctacatccttcagcacacaactgctcataattccctcatacgagtagggctttaaccttttagcctcgatgatttgttttgctcttccaaatgcctagaatgcccttccaggttaccgtctccctgagcctttggttggaatcctcataccagagggtcaacacgtttagtagaggaattactgaaatagttgggttccaaacactagctctggcatttaccttctgtgtaaattggctgaagttacccaacgtctctgtatctcaatttcctcatctataaaatggggataatagtatctacctcatagagttgttgtcggagccattttaatggcaaaaaccgcaattacttttgcaccaacctaataaatccgcgcatattcttaaagaagttagaacagtgcctggtacaaagtaaatgccagatcaatgttattaatgttaggtgtccgccacctatgccacgcagtgagttccttaggtatagggacagtctaatctccgaatccacactgcctagaacaaaataagcattgcagtacatttgagaaagtaaaggtgtagtggaaaccgagagcgaaatgagggcgtagggagaaaagggtggggaagcttagagaccggtgagggagcagagctggggcgcctgtgtacagggatagagcccggcggcagcagggcgcggcttccctttcccggggcctggggccgcaatcaggtggagtcgagaggccggaggaggggcaggaggaaggggtgcggtcgcgatccggacccggagccagcgcggagcacctgcgc

SEQ ID NO: 32274 - DNA, 2300 bp, Homo sapien
gcacccatcctgtgagcatcttctccccctcacataggcaatttattttattttacttattttttttagaaggtagaaaacagtggatttgcatattgagggttggaagttcaagaagtttgctttttcctgaaaagactaaccgttttctttgcaacagaatcctattgactagatatgaatcattcccttggtatttgagtcaccaggtggaagatttggatacttgattgcagatgaccatatataggaaagtatgcaggtgctgggaggttctgggtcgctggaggcccctctggctactgatacgaaattgcatagcccaggccgaattctttccaaggatttgtgttcagcactgacagcaagaccctgccctccgggaaagatacatttactatgttcaccaacatcattttttaaaatgtaactaattaaaacgttactccatgaagataccacctttggttttcacgaagacggaaaacttcagactgaccagaaagggaatttttaaatgtaaagaaaaccagaatcttgttcccagaactctgtggttgtgtagagaaacctgtttagaaataaccgtagaggaggaagtaaaaggaaatgatgtaatccctttcaggaaaggatatattgaaattctgtttaagtcatttggccttcgctgtggagtaattctttacatcttaaaagttaaatgatagattagtaataattcttaataattttccagttctgctggatcaatgcatattaagtgtcagatttggtcaggtgtgggccaggcagcagattaaggcagaagcatgggggttaggttcatacctttagagtctagctgcctagatgcagtaggggtccactcactagctgtgtgactgtgggacattaccatacctctctgggctccagcttcttcatatgcaaaacgaagatgtaatacctaactcactggatgattgtgcggcttgtattaaatcattcatttaatcaataagttttttttttaaatatctaccgtgcaccagtgcacacagataagaagaatctccagccctgtgaaactgacctcgttcaatgctggcaacacccccttcttcactttttacagatgaggaaattgaggcccaaagaaattgtgtttagctttaagaggcaaaatgagaaccaataatgccttgttttcactgtacagatggtttgacttctgatttttagacttcagaatagtttatctggctgtaacccctcataagtcaaagagcatgtatttagagagatgcagtattagactctaactggagagttgactgccctaggctacagagagcctgaaaaaaccaaggtgaaatatttccagagactaatagtgtaatttcccattgaacttttctctgggggtgtcagggaatttttagaatattttgttcccaggaagggtgggagcaacttgcatttctaaatcaaccctggagatatgccagcatgtttgaataatatctatttaagaaaaatgtgtctggcttcccaatcaaagaactgtgcctttcacctctgcaccccaccaaggactggaccacctcctcaaagagcagatgtgtctttataacagactgtaggcttggagccttgtaaaatgtacatggagtttcacaatcaagcacaaggaatccaactgaaggcagctaaactttgtgttgatttggtgaggaggagtaaaatcctgtgtttttgttgttattgatccccgtagtggtagcctgtcagtaatcagcagagttctcctggactttaaataagtcaaaaattggcttttcaggaagtatatttgtaagcatcttaagtacaaagatttttttctgtctcttgtcttgaagtcctcacaggtctagcacagtcccttgcatatggtagatgctcagtaaatgtttgtttagcaaatgggatacccaatgtcagatatatgctcttcctgagaaggtttttctgtgaatgttgacatctgttttctggattcaagattaagggttggactaagattattgtgttctgaatcacatattgataccatttactaattgttttcttttaatagattagtgtgatctcagctcaaggcaaaggtgggatatcatggcatctatctgggtaagtaaaaattaagccttcacaacacagtaacatatatgagtcaaaccaaaacacagaaggtcaagatagcaaggaaaattttaggaaagtttttaagtttatctggcaaaattaacatgctagaaaagccagaggatgtcaaa

SEQ ID NO: 32275 - DNA, 2300 bp, Homo sapien
cattaatcatttaaaaaataaatataatcttttcctacctaacccagcaagataaatgtgtcctaagaatttgctattattattgctgttacttaaaacatctttagtgaaccaagcatagcaggtattaattaatctgatttaattagaatgagtcaaattatattcagaaaccccagtgaaaattttaataagaaatttcttttcagaatatgactttgatgcaattttacttttttcatgaggtatggactgaggaagaggaaggaagagaaagtaggtaaaaggaaatttttttttgcattgccatactgttaaccaagactaaagaccagaagcagagaaatggaataattaaaaagtgatgacaatgtaatatttaggcatgctgtcacacagagtccaacaaaatggttttagaaattatctttaattcttttacttactggggaaaaaaataatccagaaaactataaagagataaatatttcctattatcctgttgtttgaaaataactacagttagtattttagtatatagcctattctactgttgcaaaataggtgcatttctaagaaatctcaacttatcaaaagaatgtaaagaaacaggtaacactggttgaaattggagaaggatggctggggaatagggatggaacaaaaatttctcatttagaaatactagcatgtgccttttagattttgtcctttaaaagtgtatctcctattaaaattaagccaaattgcaatttaaaactaacttttttaaaaaaaaatgttttaatgggaacagaaatgttaaaactcacagtagaacagaattttaaaaatagtaattttaacaataaatttgttttcataaccataaatgtatttggttattgctagctttaattttaaaaaggtagatcaaaacctacaaaaggaaacacaaacttccttacactttccgccacgtattcagcaccgtctaatgcctcatcactgttgccatgcaggtctgcctgcagtacagtccattacagccaggggaagcagcagctttttatcatttcccagttcccagtcagttctggttattactaacagtgattcattaaattatgttcaataagcagctaattgtgctatgtccaatttttgttagggacactttaactgtaggagaaattaatgcctgtataattttccaaatgctttccccaggcgtgtatacatatactttatatagaagttatctttttaaatttgtttttaccaaaaaaagaatcataataaacatactactttagaaggtttttttcacccaacaaagcattttgaaattcttctcattttaacttaccaaatttcaccttatctacaataaaagtttaatcccttatgaatgagatttatctttcaaaaaagaaatgaatttgcttttctcctttcatactgccagtattttcagtatctttatgatgttactatacgaacataaaaaatcagtgtgattccattaccatttaaagccagacactaagaccaatggaggctgatattcctgtaggccatagcaaccctgggaaatcttgcctttgctgaagctataccaaatccagaagtaattgaagtccccctaaggtttcaggtccccccaaagaaggcaggagttgtgcattactcagcattctcagatctattctaaagcagattattttcttagattttgattcaattccatgcaattcaagcatttttatttaataagtacaaggcattgtgctcaaggagaagtgtacaagctaaactggatcattctaattttcctgaacacttacaacctcgtaggaagacatacatacataagtaagtatgatacaaggaaaatttgtaagacaaagtaaataaaagtattataagaaacacagaagagggatagattactttaggctgagtgaggtggcttttgagttcctactagaagggtgtgtaggattgtgactagaagagagaggaaggtctggatggagcaacaagagtctgggctattaacacaggtttgagtcaggctgaccggagctgtaaagcccttctcgttctcactgtgtgttcttttcagttctgtcttcctgaggctgctgtttctgggcatggccaggggatcttcagactttacaaaccagttgtgcagagccaggcatttcaataaggaacaaaatgctgagtaacaacatgaagtcagagtgttgcttgccaagagctgggaggcctgggtggtttcccaatcttaaagaagcagaaggatattaaag

SEQ ID NO: 32276 - DNA, 2300 bp, Homo sapien
aggatttgggtaggtaaaggaaaattacagtcaaagggggtttgttctctggcgggcaggagtggggggtcacaaggtgctcagtgggggtgatttttgagccaagatgagccaggaaaaggactttcacaaggtaatgtcatcacttaaggcaaggaccggccattttcacttctttcgtggtggaatgtcatcagttaaggtggggcagggcatattcacttcttttgtgattcttcagttacttcaggccatctgggcatatacgtgcaagtcacaggggaagcgatggcttggcttgggctcagaggcctgacattcctgccttcttatattaataagaaaaataaaacaaaatagtgtcgaagtgttggggcagcgaaaatttttggggggtggtatggagagagaatgggcgatgtttctcagggctgcttcaagcgggattaggggcggcgtgggaacctagagtgggagagattaagctgaagggaggtcttgtggtaaggggtgatattgtggggatgttagaagaaacatttgtcatatagaatgattgatgatggcctggatacggttttgtatgaattgaaaaactaaatggaataacaaaaggagaaaaacaggtataaaaggtctaagaattgggatgactcaggatatctgattagagactgcctaaggagattcagcatagtcctgccagcaaagattatttatttacttcaagagttaagagtggcagtttggggatagcaccaggagatatcagctgtgatggcttggaaaaacagtgtaaaccggcagtgtaaacaagagcagggcatgtttgagtagttgagaacggtgaataggagtatgactagacagaaggtagtagggatgacaagttttttggggcacagtctaagttggtctggtgtctggaatgagactgggacctaataaaaaggagcgtctatacaggagcttaaatgggctgtatcctgtagcattccgaggataagcctgaattctgagaagggaaagtggtaaaagtattgtccaatcctttttaagttggtggctgagcttggtgaggtgtgtttttaaaagacctttagtccattctacttttcttgaagatggaggaccataagggatataaaggtttcactgaatactaagagcctgaaaaactgcttggctgatttgactaataaaggctcatctgttatcagactgtattgaggtgggaaggctaaactgaggaattatgtctgacagaacagaagaaatgactgtggtggccttctcagaccctgtaggaaaggcctttacttattcagtgaaagtgtctatttagactacaaggtattttagtttcctgacttgggcatgttgagtaaagctaatttgccagtcctgggtgggggcaaatccttgagcttgatgtgtagggaagggagagggcctgaagaatccctaaggagtagtagaatagcagatggaacactgagaaattatttccttgaggatagatttccacgatggaaaggaaatgagaggttctaagaggcgggctagtggcttgtgctatagcatagcctgcctttgctggtgtgtggcgattaggcctggtggaactgccatcaataaatcaagcgtgatcagggtgaggaacaggaaagaaggaaatatggggaaatggggtgaatgtcaggtggatcagagagatacagccatgggggtcaggtgtggtatcagaaataatgtgggaggccggattgaagtccgtgccaggaacaatggtaattgtgggagacttaacaaagagtgagtacagctgaaggagccgggaagcagaaagtatatgtgtcaggtatgaggaagaaaatagattttggaagttatgagaactgtagagagtgagttgagcatagtttgtgattttgagggcctctaaacgtattacagcagtggcagctgctgcacgcagacatgagggctaggctaaaacagtaaggtcaagtttggacagaaaggctacagggtgtggtcctggctcttgtgtaagaattctgaccgcgctaaccatgcctaggaaggaaaggagttgttgttttgtagaaggtgctggggtttgaggggtcagtcggacacgattggcagggagagcacgtgagtttttatgagaattatgccgagataggtaacagatgaggaagaaatttgggcttgattgaagtaatgggggctgtctgtgaagctttgcggcagtacagcctaggtaatttgctgagcttgatgggtgtcagggt

SEQ ID NO: 32277 - DNA, 2300 bp, Homo sapien
ccaccatacctggctaatttttaattttttttttttttttttttaaagagatgaggtcttgttatgttgaccatgctggttttgaactcctggcctcaagtgatcctcgtaaactaactttgaaacttattatagcaggcttgttgtgatcaggtgaagttatatcaggcccaaactttgtatgtttgtctgactccagttttgaattgcatgaaatgacttaatctttccattattctgcttaaaaaacaattcaaatttaggaatgagactccacaatgaagccccacagcaacgaaagtggtcagcttgtttctaaatggaaatccccaactgccacaccacatcaatcatctgacatataatctcacttccactaagctggaatctactttaaacgtcaggtctctggatgaagaattttagtttagtgggttatgtagcagaaatgcctaaatccagagcactattttagtgttggcagaaatagcttctcttcaaatagcagggaagaaagaacaaggattttaagttcaaagtttttgtctaagcacattttctaatgtttctacccgttatctcattaaaaagaataaagaaataggggtggggatagaaccacattcatctactttcatagaaggtgcatactggagtcctgcagatacaatttatttgatctatattttaaaaattagggaaatgccacattagaaaacagttccaggtttttggttctcttaagaaactggaacctctgggcacagtgtgtgtgcctatcttcttttgtggaaaagtaggctggagctgagaattggctgctctctttacacaggctctacagtttgccattccctaccactcctgaatgttttacacccatatttattttgttgcttcaccctgcagtcgggagactcctgcagtttatgaaattgatacaacagggcttttttttttttttttttttttggtagggggtgcaaatctctttgatttgaggggaacgcagtggtcgcttttgcttccaaacagccttaaatctgcccgtttttcaacgatctgaccttactttttcagggtggccaaaagcacaaaattatgaatcaaagaatggtccccaattaccacgagccagctgtgtgaccttgggcgactccgttaagttcttttagccaagagtgatgaatggtctgcaaaacgaccttaatacctgttctgaatacccccacatggctgtggtacagcaggcgtgagatgtttaaagtactcctaagtaatttataaactgcaaaacgcttcccagcacaagcgtccgctacagagcgcgacgacaccgagccggtttagaagtccagttactggaatccactccagttccgtcctgctcccacctcctacgctcagggtgggcgagcggaaggagactctcaagggagaaggcctggaaaactggctaagaaacgaagcgagaagttcctcagcaggggtaaagttgttggcggcatttttaagcccctagagtggcacagcgactcccggtcgagatgacggaccccggtgcgtgaccagcgcgggagccagtcccgggccacctccctgcttgaagtcgggcctggccagtaccctcccggcgcaaccccggacccgggacccccgactttgccctagtccccaacccccacaatcacctcccttggtccccctccacgtgacaagagccggaaccgtcacttccggcggcgcgggcagcgcgcctgcgcgggtcgcccggcctcagtgagcggttggcagcagcgccccccccccccccccgccaacggccacgagtggcgggcggcgcgggttcggccggggcggcggcggcgcgacgggctgcggtcctgcgggtttgtggcctgagacgtctagcccactccctggaggggccggccgcccagcctctttcgctctcttcctctaccccggctcgcgctccaggcgcttagtgaggcggcgggacgcccggggcactggcggaggcggcggcgtcgcccctggattcggacccgccccctcgcgccccgccccgtccccgccctccccaccgccctctgcgggagccgggcagctgcagcggagccgcggagcgggcggcggggcccaggctgtgcgcttggggagcgcggaatgtgaggcttggcgggccgcagcacgctcggacgggccaggggcggcgacccctcgcggacgcccggctgcgcgccgggccggggacttgcccttgcacgctccctgcgccctccagctcgccggcggga

SEQ ID NO: 32278 - DNA, 2300 bp, Homo sapien
gatactggaggagaccataagtgggtctctttttctatttctttataatttggtacagttttctattattttctataatttggtggtagttatcttgaaggtcacttcatcttctgtggattcttgacctcttatattggtacccacttgttacattgaaaaaagtccccaaagaatattgaatattctggcattatattgctagagatataatttataactgcaggtgtcctctttcatgcccagaagaacactgagattacaaaaatcactcttcctgaattgctttatgcctagatattcctctgactaccctttccactccttcaggtctgctcaggttcaccttctcagtgagtcccatcactatagcctaacctgctgcaccttttattagtccatattacttcctgtgatactgtataatttgcttatgtactatgcctattatttatttcctgccctctccctctagaatgtaagctccatgagggccaggacttttcttttttttttcttccatttttagtgatgtgtttaagcagttaaaatagtgcctgatacatagcagagtcttaataaatattgaatgattaaatcccagttctgactgattatacagaattttatgaaagtttattataaaatgcttgtaagataaaagagaaaatgtcactaaaaatataggctgttaatcatgaaagcatcatctagaaaacctatgatggtaggagataaggcagcattgaaatgcttaactgcaggcatctcgccttaatttggataaccagtgtagttcatgttagttcttttgaatatgcagcttttccatttcccctaataatttgataccattttttgtgctattatagttcattaatttttttgcatgcaaagttgatatcttcagctgactcttctttaaattcagaagacatttaactgcataattttgtattgtccatattttatatgcttagtgctttttatgtgtaaacttatgcaaaaatatatgttctaagtagatttctttctgaatctttattttgtacaaatttttaaaaaagtatactaaagtgaaatatagaagaaaagttataataaaacagtatttcgataaaatggaaataaatgaattacttatctaagactatcataaaaataaaagacattatggaaaaaacatgtaatagtaatttattaggtgcttaccatattccagactgttctaagcactttacatattttaactcatttaatgttcacaacagttccatatggcagattcatattctaattgtccccattttacgtaaggaaactaatgcacatgaatggttaagcagattgtccaagggtccatatgctagttagtaggagattgggctctgaacccatattttactgttcaagaaactgactataataatttattttaattactacaaccctgatctccaaattaagtcaaatttgtattttttcagtgtagtattttaaataaaaatggtactagaaatcaaagatggaattccagtagtttctgttattatctatagagaagcttaagtgtcagaaaaggagaaaattggaagtatagtaaaagagagaagctggactctgccaggtactagttcttctcttttataaaaacagttttagataggatttagggtttctttgcccctgtacaaatcaacctgggttggaagaagcatttctctgttcttagtaagagaagcagtagacatagtatatttttgctcccattcatttgaccttcctcataatttgggtatcttatgtctatatatgtgtgtgtgcactgtgcacatatatgtatatatatggcacatgtatacttatttttgtatatggcatatacccttcggtgtttattgtgtaaaaataagcttcgtatgtacaaataaccattttttacaaagattgtaaaaagttaattttcactttgaaaatactactcattattgattttcttttcttaaggtagaaaatattttgttgaatgatggtgggaactatgtactttgtgactttggcagtgccactaataaatttcttaatcctcaaaaagatggagttaatgtagtagaagaagaaattaaaaagtaagtatttgtctttattgcacttttgtcatggtaattttaagttaacttgagtctctggccagcactgctaatacaaattttaggtatttcatttatagatttctttgaaatatttctgtgccatagatgttgattaattcatgtctgatctagctcagtaggaaatat

SEQ ID NO: 32279 - DNA, 2300 bp, Homo sapien
tgcctgcctccccgcaccatgatccatggaaaaattgtcttccacaaaaccagtccctggtgccagaaacgctggagaccactgctctaaggcacagtccccagacttcacttattgggaagatcggccgcagtgtagaatttctcacattgcttgggatttttcagtaggacctttgtctctacacaataacagagaatactgtcaacatatctggtatgaaaattagtgaagagaaaaatcataaatttgatttgaatacgtaagaacattattaattttagccacttaaacgcgagccatttgctttttgctttttaggcctaatcactttggaacataagcacataattaaaaatatatgcaggtaaccttgttgtaaattgacttgattttagcagtatgctatttatttctgcccagctttcataacttactcattttgcatgaaactgtttatatctttaaaaaaaattagaacatactaataaccaggtgcttgtgagtacagccatgtaatatttgaattgttttgcttatcttattctgtatttctctgaaactgttttctgtttacctcttgctaaatgtcaaagtgagatactttttgtaaatctcttaccagaaaaactaaaagtccaagatagattaaaaagataagggaactgctgaagctgatagagtcagtccatgatcgttgaaaaattgctttcttccatctggtttctaatcattttcaaacactcagttgctgtagacctataaaagactcgttttaccttttaaggaacacagctgctttcagaatgagattggaaactgtggaccctagatccagtagaatgcacttttgcgcacaccctaaacagtctgacatttgatttcagaaagttaatagccccaaagaagtccttggagcccagattaagaactcttgtcttacgtgacttttgactttaagaccagctaactgcttatttaaatacctgcatatcccataagcccttcaaacctaagcgaagtgtgtgttctttcatgcccctgttctcttcccccatcacacacacagcaaaactggaacatctttgttcatttgcttcattaatagaagccatttatgtggcctttcaggccaaaaacagtcaggctttcctctactgccctctcacacagccagtcagccattaagacttaagcttatttcaaaaatgcctcctaaatctggtgctcacatctactttattcaacaggagtccaagcccccactctctctttgaataaactaaactagtatctttctagctggtttcctgtcacctattttctgcactgatgtcagagttgtctttctaataagtctgtttgaaagacagccatgtcatcctattcttaaagaattctgttattcctccagtgccagtgtggtaaagttcaaaacatttagcctaacagtatgcctttttagccttttttctcaaaacttcctgctgcatttgctgttctctttccttgagagctctgtcttcccacaaaatcttagatgtcatctctgtgaagcattttttagctaccccaagtaaagttaattgttccctcttctgtggttctacaatgttctgttcctcaattacggtatctaccataagattataatcttttgttcacattctgcccctcccatagtctgtgagctgactgctgggagagtccatgtcatagtcatctttgcttttataggacttgaactgtgcctggcagataataggtaatcagaaaatgcttttgtatgaataaatgtagtattttaccagctcactttagaatttggtttgtcattctgacaaacctaaaagttgtatggaacatattttttaatgaagggagataatcctattttgaaatgcaaataccaagtaaatagactttggaatttgtagtgtaaaagccaaaattactttttcagttcctttattgttaataacagaattaaaatgtgatttcctttcattctagtactggcgtcaggtgtacttgatcacagtgcttgctatgatcctggcagtgttctttgcgcagattcatcccaattacctcacgcagcaatggcaaaggctccgttctatcatcttttgttctgtttcgggatatggagtgattcctactcttcactgggtttggctcaatggaggaattggtgctcctattgtacaggtaggttgagtgtagttaatatttttctctttttttttttcctttcaattttattccttttgggtaaagtagtataatcaggccaagtg

SEQ ID NO: 32280 - DNA, 2300 bp, Homo sapien
gagtgattattgtatgttgtcagggttcagaacaccacacccaccccaaagtgtggtgctttgacatgctgagtactttaaaggagactgggaaggcctcaaaactaaggtctctctgaacttctttccgtcctcctttcttccttttcctgttcttcccaagtgggtcttacaacctagaatttctctccctaaaggaagccataaaacctagtaaggggccgggcgtggtggctcacgcctgtaatctcagcactttgggaggctgaggcaggcatattgtttgaggtcaggagttcaagggcagcctgtccaacatggtgaaaccccatctctacgaaaagtacaaaaattagccgggcatggtggtgggtgcctgtagtcccagctactcgggaggatgaggcaggagaattgcttgtacccgggaggtggagattgcgtgacccgagattgtgccactgcactccagcctgggcttcagagtgagactctgtcttcccccaacaacaacaacaacaaaaaatctagtaaggttactttctgactgtccctgcctttccgtggtcacaaaggagttctgacttacctcacctgaaactaggtcataaaaccctcattctagagagttcctgccccatactctgaggccaagaatttgaatgaactggccttgctagctaggatcccccctcagtttattatcattagatgatgccccctttcaatcatgtttctccacaactatccactcctttcatcagacttagcataaaaagcccattttttcctgggtctttgtgtcttcatttctgaagactcctctgtcacataaaactgtgttaaatgaatttattatcccttttcttgttaatttttattatttattttttgagacaaagtctcgctttgtcacccagactggagtgcagtggcacaaacatggctcactgcagcctcgacctcccaggctcaagcaaccctctcacttcagcccagaatagtttgggactacaggcgcccatcaccacacccgactaatttttgttttttgtttgtttggttggttttttttgtagcgacagcgtctcactatgttacccaggctggtctccaactcctgggcataagcaatccgcctgcctcggccttccaaaatgttgggattacaggcatgagccacctgcgcctggcttctcttaatttttttcataggaatgtcagctgtgaaccttgtgataagtgaggacaagatatttttcttgcccttacaatgccaaacaatggactaagcgttctattatacacatacggtactcaaactgatgttttgccctgttgccattataagtaaacacttgcattacagtaaatagccagaaacaaagctgcaacacttcctgtaaacgctactatagccgcactccacaggattttttaatatgttctatattattcagttaagtagatattctcatttccattgtgatttcttcatcagcccttgaaatatttggtgtattgctcctattccagacgtggagacttttagttttcttgttactctagtttaattctactgtgatcagagaacataacgctgaaaggggtcggagttttgaatgcacgggggctttcctttatggctcaggatgtgctcgatgctggtgtatgttccacgtgcatcaggtttcctctctttccaattatcgtgctaagagctgacttcagcttagaaatcctcaaagtcccttctgacactaagtgtgtgtaattccaagcataaactaaacggtaattacctcgaacttttcttcctgttaactcttttcctcttgatttttcaaaatgcagcaactattacttctaataaaaaaacagaaaaagaaaaaaaatccacttgtattcgcctgtagctctgtgctttcggctcttctcatatgcaaacgaagaccccaggcgccgccaaaacacagcgtgagagacgcccgggagcccgggccgccgccagcgcacgctcgagcacacccgggcgcgccccagcaccctgcccctcccagctagggctgaggggcggggccgccgcggcgcgctgacgtcagaggaggctgcgacgctgccgggtccgccgcggcgctggcggcagtggccggtgtgagcgcagagccgggccctgggcagcagcggcagcgcggtaggacctcgcgcagcgtccgcgggctccggggcgggggcgccagcggcgaagccccctccccggggaggcgggacctgggggagctcccgagccggggagcggc

SEQ ID NO: 32281 - DNA, 2300 bp, Homo sapien
acagttttatttcttcttttctgatttctgtgcttatttatttttcttttctttttttattgtactagctgaaacttccaggacaaagttgaatagaagtgttgagagtaaaaattcttgtcttgttctggtcttttatctttcagtataatacattttcataggtgcttttttttggttgagaaaattctcttcagtttctttttcactgagtcgttttatgaggaatggatgttggattttgccaaatggtttgttgtgcctattttatgtgcctattatgtacatgttgaataatttcttttttcttttttttttttttttgagacggagtctcgttctgtcacccaggctggagtgcagtggcattatctaggctcactgcacactccacctcctgggttcatgccattctcctgcctcagcctcccgagtagctgggactacaggcgcctgccaccaggcctggctaattttttgtatttttagtagagatggggtttcaccatgttagccaggatggtctcgaaatcctgaccttgtgatccgcctgcctcagcctcccaaagtgctgggattacaggcgtgagccaccgcgcccggccctgaagaatttcttttagcatttcttgtgtaggtctcctggaaaaaaaatctgatttggggagaagggtatgaaaatgtctttatttttcatttttgtaggatataggactatgctacaattttatgtagaatctatttagaatcctatacagaattccagactaacatgtttcactttcagctctttaaagatgtcattccattgttttggagtaattgtttctgaagagaaattagacataatttttatcatttttttcttccgtgtaatgtttcttttttctctgactgcttttaagatttttgtatcatctttggctatcaacagagtgagtatggtgtgcctagttctgtttttgtgtttatcctcttttggggttactatgattcctgatgctgaggtttgatatttttaatcaattttgagaaattcttggccattatgttttcaaggatttcttctgactcattttctatctctcacagatgcaattacatatttactaggctacttaatattgtcctagagatcatagactcaagtttttcactcattcccccttttatttatttatttatttttggataattgacctgtcctcaggtttacttctgctttttgctgctgctaataggctactgttgtgttttatggcctgttagactcctaatatgtattctcttttgatgacagtgtattttaaaaacaaattttgacattgcagtttggtttcttttcatacttttcattactctgctgaaattctctatatattcatgcatgctctctaccttttccactgaattatttgacatatttatcatagttatgctgaagttactccctgataaatctaacgtctgtgctttctagagtctcagcctgttgactgttttctcatttgattattgctcacattttttctctttgtgggtctcaaaattttttactctatgttggatattgtgagaaaaatagtagagattgagaaaattaatatttatttaccctaaaaaagtgcatactttttttgttagaccttttcttgggaaagttgaggaaatctgttgtatatttgaggtatgtgggattatttcagctttagttggattagtttaccactgacttcaaatgttttgaaaacagaataaggtcttttctatcactagggcttgtgatctgagcactggcaagatttcagagatctctgtgtgctcccagactgttttggttgctagggagttctttttcctttcctgtttctgactttattaatctcaggaggtctctcttctttttgctctgctgcttcaagcctttggcatccagtgccttgtacttaatgaaagtttgcaacactctgagcaactgttctcagttcttctgccttatttctggcctccgttgcaactgttttgacctagtgaaggcctagactttctcagacagatttcttttaactcttctgccctgactccagtcttcactgggatgctgccttgcacttagggaaggttcacatgcctcaaggatctctctctctcagatttcttgactttccctcagtcttcagtatagtcctcctctgtgcctggtgaagacctgtggtaaagtgctggcaggtgagtacagcttgatggtgtggatgggttccttgggactccagcatgtcaagctagttcacacacaggtc

SEQ ID NO: 32282 - DNA, 2300 bp, Homo sapien
atgcttttagagctacatcactacaaattatagatccccatccatggtgtcaggcacaacatgaaagaaatttctgaacggaaataatactggtgaataacttttccaatgtatacagcctatcaaaaaatcagggagctaaaatgcttacgttaaatcttaaaaatatattaatagatactgccaattgtcaaaatacaacaaaaatagtggctattcaagctatgtttcacagatcacatggctctaggttactctagctattaaaggagtgcgtaccctcattggaaagaaagctgcacacatattctagatgagttaagagggtatccatgacctggctaattacaacataattcattttggtacttgagttctgaggtctgctaggaaactgggaagaaagactgtacgagacacacagataattccatttgtgcaagtagtgctaataaaatgtgacttccttgcactattaaataccccaaatcttgctttatcgagatggcatatgattatttacttattcttcttcttgttctgtcacccaggctggggtgcagtcatgcaatcatagttcactacagccttaaactcctggcctcaagtgatcctcctgcctcagcctcccaagtagctgagactacaggcatgaataaccacacccagctaagatgacattaaaatttttaaatgcatctacaaataaaacttaggatttatgacaaaggtaacaatgcagtaatatgaagaaaggataataatcttttttcacaaaatggtgtaaatggtgctatatgaattgtacatccacacaggaaaagaatattgggtccactgataccttacagcatacacaaaactaaatttcagtcaattgcagatctaaatataaaatgtaaaactaacaatcttagaagaaaatataaaagaatgccttcagtcaccatggagtatgcaacgatttattaaacagaacacaaaaagcattaaccaccaaattttaaaactggaaaaattgaactatattaaaattcatgcttggtgtcaaaaatcaccattaagaaagggaaatatcaatcaatagacaagaatgatattcattacaaatatatctgacaaaggacttatacccagaatatatttttgataaaactcaaaaattaatgtgaaaaagacacacaagtagaaaaatgagcaaaaaaatctgagcagccatttacaaaagagaacacagtatggctaataagcatataaagtgctcaactttactactcatcagtgcaatgcaaatacaaccacagtgtaatacttctacccctacaaaagaatggctaaaataaaaacaatggggaaatagcaaatgctgttgagaaggtggagcaaccactctgaaaaagtggcagtatttataaaagttgaacatcattatattcaatgacccaataattctaatcctagataaatatgcatttgttccaactaaagacaagtctagaatgttcagctaccctaggggtactattcccaaactgaaaatgacaaaatggccagtaacagtagaattgataaaaaaaattgtgacatatttaggcaatagaatatcaaacaaggaagaatataaagaaccctcagctatacacgaggtggctgaaacttacaaagagtgactgaaaaaacctgacacaaaaataatgcatgcactatgattccatttatataaagtctgtcggaagtctaggtaatcgttattcttgggatgttggaagcaggtactggaaggggacaggagggggggttctgggatacaatgttctttattttctctaagttcctgttatatgggtttctccagtttgtgaaaatttattcagatgtacccaaatcaaaaagttaaaactgaaacaaaaataataattgcaatggatcgcgttatttaaaacaaaggcgaccacaatgaactcctctctccccaccccctaacccctgcgcacgcacacgcacaatgaagcgaaacctcattggctgggatcagtgacgcacttctgaaagccgcagtttggcaccatcttttccatctcctgctccttccgccttcccgccatccgccctccacacgattcagcccggtggtgttagccccctggactcgattcctgaggcaaacagtgccccttaaggtcggcgacagcctcttctgggttcactgcagtccaaccggttccctaccctctgccattatgaacatccgcaacgctcagccagacgacctgatgaatatgcaacactgcaacctcctt

SEQ ID NO: 32283 - DNA, 2300 bp, Homo sapien
gaagggtttttgcttaaataaaaaatacgacccagataaaatagtgaaataacaatatcacagttaatttttatgttattttctatcttgttctatttggttttactaaacacaaatgggccttatccttgagctaattcagaaatgtagcctatgccctaatacaaaaaattgccattcattgactgcatattcaatatattttaattaatgattaaataagtctttattcaccgactctatagttaatctgaaaatttaagtttccatttagtggaattccactctggccaagatgtagtaaaaaggattggagttaccttttcatctaaaacaatcaaaaatggaaaaaatagatgaaatagttcacataatgtgcaaaatataaaacaacagttcacaaaatgctggatatcacggaatgaaaggcagtaatttctaagagattaaaaacaagtgacatgactactatgatttccccagcttagtttcttgagagagttttgaagcaacagcacagacagggaacccaattgaaactcagtggaaacctatggcaaggagattaggctgagagcctagagaaaccaaagaagctagactctgccaggcatagcactggagaaaaaagagttgcatagagagagaactccagagagctttagagggtcccccagtgagtattcagttgggtattgatcagtgcatgtataggagaaaactactgaggctaacgaaagatgcacctggaaagactagagataacagtatccagtggtcactcagggctgggaggaattactgttccaaacagcctcatttgtcaggggtgttgggtagagtacatagaaagatctcttcacagtaaagaggaagaattagccccagactgagtactatccttgtgccatctaagaaatcttaaaagcagacgcaaaagaattgaactgtttccaagtaatttatctgcatcccaaaacaaaactcaagaccatttatagggatacaaaaatatcaagcacccagtcaggtaaaagtcacaatgtttggcatctaattaaaacttatcaggcatgcaaagaaacaggaaatacaagccataatgaggagataagcaatcaatcaaaaccgaaccagaactgacacagaggttagaattgcagaaaatgaaattaaaagttattctaactgtattccatgtgttcagaaagttaagtagatattaaaaaacccaaattgagcttctagggatgaacactacaatatgtgaggtgaaaaatgtactggatgaattaatagcagagcagacattggagaagaaaagattagtgaacttgaagagagagcaacagaaactatctgaaatcaaggacaaggagaaaaggtaattataatgagtagggcatcaatggagtccctaagggatagaagagacagaataaaacacatttgaagaaataatgggcccaaagcttttcaaagtcgatgaaacctgtaaacctacagattcaagtagctcagtaaaccccaagcaaagaaaataagaaaactattccaagacacttcatgataaaactgggcaaaaccactgataaagagcaaaaccctaaagatagagaaaaatagacatgttaaaaataatagcaaagttccacctgaaacagcaagagagacgatggtagagcaacagctccaaggtcctgaaacttaaaaagaaaaaatatgtcaaatagaattctataccccgagaaaatacctttgaatattactatgaaatatatttcagatgttcaaatttggaagaattcatctccagcagacctgcactattaagaaggaaaatgataacgtagagatatagatccacacaaaagagtgaacgccggtaactgtaattacatggataaatatatgatttaaaaaaaaaaattaaatcttagaagacaactgagtggctggaggtgaagcctgggctggaggggtggggtgagaaggcgccgcgccagttaaagggcaaaggttgccttgcgcctgcgccttgtgctcctgactggctgcgctccctgcccccaacaccgccgtggcctgggaaacggtcccagagctgctgagccgacctactggtgtcatggcagccccaaagacagcagctgtggggccgttggtgggagcggtggtccagggcaccaactccactcgctttctggttttcaattcaaaaacagcggaactacttagtcatcacaaagtggaattaacacaagagttcccaaaagaaggatgggtggaacaagacccta

SEQ ID NO: 32284 - DNA, 2300 bp, Homo sapien
gctatcattcagttcaagtaattttgaaatttccattataatttcattgtttaccaaaatataattcaggagcagattattttatttcaatgtatttgcatggtttgaggattccttttggagttgatttttaattttattccactgtggtctgagagcatattaatataattttgattttcttaaatttattgaggcttgttttgtgcctatcatatgatctaccttggagaatgttccatgtgctgatgaatagaacatatattctgcagttgtttggtagaatgttctgaatatatctgctaagtccatttgttctagggcatagtttaagtccattgtctgacttgtttttgatgacctgtctagtgctgtcagtggagtattgaagtcacccactattattgtgttgcctcttatctcatttcttaattctaggagtaattgttttgtaaatttaaagctccagttttaggtgcatatgtattgaggattgtaatattttcctgttggactagtccttttattattctataatgtccctctttgtctttttaaattgttgttgctttaaagttggttttgtctgataaacgaatagctacttctgcttgtttttggtgtccatttgcatggaatatctttttccatccatttaccttacatttatatgggtctgtatgtgttaggtgagtctcttgaagacgcagatacttgactggtgaattcttatccattctgtcattttgtatcttttaagtggagcatttaggccttttacattcgatgttattattgagatgtgaggtactgttctattcatcctgctagttgttgcctgactaccttgtttttttttttgtttgtttgtttttgtttgttttttattgctggtgagcttgtgtgatcatttggggtgtcaatgaatcttgctttgtcatatcatcagaattgtttttctggttccttctcatttgggtagactatttcagaggaaagatctgggactcaagggctgctaatctgatttttttttcctatggggtgatcccttgatgtggtgttctttttcttcccctagaaatggagcttcctgagaataaaactgcagtgattgttattgttcttctgtgtctagtcccccagtggagctactgggctctgggctggtattggggagtgtctgcaaagatttctgtgatgtgatcctgtgaagacctgtcttcaggtctctcagctgtggatgccagtacctgccccagtggaggtagcagggaagcaaagtggactctgtgagagtgctggttgtagtttgtttagtgtgcagattttctcgaatgctggtttgctagcagtgaagctgtcatgtggacagactcaggacctctggttagccagggtgttacaggtggtgttttctcctttcttggagtaggattgttctaagttgctgtaatggcttgagttggttgacttccagccaggaggtggcacttttaagagagcatcagctgcggtagtagaagggggatacaggcttgccctaagttggccagggtaaatattcagtcgtctcaggtaataggtgaggccatagagctcccacaagtttatatcttttgtctctggttaccaggaagggtagagaaaaccatcaggtgggggcagggttaggcaggtctcagcctagactctccttgggcttgcagtggccactttgagggatatggggtgtgtctcaggccaatggagttatgttccatgggagattatggctgcctctgctgcttcctacaggttgccaggtaagtggtggaaagccatcagtgacaggccttacccagctcccatgaaaccagcaaggccagtctcattcctgccatactcccccagcagccaacagtgcccaatttatacccaggcctctggtgcacagggctgagatcctgccccaggctacaagactccctgctgagagagcaagcatggctttcagtcctcacccttcccttcctgttgcggcttctgtgctcctatctgtacttcccgttccccacaccccaaccccctggactctgcccaggaaaatttgtcgtctttggaaattattacaaagttcagctggaagtctccttctccctgtggaccttccccaattccactggctgccctcctcaaggacccctgtgagataaattcagaaatggctatccttggcttccctggggaacaagagtgcctgcagttcttttcccacttcttttacttttctatttcactgggctctctaaattcatttc

SEQ ID NO: 32285 - DNA, 2300 bp, Homo sapien
atcccttgatgtggtgttctttttcttcccctagaaatggagcttcctgagaataaaactgcagtgattgttattgttcttctgtgtctagtcccccagtggagctactgggctctgggctggtattggggagtgtctgcaaagatttctgtgatgtgatcctgtgaagacctgtcttcaggtctctcagctgtggatgccagtacctgccccagtggaggtagcagggaagcaaagtggactctgtgagagtgctggttgtagtttgtttagtgtgcagattttctcgaatgctggtttgctagcagtgaagctgtcatgtggacagactcaggacctctggttagccagggtgttacaggtggtgttttctcctttcttggagtaggattgttctaagttgctgtaatggcttgagttggttgacttccagccaggaggtggcacttttaagagagcatcagctgcggtagtagaagggggatacaggcttgccctaagttggccagggtaaatattcagtcgtctcaggtaataggtgaggccatagagctcccacaagtttatatcttttgtctctggttaccaggaagggtagagaaaaccatcaggtgggggcagggttaggcaggtctcagcctagactctccttgggcttgcagtggccactttgagggatatggggtgtgtctcaggccaatggagttatgttccatgggagattatggctgcctctgctgcttcctacaggttgccaggtaagtggtggaaagccatcagtgacaggccttacccagctcccatgaaaccagcaaggccagtctcattcctgccatactcccccagcagccaacagtgcccaatttatacccaggcctctggtgcacagggctgagatcctgccccaggctacaagactccctgctgagagagcaagcatggctttcagtcctcacccttcccttcctgttgcggcttctgtgctcctatctgtacttcccgttccccacaccccaaccccctggactctgcccaggaaaatttgtcgtctttggaaattattacaaagttcagctggaagtctccttctccctgtggaccttccccaattccactggctgccctcctcaaggacccctgtgagataaattcagaaatggctatccttggcttccctggggaacaagagtgcctgcagttcttttcccacttcttttacttttctatttcactgggctctctaaattcatttcagctctaggtaaggttaaactcttctcccgtcttctggattttcaggttctccagggccgatgtatgtttggagatggatttccccctctcacacttcaggcactcagttttttggcagtctcatggagttttcagtggcaagccgcttatttcaaatggtctgtgaattcttttggtttttctgatatgttcctggtgtgattcttcaccaattttatctcgaattatattttattctacattatgattgctattatttccttatttttctttgtatttatgatatatttctgccatttaaaaaatttcttactacttctctgacatttgacttttggtctttttctattaagtaaagattttaaaataatgttttaatttgagaaactttagtttttaattgaactactaaaacgttttacactaattatattattctttctgatcttgtcagagattctctattttgctcacctatttcttttctagctgatgtttattatattgactatattattattattttttcttttagggatttggaaaggattccgtgatggttaatattgagtgtcaacttgattggattgaaggatgcaaagtattgttcctgggtgtgtctgtgagggtgtcaccaaaggagatgaacatttgaatcagtgagctgggagacacaaacccatactcaatcttgggggacaccatctaatcagctgccagtgcaactaggataaaatcaggcagagaaatttggaaagactagactggctgagtcttctggccttcatctttctcccatgctagatgcttcctgacctcgaatatcagactccaagttctttagcttttggactcttggacctttggccacagacggaaggctgcacttttgaagttttgggacttggactggcttccttgctcctcagcttacagatggcctattgtgggacttcaccttgtgattgtgtaagtcaatactccttaataaactctgctttatatatatatctatcctattagtcctgtccctctagagaaccctg

SEQ ID NO: 32286 - DNA, 2300 bp, Homo sapien
cttcactgacatttttaccatgtgagggagatttgggagagtcactcattaccagatggtgcggatagaagttctagcttcctacattgtctaatcttacactaccctggcaaggctgttggatgccacattacagcctaaagagtgtagaagtctaggcaccgactaggcccttgctggtatggctaggagtagggtcactctgctttttcatctgtttcttttatggcgtttcactggagtagaaaaattattgtctgaatgttttctgtattactaggctttccttttttttttggtccttcaactagagggagcaggctttttgaaagtctatttttgcccgttcatttctgggttgctggctttttcagcttcaagcttgtgatgtttgaatgaaaaaataattctgggaacccaccaccacgtctttcttcaggtcctgaggcaagtcttctttcttctctctacctttcagagtcttctgatatcctttttacatatactgttcagtgtctttacctgtagaggaagaatatagaaaattgagtctagtgtatatttctataaatggaagtcccccatacttattttttacatttttattttctagcaaaagaaaaatcataaataaagcttttgtgagaaaatttaaccaattttaattattattagtatatcttttgtgctggacttaaagatgtctgatacctctatgcagctcttaaagacccaaagtcacactaattttgtgtcaaagtagctttagtttgccattcaggatagttaaaaacatcaattttggagtcagaaaacctaaatttgagtcctggattttctgcctgctagctttatgaatttggccaaatgatttgacctctccaagccacattttctgagtgaaaaattaagaaaataatagaactcactccgtaagtctgttataataactaaatgagaaaatatgcagcacaagagctaccatattaaatgcttgctatgagacagacactgtgctatatatgtgtttctacgtgcataaaagtcctgaaattatagttcttaacattctatattttagtagctttctactttgtgctagacaaacttgccttttttgtaaaatgagaggattgaactaaataataaacacagggactttatcttgtgttgctgtttctccagcatctggaacagcatctggttcttaaccggtactcaataaattggattgaattaatgaattgacatatttgcataagatattgtggtttataatataatcttcctatattatcataactaattttagcatacacactacatgctttgttgtaatccatatatttccttccaaggtaagatgtattaattgaagataattttcatacaattatgctgatttttactgcattgtttatttagtgactatacctatagaatgtatatagtacataatgtataaatatatgacagatttgatatagctcctaatagagactaatcaaagatgaacatacaaattatctttctcaaaagactaaactactaaaggttttaagcagaagaaacatgtgatttgaattacacttttataatttaaaaaatcgcttggatggagtattgagaacagaccatgaagggataagagcagaaataaggaaaccaaaaataatacagaatagagctaatgatgtcttgaaccaggaaggtagcagtggatattgtttctgaaagtaggacttttgaaagtaggatgacaacaggattttctgacaaattggacatgtgatgctagagaaagacaggagttgaagggaatgccaatggtatttatctgagcaaacaaaggatggaaatgaggaagacagcaggtggattagataatgcacaaagttatggtgatgttgacaagtggagtttcaatgatgtggaggggcaacagctcagttggagtaggattaggagagcctcaaaaaagaattctaaaatacaagtatgggaaacttttagtgcgacttatttatgactaccttagaaggaaaaacaatgataatctgataagatctgaccaaaaatcggtggaggagccaagatggccgaataggaacagctccggtctacagctcccagcgtgagcgacgcagaagacgggtgatttctgcatttccatctgagataccgggttcatctcactagggagtgccagacagtgggcgcaggccagtgtgtgcgcgcaccgtgcgcgagccgaagcagggcgaggcattgcctcacctgggaagcgcaaggggtcaggg

SEQ ID NO: 32287 - DNA, 2300 bp, Homo sapien
tttggggaactaataaatgtccataaaatcttcacaatccacattcttctgccatggcttcagctggtccctccgtttggggtccctgacttcccacaacatctctccctttctttttatataaatgtgccatggcgatgaaggcttgttcgttctcccgattttgatgcaggattctttgactggtctggcacactaaaaacaagccgattaaacagagaaacataattccaaaatgtactacagtggagcccccagtagacttaatccaagtcatggggtttaatccataaagattttctgccatctgatctaacgcctcagctccaggcacaatggataagtgagcttgagaggcttcaaaaatttgtttctttaatttagttatgtccaatgataaattatcttctctacccagaagatgtcctttgaccatttcccatgaatgatcagtctcattataggaatatggggtgatgtagaaatctgaagtattccaatcgcactgcatttgcatgagatgctcgagactcactacccgatctccaacccaaataacagactgtcttaaatcattaatttgatttgccaatttttgatcgatgccttgttgagaattccacatttgggtggaaatggcttgccaatcattaacaaaatgagctgtttgaatggattggtgtaatgccattccggcagtggtggccattgcagtgactgtaattaggcccatgataacagtgactaaagtgaaaacaaatctcttagatctttttagaattcgctgtagcacttccttattgagggggaggattcccaaggtctaggtaaagttaccggaatccagattccttctcgagctcgaacattacatttttcctggagtcaaaatgggagttaatacaagtgcatagatgacaattaatgcattggacagtttgattatgtgtccaaattttgatatttcctactaacggcatgtaaggaggcttaacacagctctgtatgggaatagtcaggttggaggtaagtaaagcagaatgtctgggtctacattgatactgagtgggatggtagtgggaacaacagtcagaatagttttcccttcccacactcacagtccagacatggcaatagccaatttccaaagttctgggtgttctgggctcagaatggggagtatcatatgaggcctggggttggggggtgtaatgcctttatctacccattttaagggaaagaatgagctgatcctcctatgcaaagtagaatgatgattctcgttctcttgataagaaataaaataagtagcctccaggcattcccttccaccagaggagcaattgttttttaaatagccctttggtgcccagtctattactaaaccatatgagtcattttttaatattactgcatgtgagttaacacaatcttcccaaattaaagttttagatgggccctcaaaatttttagggcacggttttcctgcaggtttatatggaaagtatgggtatctcccattactcctcctttcatttgttttaaaggagaaagggagaggccagagaccaaatgtctcattttatctgtagctgaactttcaggaagataagcagcccagacttgagtttctagatgtatacaaccaggtgcatgtccaaggcacagagggtggtatttataacccatagtaacattaaatgcagtgtcttattctcctggttgggcagggcaacagttatctgtggctccaggcatccacacactattgttagtgtagatttctgcagaagcatctatccaggtgagaggttgaataagtggaggaaaaggcacataagcccaataagaatatttatgtgtagcaggtaaatcagtgtgagaggaaactggtgagacagaaagtataaggaggagaatcattaaataaaacttattgtaagtgagattctgaagaaggaagagaagaacagtgttaagtatcctggcaaaggagcattagggttacagatagaattgaagttgctcgtcagctgattgaagataaggagattggcctggattatccaggtaggctcaatgtaatcaggaagggcctttaaagtgagagagggaggcagaagaggaagtcagagcgatgtgctgtgaaatctactaccgtttgctggttttgaaaatggagaaaaagagtgaggaactgagaaacatggatggccttgggaacgtggaaaaggtaaggaaacactctttcccccagagtcttgtaagaggaatgcactcctgaaacgtcttggttttag

SEQ ID NO: 32288 - DNA, 2300 bp, Homo sapien
attaatataattgcctggctaaggcatgtgggatagtgagaagaaagtcttatttattttggatacagctattgcaatgtgaagaaattttaaaacacttttatacttgaatcaaaggacttggaaatctaagatgaattagcaatggttagctctgcccatttgtgtgtacgttgttggctacttgtgtttggaaggaacactgatatttcacattcattgcaataaaatatagtaaatttctattgtggtccagctgttgcatagctttgttaaagagtgacacttaggctaatgtactctaaggaaatgactccgctcccagtggaatctctcttctgaaacaataaatgcctgttccaacaaaagagcaccttaaactatgattccattccaaagttgtaaaaaaatggaattaattaggatttagcaagtgtacaacctctagccaggagtcatatattctaattttgagatattattcatagttctcaatgcagagagttactacacattatttttactatcagtacaataccactttttaaaagggttcagatgttttaatcactattacacaagtactacaaatgatataattagttgcattcttatttgcagaatatttaattgatctctattcagataaatttttaaatgacaaaatgctatttaactgtcttattttcagacctcctgtcatcagagcttagctactctctttcaaaaccattactattctccttcacaacctagcactaaaactggttgcactgcattagaactctgcttaggtacttcctatgcaagttttctccttcatctcacaaccaaaacctaaatgaacaatcaaaacattctcacatttttctaattctccaaaagtttccttttctttcaaggtaatttatgtcctcataaaagcttaggtataattcctgatgggagaaattagtgaaatatttcaacagtattcaagttggtctcagggactgggaaataatgcaaaagaaataaaaaaaatcctttattaaacgtaaaagggaagaagaaaagactaacacatgaaataattagaaaacaattaatttaaaaattactgcacaatatttaaactaattcactttaagttctgattattaattgcactatgggttataatcaccttttttgtgcttataatcattcccacctagtacaatggtactacactagtagtaccacactaaaggtactacactctaccactgtactaaccaatggtaaaaactacacttatattttctatttttttctatcacttgtataatgctaggcagaaagtcagcaagcaatggataattgattatgtattcattcaatcattttaaagcatttttcattttaatctttgttgcaaagaagaaaaatgtattaataatttttacttttaataaatacattagcattaactttatacagttttaaaacactcataaacttaattaagcttttaattcagttataaataggactcattcactgtattctcaacagtagcattaaaaaaaccaggtgcctatttcatattcttaatgaagcaattgctagcaataggaaaacctcaaaagattcacatttggctcaactaagttccttgaaaattaattacatataatcatttaaaacagcacaaaattgagcagaagaaaaaaaatttttggaagaatgtttgtaatatccataaatgtttaggctagtttggctggtttctgattaactgcatttggacatatcttcattgaaagtttcactgtaacatactcacagaaagctttttatctgcaagtgactttttgtgccacttgcttgggccactttttcccaactctaatttgcaatttgtatctaccctgagagaggtactgtctatcagggtatatagtaccatactcaaacagatttgttccgttatctaaactagaaataaataaatcataaaatgttatgtgtcactaacaaggtaacaacttgaatgcttatgtatatattgagcatcaattatgtacccagcactgtgatagtgtttttaaaaccccctaagagaggagccaagatggccgaataggaacagctccggtctacagctcccagcgtgagcgacgcagaagacggtgatttctgcatttccatctgaggtaccgggttcatctcactagggagtgccagacagtgggcgcaggccagtgtgtgtgcgcaccgtgcacgagccgaagcagggcgaggcattgcctcacctgggaagcgcaaggggtcaggga

SEQ ID NO: 32289 - DNA, 2300 bp, Homo sapien
ccaggtgatgacactgtgattggaaagagaaggtcatttctctggaaagaaagccaactatctagctctaaaggtttagtggtgtttaaaacaattttaacaacctcataaaaacattctagtatcattgatcacactgaaagatatagatacattttaatgactcaacagggcccacttgaaattgaaagcccattctaaaattgtagtaaaaaaaggtaaaaacatctaagtaagccttatcaaaaagactgaatagttctttccatgaatagtaatcttctctatccctacccactaattcagatcattaaaatgctttaggaagtcttaggatttttttttttctttttagaaatcacttaactctgatgtgtcatagtgtgccctcggtagctcttattataggtttttagagcttcactcctctgacctcgcccatttttggtgatgtccttggtttttgtagggctttccactactcctggttggacaagctcttctccaggggctgcatcctatttttacatgcccagtttgactcaaatttagctcttaatttctgtctattgaaaaatacaacaatcatttgctcttaatttctgtctattgaaaaataaaacaatcatttgatcttatggtttttcaatgtcaagaattttcagaggaggaaatttgctataatttgtggaattctctagggttcctgaacttttcttttcaaagcagtcttttcagatttgacctcctcaatgaaaaaaatcatatgccacacaaccatactcagatgagcttgggaactaaaggctgaacactatattacttagaactataaaagtaaagaaaactcatatataattattttactttcaaaaactaaatgttcagatcatactttttgccttaatcagatgtgatgaaaagtttggaagaagcaactcttttgtataaaatacatttgtaaaattctaaccaattggaaacttattaacccatttcaatccatgttcgaatccctgccctgtcacttactagctggctttgggcatatcacttaacctccctgtgcctcatctggaaagaagaaaatagagtctctatctcactgcatttttgtatggattaaatgcagactgacacatagtaatcactcagtaaatgctaactatcgtcattttcatatatttcttccagtgtcatcactacatatgggtatgtgtttagctagcaggggaacaaaccaaattagagaacaaaattacacactgtcatgcatttcatatgtaaaccacaaatggactctttatttaaaactatggaaaaatggttgcttcaaatttagttggctccagatttttttacaaagggttttttttttttttggatcttaatattaaatacagtcaggagtggtgagaaacctatttagcctctgaagaggagaaattaggaattaggatacctgctcatcttctttttcactctgagatgtgaactaaaggaccataggctcaataagagcctgttcctctaggacactttatgtctgataacagtactctccctttgttttacaggttcgttggggtgataaaggatctactgaggaaggtgcaaggctagagaaagccaaaaatgctgtggtgaagattcctgaagaaacagaggaacccatcaggcctagaccacctcgacccaaacccacacaccagcctcctcagacaaaatggtacaccccaattaaggtatgtgtccagattttgtgtaatttaactcaaaacttctggagacattgtaactttttttgtaccacatccccccagctacttgaaagagggtagatgaaattgcagatattcattgtacactcttaacagctgaatactttcttggcaataagaacctctaggtttttattacttattagtttaccttatgaaagaaatgagggtaaagaagattttactttcttcgttttatgtcttcatttattcagtacatagagattgagtacattctctgggaattcacaaatctcattttcccttagggtcgtcttgatgctctctgggctttgttgaggcggcagtatgaccgggtttctttgatgcgacctcaggaaggagatgaggtttgtatatgggaatgtattgagaaagagctaactgcttgagtcagtataatggaggcagggaaatagtaataaaaaatgattttaaagccctattgcacttgaggaaggaaatactgtcaagtgtagatttctattacatagaattgtctataaattacctattgtt

SEQ ID NO: 32290 - DNA, 2300 bp, Homo sapien
ctccatgctttgatgacctggacaaagtacagaatctgccagctcagggcacataaggaagtgacttatggacggattgcaggaaggaagcaggtggctttatcagctggtgctaagcacatactcaggttttcacacctcccagccatccttgcccagacagagtgtgattctctctggcctattttgtttctttttcaagcctgacctacagttcattttaacctgactttactttaaaaaggaaaaatattgggtctggtgggggagaaaatatgttgtgtaatgtaccatagagcctctcagccagttgtgcatggtctcacattctgcatcttctagattccctaatgaatgaatatggagatgtttaaggaaagtagtgcatctgaacttcccagggaaggattatcttccctaacagtgaaggttaatacatttctagagataacaaagaaaaataaatggaaaaataatattaaaatagtagctgttgtttattaaactccaattttgtgctgagggtatactgggttgtttgcatttataattttacctaatccttataacaacactattgaaagttttatacatccctggtttacagatggggaagctgaggcagagacaggttcagtacttgctactagtaattaccctgtttgaccctttcctgtctgacttgaatgcccatactcttaccgaatcacattttacctgcactttattttaacttgcaagtgaaattcctttcataacatagtaaatgaaaagtgggttggcagtagtttcttgcatagttaatgactatattatacttgtattatgttagatatgagaagttttagaggactggtaatgttaaattaaaatagagaacaggcctgaagaagccttaagcaggcaaaaacacttaggcctcgtaagtagccttaaccttatttgatttacaaatataattggaatttaatttgaactatttattgtcaatgcctacattaagaaaaatagaatttaagtgcaaccaatcaaaaacaaccaacaaacttatataactagggactttccacaggatagaccaaacaaggcaactgtgtaactataacccgtcaaatactttctttggtttacttccacgttggttctataaaagcctcccccttgtattcccttggtaaagctgccaaacctcttctgatttggatctgtctaattcaagaatcttctgctcaaataaactatttaaaattttatttgtgcttcaatttaccttttaaataagcgttaatcactattaaaatagttagtatactatcttgcagcttagcagtaaacatgcattgtctgtcaagatatttgatcagttaactttcattccagcctattctctcactctctaacaagttttagtgcttgcttctactataaataatggtacaataagttaaatcaacttttgtgactggccatcgattattagtaattcaaaatacgtgatcttttgattatttataggtttgaaatagaaaatgaatcaggattagtaaggtgaagaagtggttaaagaagaattctgtatggaacaggcatagattaaagaaagtactacatacgacttttcgaagaactaaaaaacgtacataattagttttatttacattcccaaactttaatacctgagagtagggaaaaacaaagttttttccccctggtattttcctaaggatagaagttgaggaggtttgtatagtatctgtctgggaatgactgttaatgcttctgttctataccttggtcactactgggaatcactttgtttagaaaataaaataatgcatccccatgtggcagtgaatggtatcttcactacatttacctagagggtctgggaaagccagcacagttggaaatatagagctatgtcttcattgctattagttaactgaatagtatgaaaaaaattattctttgcaccttaatactttcatttcagcttgtgttttttatttttttggtaaagcagtgattaaatgtttatttttccttttacttctagaggaatttcagattgtcttaagtggaagaggattcatgctgggcagtcggaatggcagtgttctctgcacttacactgtaaatgaaacatatacaacgagtaggtccccagtaatctcagtgttgtcttaatctctgcaaagcacatcagcatcaaatgttttctttttttctccaacgaaaactaactgacatattttttaatctaagaagaaagaaatgaagtctgaatgataatacaaata

SEQ ID NO: 32291 - DNA, 2300 bp, Homo sapien
agcttgcagggaaatgacagtgggctgaaatattttgaggtacaactttccactcccaaagaggcctgctatcccctcccactccccactccggcctttccttggcttggctttttttaaagaaaaaaaaaaaaaaaactaagcaggtttctttagaagaaaaagaggaagttcataaagagtgtttgtggtagtaggggtggggtggagtgaggagtgaggaggccgtcacctcccatggaatccttagtcttgggtttgtgaaccacgcatgggggctgttttagcacagctgctaaaataggccaggcctgcaggacatacgggtatgtttagtttctagataacttttgtttttctaaactccttcttccctttcccaaatctggcaagcgttagtcatcttcaactcggcaggaacccacaagtgtgcatgtgtggctcggaggcttcagctggggccccgccctcgtccccaggcgcacactgacacacgcagcccagacccggcccgagcgggctcctgccctcggcgtggcttctctccagccgggagtcccagggccagctagcctcctcccctaaaggggacggcctgtcagcgcagtgccagagtccagcaccgggaggaaagtttcggagtgcggagggagttggggccgccggaggagaagagtctccactcctagtttgttctgccgtcgccgcgtcccagggaccccttgtcccgaagcgcacggcagcgggggggacttcagccctccaggcggggtgggttccaggtccgggtccgaggcgggcgctggaggctcggccccaggccggagaggaactcctttcgcgagctgtcgccgtgggcccgcattgtctgcaggaactctccggaatcgggagggggaggactggatcgcgcttccactgggattcgtcaagagttccggcggcagctgcggcggtggcggagactccctttgtcctctcaggacctccctctctccctccctgtcagctggtgggtcccgctgccgcaggcgccggcgtctcagctgctcgccgccccccaccccagagtgcgtgccgggtgactcccgccacctttgcgaccctcctgagcttaggggactgcgagcgggagggagtctcaggcccccggccgcaggatggtggcggagcggtccccggcccgcagccccgggagctggctgttccccgggctgtggctgttggtgctcagcggtcccggggggctgctgcgcgcccaggagcagccctcctgcagaagagcctttgatctctacttcgtcctggacaagtgagtgtgcgagggaggtccagggtctcctggtgagggcggcactggatcagctggggctgaggctgagatgcgtgtgcgcaccccggggagtggtgttggaaacccgcggaggggtgccctgttgctgtcttctttcaaagggcaagcgcgttcggatctgtgtgggcggagatcagccgggtcgggggtagtgattggagccccgggctacttggctctttggggagttggggtattcactgtttgccagtcttttggcctcttgggaaatgggagtgtggcctcttgcgggccacgctccatcggccacagagtccttacccacctcctcgaccctgctcgtacgcaggctaaagtttgcctggttttatcctaatcatagcgctttcattggagccaggaaaagcctagggttaacatgcccaatgtggtttgcatttcctgcgaagaaaggcttttgtgtttactctgaagagctgggttccactctaaacaattaggcaggtatttacccaccccagaaaacgggctgacttcttcttcttctttttttttttgacggagtcttgctctgggactgacttctttaactctgggtaccaccaaagtttcagctacagatacccttacttagcttgaaaaagaggccaggtgcccctatgttcgtggcattgaagaaggaaccatttcaaaatgtttacttttcagttccgtgttttgtttctctgatcagttcaatttcatctttcaggtctgggagtgtggcaaataactggattgaaatttataatttcgtacagcaacttgcggagagatttgtgaggtatctttcttactttacttttctaggcagtggagaagtagagcaaagtgtagaatttcccttttctgaaaccttttataggaaaaacttttcctgaaatgttacttttaagtgcctcaaggtcgtattgcacacatgctgttattaggacagcccttcagt

SEQ ID NO: 32292 - DNA, 2300 bp, Homo sapien
tcctgataagagaccactgaccatagactggttctggctggtttacagaggctgtggcactgagtgccttcatgtcttctgtttcaccttttgacatatagggcctaattataatacatttaattgttaagtctccacctcaaagtgaacatgagacatatgcaacttgcatgtttgcttactattcatgtttgcttactaaacatgcatgttgcatatgtcccatgttcactttgatgtggaaacttaacccacctgcttcagaaatatgcatagttcatgtaccccttgcttcagaaatattcatagttcctcctataacctgttgaatatgtatacttggccaactcatttagcataaattcctgttccaccctttcctccctcaaagtgcctgctttttgtctctgccagaggctacacttcccagcctgtcaagatgtccagcctgcagctgtaaccctttataagaaatgaagttctcctttccaaatttatgaacctcaggattgtttgtcaacatgttgctactgcaatagtctcctaactgctctccctgttgtcactgttgctaactccaaattcattgtctcattgcagccagaatgatctttgaaaaacacagatcatatcaattcatctgccactccactcctgggcttaaacccctctaataacctcctgtcacactcaatattaaatatctgaattccttatctcagtaaacaaagcatcacataatctggcccttgcctatttgtcttacatcatcttacctgcaaagctccagctacacagttttttttttttcttttttgaatatgctaagctaatgtctatggacctttgcagtaactccaaatgtttccccttagagctcttggaatgactgggtcttttttgttagtcactgagtctgtcattctttatcatcacaatattttaaatttctacaggccacctttccaatatggacattttttttccttgcttatgtatttatttcttattgtctgttttcactcttcagccagactgtcagcttcatgaaagcaagggcttgttatcttgttctgtgcactaacctccacttctggaacagtgcctagcaaataataggcactcaatgaatctttgttaaagtaactaatttttatcttcaaagagctgacatatctggttgtatatcaaatataataaatgaaaagttaaatacatatggcaacaaacagaagagatgtatatgtaagtactacataaagcattgattttgttaaaaatgaaaaggtatttaggttctaaaagccagttttgactaagggagggcggaagtcacggaggtggggggaagagagaggagggagagcagaactagtagacagaggatttgtgcacaaacttgagtgcttgcacaagttttgcaaaggagacctagcttgcccaaagctgaaattctccaaaactggagcttgcagggaaatgacagtgggctgaaatattttgaggtacaactttccactcccaaagaggcctgctatcccctcccactccccactccggcctttccttggcttggctttttttaaagaaaaaaaaaaaaaaaactaagcaggtttctttagaagaaaaagaggaagttcataaagagtgtttgtggtagtaggggtggggtggagtgaggagtgaggaggccgtcacctcccatggaatccttagtcttgggtttgtgaaccacgcatgggggctgttttagcacagctgctaaaataggccaggcctgcaggacatacgggtatgtttagtttctagataacttttgtttttctaaactccttcttccctttcccaaatctggcaagcgttagtcatcttcaactcggcaggaacccacaagtgtgcatgtgtggctcggaggcttcagctggggccccgccctcgtccccaggcgcacactgacacacgcagcccagacccggcccgagcgggctcctgccctcggcgtggcttctctccagccgggagtcccagggccagctagcctcctcccctaaaggggacggcctgtcagcgcagtgccagagtccagcaccgggaggaaagtttcggagtgcggagggagttggggccgccggaggagaagagtctccactcctagtttgttctgccgtcgccgcgtcccagggaccccttgtcccgaagcgcacggcagcgggggggacttcagccctccaggcggggtgggttccaggtccgggtccgaggcgggcgctggaggctcggccccaggccggagaggaact

SEQ ID NO: 32293 - DNA, 2300 bp, Homo sapien
aaattactagtctatgagaattatgcaaaatttaaaacaggaaggtgctcttcatctcggtcctcagaaaaaaacatgacaaaggttgacctttacagaggtagttaggttgctagataaaaagagatacaagtgacaaaccaaagagagggggaaatcctacacttagggggttgaggttttggtctttgtgtgtttttagagaagcaacctcaactttcaggtttctgaaagggctcccctgcttttccttcagctcagccctaggcaagcagaccccctgcccaagcctccctcctgagatcctgcatatgctttcttgctaaatgacttttagcaccgttatctcctcatgggatacatctgttgggtgcctcgcatcctcagctccactttcatctcttctatctcaacacattgtttcctccactcctgatgccagggtggaaggaagccatcccgcccggccgcgcttggggattggcagccaatgaatgattggcagcgggcatctctgtcagagctttggcatgctgcagagtagaagccccgtgctaatgaatgccatctacacctaccagatgtgccactgggtgacatgccagatcttttacataatgccattctgccggacacaagacagctgaggggtggggaggtgtgtcttttaatgctttgggatgggagtagatctggcttgccctcattttatttcttactcagaccacccgccactgcccatacacccaatcagctccctttacattgggctaaggctcagggcatctcggagacagtggcgaagcagcagagtttgagttcccaggacatatctcctgtcccctggctctcatccatgctcatcatttccttgagttcgctccctgcccgcatccagattcaggaaagggaaatagttttcaaaattaaagaaataaaagcactaaatgggatctgaaatgaaaggaaggaaggggaaaaactacacttcccatcctcccccctcccccatccctaatattctcttcttccctagtctaaacgtgcaaggatgagcttcctacaccccatccctttggcagcttctcctgttctttcctcttccaccgtccacaggaaactggagcgtgtttatccccaagggtgatatcccgttagtgcctgtcccacgttctggctgaagtagctgtcttaaggtggaggcgtccagaaatccgtgccgtttggggagcaatgtttcctggagtgggatggacaaggtgggaagagaggaaaatgagcaaaccacttctgacggacagcgggtgtgtgagcgtgtaggagtgcttgggttgtcctcgcccagctctccatccccggagggagaatggctggaggggggctggtggttgccaggaggatcccctctcttttgctaaacctgcgggtaccgggctgccctgtaatcggcgggacttgagaacggcaggcctccgctcctcctccccaggggccatgaccctcacacacctccccacaccacccctcccgcgacacacacgcagtacttggggcgactgggcgccactcccacgccagagccctgccccgcgcccgcctggggccgagcagcctggccccttctcttgtacccccacccccgcccgctgccgaggctccagatggcttctccttgcgctcggctcgcggcccccagacgccgcccggcagcagccggcggtcgctccctccctcccagctgctgcagcagagaccggggccatttcgcgaggcggacgggctcctcggcaggctccgattggggtgggagagcggccgccgaggggcccgcagtagctgcgctcccggggaaggagccccacagtccccaggtaaggaagccgcggggcaggcgaagggcggggaaggaggagcctgagcgttccggtacccaaccctctctctttcttgaccttcctcccctctgccccttcatcctgggcgcggagggcggaacagtttctggaccagagcacccgcgagaagcagggagcggccgcacagcagccagaagagggcgccagcaccccggggccggggctacagggctggctctgccccggcgtcccgcccccgccccggggaacgctgcctctgccgcaaagatgcccccttccgctggaaagcggtaatgcccaccgcccaccgcgaccaccccttccccatttttctcagttctaactgtactcctctctcgtttcctttttgcttctctctctctctcccccctccctcgtcctctcttcctctctctttctctc

SEQ ID NO: 32294 - DNA, 2300 bp, Homo sapien
cacttcccatcctcccccctcccccatccctaatattctcttcttccctagtctaaacgtgcaaggatgagcttcctacaccccatccctttggcagcttctcctgttctttcctcttccaccgtccacaggaaactggagcgtgtttatccccaagggtgatatcccgttagtgcctgtcccacgttctggctgaagtagctgtcttaaggtggaggcgtccagaaatccgtgccgtttggggagcaatgtttcctggagtgggatggacaaggtgggaagagaggaaaatgagcaaaccacttctgacggacagcgggtgtgtgagcgtgtaggagtgcttgggttgtcctcgcccagctctccatccccggagggagaatggctggaggggggctggtggttgccaggaggatcccctctcttttgctaaacctgcgggtaccgggctgccctgtaatcggcgggacttgagaacggcaggcctccgctcctcctccccaggggccatgaccctcacacacctccccacaccacccctcccgcgacacacacgcagtacttggggcgactgggcgccactcccacgccagagccctgccccgcgcccgcctggggccgagcagcctggccccttctcttgtacccccacccccgcccgctgccgaggctccagatggcttctccttgcgctcggctcgcggcccccagacgccgcccggcagcagccggcggtcgctccctccctcccagctgctgcagcagagaccggggccatttcgcgaggcggacgggctcctcggcaggctccgattggggtgggagagcggccgccgaggggcccgcagtagctgcgctcccggggaaggagccccacagtccccaggtaaggaagccgcggggcaggcgaagggcggggaaggaggagcctgagcgttccggtacccaaccctctctctttcttgaccttcctcccctctgccccttcatcctgggcgcggagggcggaacagtttctggaccagagcacccgcgagaagcagggagcggccgcacagcagccagaagagggcgccagcaccccggggccggggctacagggctggctctgccccggcgtcccgcccccgccccggggaacgctgcctctgccgcaaagatgcccccttccgctggaaagcggtaatgcccaccgcccaccgcgaccaccccttccccatttttctcagttctaactgtactcctctctcgtttcctttttgcttctctctctctctcccccctccctcgtcctctcttcctctctctttctctctgcgcttgttttcttacttccccctccctccccgcttgcaccccggtacttttccttttcttttctgatcactggcggggggagggtttgtcgcccgccggaaggtagtgtggaggggatggatgtgtttcacgctcaggttctggctctggctcctctccataggtgcctccctgggtgctcgcgaaagcagccctgagaatggcagctctcagaggttgaagtcattcttttcgggggacggggcacggcgactgtttgattggggggtgagttatgcacttggggcagcgcttccctggaatgcagagctggggatttcccttgctagacggatgcttaaagttcagtggctttgtactgagcccctttctcccctcgaaaagtcatgacagtcaaaagtatctctctttctctctcccccgccccccacttctctccaaaaccctaaagacagcctccccggacagtcttcaccgttttttttcagaagcagttgcgctgggggtggggaaagggagggaagggacattgaaaggccgcagtggctggcaactccgcgcccgtccgatgtcctctctaatcccccagtgttctggcgcgtacccacagtgcccccagaccctccgctcgcccgtgcgccgaggtcgttgggttttagacccagagagcacgttccgtaagctcccggcccaaatcccctcggaaaaattaatcacaaccaccagcggatgcaaaatgtgtgcctgtgttgagtctgtcttttaatcccgaacgtaattctaaaaagcagcatcagacaagagctttattaatcccttacacgagcaaatgcgatctctgacctactagacttgttttcctacaatttcacaaaaagcctcgctagaggaatgtgcaaggacagaagggaaactgaggagacccgcaactcattagcgaaataatagggtgcacttcaataaaaatgcggtcctgaagtgga

SEQ ID NO: 32295 - DNA, 2300 bp, Homo sapien
ggtttattttccagatgtttgagacattattttcacatttctaatgcttccacccattctttaaagaagtattaggggaccatgtgtccatactttgtgtgtgtgtgtgtgtgtgtgtttgtgtgtgtgtagagagagagagagactgagaagtgaatctagtattcaatggagcaatcagtcagaagacaattggtagctcagtatagctgcagattcttacatacaggcatgtgagagagccctcattgcactgagccttggtcattaggagccaaccttagccgaagtagataaaattgcacatagccaaagtacataaaactgcacttcaagaagctttctttgaaaagtcagtagctaacctgaaaactaagggattccccattttctctgaatatatggggattttgcagcccttccttctgtgaatttcagcttaattctaggcagcaattcggaatttgcctggggtactaaccagaaaagagaaggaaatacacacacacacacacacacacacacagagagagagagagagagagagagagagagaacaaggaagaacatgaacttcatgggaaagtccttgcacttgtttctcctcagcaaaatcctcccctggcctcctgggactgcagtcaccaggctgtcaaagcctcaataccccactgagttccagagaagggtctcaaagctgggagaggatcaaactaacatggtaagctgctctttgccaactccccaaatacattatttcaacactaggaaaaacaacaacgaggctgtctccttacgttgtggttctgcctcctccactttagctagctacacaatccgatttatcctaatgctgacagattgcccacttcaaagtagtggtggtgtgtgtggggctgaaggagttgagaaactgtctataccactcaaaggcctttcttcctttaggagtagagaattgaactgtgaaaaagaagcccgagattccccagcgacgtggtgttgcagccccgttgaaggagtcaacttgcaggctgttaaagacctcaagtcattagcatcagctgctgcactaaaggggcaagtcagcgcctctaagtggcttagcgcacaaacgaggctcccgagacggcctcggcaactccatcccctcctccaccacccgctggatgtgaaaagctttccggagcccatcttggtaatcatttttatttttaatcacccttgccccccaaccccaagacctcagagtgccaacagtacccattatagactccctctggggctgcgcagaacgcaccaagcagagggggggaaaaaccccacgaaaacaaaaacaaacaaaaaaaaaacaggaactgtttgagtccagtaacctgcgctcttcccaccaacctcccacaccccacctccgcccacgtacccgtgtcctgggactaggaggtaccgttatgtccccttccgaggtctggtgacattctcactccaacctcatctcccaagccacgggaaggctgagccaagttctcaccaaagcgcatcctttctgaattttgcagggggaagcttggtagtgttggcgctcctgaagagagacgacgcccgtttatcacccccaggcaactagctgcgcaaatcagcggtggctccagggctagagaatccctggagctaaccgcacccctctccctttcacggaacgcggactccggggaaatacgcacggggtccgcacgcgctgggtgtccagctctctgtcacagcttctccaagtgcctagtgaaacggggaaaggccctctccaatcattttggtaccttcctttccaatcctgaaacgattttcccctcctagcagtcccagagggcccgagctttaggaggaggcgggccgggacgctctctgagaggcgttgccacccggggtaggcgctcaggatctgcggggcgcgggcaggccgggggaaaaagctgcgaggcaggcggcgccggagggagcgcctggcccagcaaagagttaaagggaggggacgtgggctgtcacgcgtcattgggcagattatgtgcagcaaacaaaaagtgtgtgtctgcgtgccagtcagtcactgcatcgggtccatctgtacaactctctccgtttctccgtctctctccctccctccctccctccacccccccaatctttttctccccatctctccatctctctcttatctcttcaggaagagcctaaaaggcggcaacaccaacacctcttgacatggaaatacactgatacaataggcaaaaggaaacactcga

SEQ ID NO: 32296 - DNA, 2300 bp, Homo sapien
gggagttgagagggaaacaaggatggttgtttcagtgcaggcggggctgcagaaactgagagaagggagcaaagacaagaggctgataacagctccagaaactggactccagagtcctcttgacctcctgggtttagacagggggctgatagtgcagctggggcaggaaccactctcctcctctttcagcagactccttgggaaaaggaaagggagaaacaagcagctggatttgctttggagaatcttcgtcacttgaggaatgggctgtgtatttgcgtggcatgggggaacttacaaatggcattcagcagcatcaatgtggcttaaaccctgacagctttgccacagacctcagggcattgcctgaagaaggaacagcacccaggttcagaaccatcctacaatcatcctccccagaagaaggtgatttcagtcaagtagaccattctgagagatactgtgactgttctcaatgtctacttttagggttgccttgtaaggatctgcctacccaccctagttaagggagaagtatataacttgagcctagaacagtggacagggggtgtgttcagctctggacagtatctcatgtagtgtgcccatgttatgcacatctatgtgtgatgtcctctttctttatcacagtggttttactacactttccaggtaaccttctgttttacaagtactttgatgttactctggcggtggaagattccaaacctgaaaaatctgcattgttttatatgcgtttcattattgagatggaaaaccttaagtaggtactcaataatgggtaaggccgtttcttagcttcaaccttggttcatctgaattgaccttatcagtcaatagcacgggccgtttcattaaaataaccaatgaataatgtatcatagcttagtttaaagtttcaaatatgtttttagacagaaacattccaagcatgcaagtcaggtgtatttcccagataaataacagtctggggacgttgcccgtacagggaaattctctgttctcaaggaaattttcccttctcgggtttcctgaggttgaaatccagcgcgcacgtcattaatcattcactgaggtcggtccctcagtcaatggcaggtctgggtaagctaaagcgagcagttagctaacccttcctgccacggggatcctggggcgaaagaggacaactgggcggtcagttacatgtgctggtgtccagccgctgcctctctttccccggtcggagcgcgggggtgcgtgtgccctcactctcacgaatacagacggagagcttcccagaaggaaaaacaaattcgtcataatgttcagcgcagccgagagtttccaacaagaaagcagctccagtcgtggcatgatgactcagggtggcgttttaaacgctgaataaacccattccttagctctttaataaatcgctaataacagcaaaaacagccttctccccgaaccgcgccacaccaaaggcttcccaagttgggctgcgaatccctgtttggttttccaacgccgaaagacgtagaagcagtgggatctcctggtgggacgcatttctccaagggctcccagagagaggacgagatagcagggtttacagggcaaagagaggagaacctggaaatcgtgtcctggggggcaagagtgcgttgcccagtcacaagtgtgctgtagaggtgggagaggacaaggacccatttccacatttcaaccctccgtttctatcgctgcccctggaggactcagctgctaacgccgagctcgtttccacgcggctctggtcctagtcggggaatccgggtggccgcgcgacgcgagagaactgctgggatgcgtggccctggtatgggcgcacccagcgtccggggcgcaggttctctcagcccagcttctcctcccactcactcgctcggatctcctccctccttcacatcccccgcccccgggaccgcgaggctccctccccgcaccggccagtgagtacacaaagccgcgggtgaggggaagcttcgcaggcgtgcacggagcagtgagatcactggcgttataaatatcccggtgccagcgcggagatccgctcgggtggcctctctcttcccctctccccttctcttccccgaggctatgtccacccggtgcggcgaggcgggcagagccagaggcacgcagccgcacaggggctacagagcccagaatcagccctacaagatgcacttaggacccccgcggctggaagaatgagcttgtccttcctcctcctcctcttcttcagccacctgatc

SEQ ID NO: 32297 - DNA, 2300 bp, Homo sapien
ggacgagatagcagggtttacagggcaaagagaggagaacctggaaatcgtgtcctggggggcaagagtgcgttgcccagtcacaagtgtgctgtagaggtgggagaggacaaggacccatttccacatttcaaccctccgtttctatcgctgcccctggaggactcagctgctaacgccgagctcgtttccacgcggctctggtcctagtcggggaatccgggtggccgcgcgacgcgagagaactgctgggatgcgtggccctggtatgggcgcacccagcgtccggggcgcaggttctctcagcccagcttctcctcccactcactcgctcggatctcctccctccttcacatcccccgcccccgggaccgcgaggctccctccccgcaccggccagtgagtacacaaagccgcgggtgaggggaagcttcgcaggcgtgcacggagcagtgagatcactggcgttataaatatcccggtgccagcgcggagatccgctcgggtggcctctctcttcccctctccccttctcttccccgaggctatgtccacccggtgcggcgaggcgggcagagccagaggcacgcagccgcacaggggctacagagcccagaatcagccctacaagatgcacttaggacccccgcggctggaagaatgagcttgtccttcctcctcctcctcttcttcagccacctgatcctcagcgcctgggctcacggggagaagcgtctcgcccccaaagggcaacccggacccgctgccactgataggaaccctagaggctccagcagcagacagagcagcagtagcgctatgtcttcctcttctgcctcctcctcccccgcagcttctctgggcagccaaggaagtggcttggagcagagcagtttccagtggagcccctcggggcgccggaccggcagcctctactgcagagtgggcatcggtttccatctgcagatctacccggatggcaaagtcaatggatcccacgaagccaatatgttaagtaagttactcgctctcctacaaaacccgtcctaggcggccgcggaagattcgggagggacagcaggtattcgccgggacacaggctcaccttcctgagcccaggccactgggaccaagctgatactcagaaacagccgggcgggttgggtggagatgcatctatatggcgtgcgcacacgcacccctctcctgggcatgaggaattgcgatttctcaggtgtatgttacctagaggctggtgcccagacgggtaccttgttttcagtttgctctagcctcaaagacgagtccccagccatgacaggagagaacaaaaaactcatttcttctcactcaatttgtttaccttctgcttatgaactagcctggcatttttcattaggcatcaaaggcagcccttctccctatccataactgaagttattttttgaaaagaagaatcaaatcccaaatacttccctcttccatccgctaccataaacctcaaattaatattgtatatgtatatgtatatatgtatataagtctatgtatacaatgtatacacataggtagatagatagatagatagatagatacacagatagatagacagacagatagataactaggggacaccagacagacattcctgcttggaagaagattgtgctctagaaaactggacgcgtttagagagggagacatgataaacattgaaattactaactccagagttggatttaacaatgtttagtatcttgagaccatgactacaccgtattaggagagtggccagcctttggtccccaagaacagttaggggaaagttccttattttagaagaaacgcagaggttaaatttggtaggggtgcagattttgtaggactttttataaacaaagttttaaattttccctctgagttttttctttcagcacgctctcttttttcctttctcatctcctcttcccttccaccccatctatgtttccagaccatcgcagccactcctctggtttctcttcactgcctctaggcagctgggggcagggacggtttggggctgtgagtaggagtggggagatctctgtggggcttttgctcagtagggccagatcgctcttccagcgcgggttggtccaccaggcagagccccagccagggcctgtcaggtacccagggagaccggaaatgtagccaggagacagcagcgctcacagtcacctggtttcagtgtcagcctggttgctcctagatgttcctaacttgctccatctcagaccaaagactccacgggccat

SEQ ID NO: 32298 - DNA, 2300 bp, Homo sapien
agtaagtaccttaaatctggcatatattttgttattcttacataacatatgtttcctctttcctacatcttggggttttattatgaatatactaatccttctttgtccttttgcaaagaatggaatttctgggatcggtgctaaattccaggtttcagtctttaaaaatcttggacttgaagtaggaatgcatgttatccaaaataaagtatttcttgatcataacaaaagccttgcaatgaaaagagaagcttgccgaaacttactaatttctttgttgccaccctttcatttctcaggcacaggtctgaaagtggttctgaagttaaattgaaagtttagaaaaggacaattgagttatacgcactattaattctagccttactgtgaggaacaaggataagtttatgaattttcttgatattaatagagaagctgatttgctgaaaatcagcctcagtgttttgagttagaagacatttctagactcattgactgaaaataatttcatgattgtttaaatttagatgctgtagagattacttcatcaaagagatgttgaccaaatggcaaatttaatgaggtttctctaaaaaatgcacaatcacaattgatataatagaacaatatatagccaaaccatgacctcacattttactaacatataggtccttttcattaaagtgctctagtttaataaacccaaacattctctagatgctttactgtttcttaaaagtgatgaaatcttgatataggaggattcttctgcctcagcttcctgagtagctgggattacaggcgcccaccatcatgcctagctaatttttgtaattttagtagagacggaatttcaccatgttggccagtctggtcttgaactcctgacctcgtgatccacccacctcggcctcccaaagtgctgggagtcactgtacctggcctattattacttttgatgggttaccagtgtccaaggttttatctcctttttgttttcccaaattcaataattaaattgcattcaaaaataaggcccaaaatatctttaaaaacatgtcagaatacattcattaaacaaacaaaaaaacaagttagtagcatcctaaatattgtgtctatatcacttaaaatttgcaagtcatgacatcctaatttttaagatgaactttttaaattaggaaagctaactgaaatgaagtatcttaccagatgttttcattaaaattttgttagcaaatctgtgaaaatcttcaagatgaattagaaacgtacttacagagcaacaattaaaggcttagcattgtattatatgctaattcccaaggatggtttgtaaaatattaaaatccaaagattggttctgaacatattttgccagctgttgtgttggattactttaaattcatattttaaaaacacaatactgttctgaagaaaacaaaaaatctttagtgaaagactttatttaataagatttcacagatattttattctttaaaaagggcagcttcaacacagcaaaatttttcactgtgctaaaatagtaaaataagtgcaagaacttggtgccaaaaaaggtctgcaaagacatttttttgactgagtttctttcctttgggaatttcataaattgcttcttgtacacaaacattagcaataatttacctttgttataactttaaaaataatttaacaaaatcattattttattattgtcgttgtcacaacaccatttgatatacttgtttttgagacagtctttttgcaaaatgtctcggtatttttgtcttgcataacattgttttagaatgcaattgggagctaattcctaatattttgtctaagtatgtaggcagtgtcatactttttaactttggattgcagtttgcacctctctggttgctcaacagttcactgaagcctgagtcggtggatgggtatccgacctgaacttgggtgggtaattccagaaagttttcacaggagtgaggcagaagacagaaactgcaacaaaccgccggggggtgggattaacgtccaaagctcacaccggcttcaactgattggcaggaacgaagtgggtggagcctcctgaccctgccctcctgcttccgttgctagggacgcttcggccgaggataccgcaatggatcaggaagaggggctgaaggccttggacaatattgtcactcaattcaacgcctatgaagatttcctggactcgcagatcactactgtggacttgtactacctggaggtaagggcggagcgcggcagagtagccgccgccgcgcgtc

SEQ ID NO: 32299 - DNA, 2300 bp, Homo sapien
tattgaattttgcaattagatcttcattattaatcacaaaagctattatgttctttatgccaagcaaagatcaaacacatgatctcatttaatcctcacaactactcttgaaatatgtgttattatctgcagaacagttcccggggtggctaagggcaaaatccaaaccgcagtgggttaagaagtgactgagtggggagaatgtagtctggatttgggataaatttaggatagaaagggattgagcccctattaaaggctagtgagtgcgccagtcactttagcactgctttctaatgtcatccaaacaaaactctaaaaggaatgtgttgttattcaccatcaaagaagaaactcagatctggagacatggtgtgactccaggagcctatcttcttttcgatcaactccattgccctacagaggggaagagggataaatgcaatagacattgactgaagattttactgcatatggtcaagaactgcactaaacatttacatggattgcacactgaaacttcagtttaaatgctaatttcactattaatagtgtggttatctggcctgaggccagaaatcagactccctgaatttggatctcagttctgtcacttactatgtatccttttgcctcagtttcctcatctgtaaaatgggttttgctgtgaaaattatttggtaatatacttgaaatataaataacaaggcatgtctagagcataagtgtggagaaaaatgttagctcacagttgttttttgtttgtttgtttgttttttgttttgagacaaagtttgctctgtcacccagtctggagtgcagtggcacaatctcggctcactgcaacctccatctcctggattcaagccattctcttgccgcagccttcccagtagctgggattacatgtgcgcaccaccacgcccagctaatttttgtatttttagtagagatgaggtttcaccatgttggcaaggctggtctcgaactcctgacttcgtgatccacccgctttggccttccaaagtgctgggattacaggcctgagccactgcgccaggctgctcatagtttaatctccattgtacagccatgacaagagagaattaggaagacaaagctagcgactcttacattctgttccggactccgggatcttccacacacccttgtttttagccaccactgcaccatcctgctgggaaaccttttggggacctgtaggaaggaaacctttgggggaagctgtaggtggggttgtggtgtgtttgcttgttttcttatttgtttttaacatgatattgactcgcacatatttctcacctcgagagaagatgatgcgggagagaggggcgttatgatgggtatgctctcagaaagacaggaagctatgatgacgggctgcaggtgcaggggcccgcagtgtccgtcagaagaggctcgggaaagtaagcgagaatggtgttcacgttgtgactttgtttggaatcataagaccgaaaagccaggaagaagttctgttttcctctgccctcttgctagccaccacacagccactgttcttggagaattaaaaaaaaaaacaaacaaaaacaaaacaaaacaaaacaaaaaaaccgtccctcctaccatttctttagtcctgaatctccttttcccttcctctccccagccatccccacccctacttcctcttctctccctcccgctgccagttctctggttactccccccctcccttgcttctatcccagcctggtgcaagctaagagggcgaggacgagggagtgggagagattggctgaggactctacagatcagctagagagcgaaagaactaagtctctctctctcatacacacacacacacgcacacacgcgcgcgcgcgcgcgcacacacacacacacgtacactaaaaaactcggaccagccgcgccgcagctgctccaatccctggaaaaggcaatcgagcgccctccggaccgctgcgcacagccccggctccgacctggcgcccaaaacagagctagtcctagtccctcgcgcggccagtttggccgggtgttcccaaaaataaagcgaggagggaaggtacagacagatcttgaaaacacccgggccacacacgccgcgacctacagctctttctcagcgttggagtggagacggcgcccgcagcgccctgcgcgggtgaggtccgcgcagctgctggggaagagcccacctgtcaggctgcgctgggtcagcgcagcaagtggggctggccgctatctcgctgcacccggccgcgtcccgggct

SEQ ID NO: 32300 - DNA, 2300 bp, Homo sapien
gatttcaatataacatattctgaattgcttattcaaggtacaagtatgtccagggctacttctttgaattctagtctcttcatccttcttatacattcataatatataagatcagtaaatgctgccaagtcaacagaaacttaaaggttaaacctgccacatctctgcaacatattaaggcaattctccaaaggctaatgtttattaatgaccactttgaacctgaattctatgagaaataagtaggtgtttcaagattgcttttataaatgcatttgttttttgcaccatccattgtaggcaatctgcattgactatttggtcacatctgtttgaaatctagatgctgtgttacatctttgcatctgtgcctttgttgttgtagaggtcacagttattctggtagaactagtgaaaaaactctaagtatttcacttctatttaagtttgaagtttggagggcgagaggggcagatgtgtgggttataaaactgtttcatttcttctgatttgagataatcagaactaattcaagcttagtttacaagtgttataatgctttttgggttatggctgttgtattagtctgttctcatgttgctattataataaagacatacctgagactgggtaatttgtaaaggaaaggggtttaatggactcacagttctacatggctggggaagcctcataatcatggcggaaggcaaaggaaaagcaaaggcaaactcccctttataaaaccatcagatctcatgagacctattcactatcacgagaacagcatgggaaagatccgcccccatgattcagttagctcccattgggtccctcccacaacatggggatttatgggagctacagttcaagatgagatttgggtggggacacagccaaatgatatcagctgtcaaaaactgcatgtgcaaaaatatgaagtttaaataggtagtctaaaaagccttaaaacattataataattaattagagcagtatttcccaaagttcacacattcaagttctacttttgtgagtctgctcgtgtgtgcttattatctgcagatgatttatttttattttcatcgaattgactcagtaaacctgaatacctagtttagtcttcactgaagcaataataacaatgagatcacaactttgtggtgatagttatttatatttcaaatacatgttaaaataaatacatagctattagactaaaacaagttctgaataaactaaatcatcccttataacccctgatctgcataccacatccagagactcactagattcatgattactttggggcctgaactgaagatattcatttttttaatttttgaaattttcataacttcccacactacaccaatgttaggaggacattcttaataggaaaagaatagagccttgcagcatgggtcgtacattttggagatcctccactttggacataaagtagaggatgcagaacaattttaaaactcttcttgttggtgaccacagttcagaagtgttttagcagtgagtgttatcagaaatgcaaaacttaatagatacatacagcaggaggaaagtgctaatcaaccatcaccaactctgcttccgtcttctgagaaatgcagatgtgtaattttctaaatctggggaaggtttcttactgttgccgcatggggagctatgaaagttgtgacatttccatgcctctgttgttgtagctgctcatttgcattttatctttgccatgctgacatccaaatcacagttttgatgtgatgcttttggcagctgttcagagagactgtccagagaaaacagcaggtaactcagaccatttgtgaaaaatgttaggtgtgatacttatgctctcaaagggacaggtaagaatgaacccaaatgccaactcctcttcatggagggaaaaaagaaatcaatagatagctttttttttttttctggaaacttcgggaagtttattgcttttcaaacaatgaagattactgtgttcctatttatgaaacaagataggaatgagaggaatggtggggactgttgggaagtgaaactccacttgatacttcccaattctgtgccttctcaggtccctgagcaaaatgggaaatggttcagtgaaacctaaacattctaagcacccagatggacactctgggaacctcaccactgatgctctgcggaacaaggtgacagagctggagagagagttgaggaggaaggatgctgagatccaggagcgggagtaccatttgaaggagctgcgggagcagctgtcgaagcagact

SEQ ID NO: 32301 - DNA, 2300 bp, Homo sapien
gtggatgcccctcctcccaccaagctcgagtgtcctgggttgatctcagactgctgctgtgctggcagtgagaatttcaagccagtggatcttagtttgctgggctccattggggtgggaccggctgagccagaccacttggctccctggcttcagcaaccctttctaggagagtgaacggttctgtctcgctggtgttccaggcgccactggggtatggaaaaaaaaagaactcctgtagctagttcggtgtctgcccaaatggccacccagttttgtgcttgaaacccagggccctggtggggtaggcactggaaggaatctcctggtttgtgggttgcgaaaactggcacaagcacagtatctgtgctggagttcctcaggctcagtccctcatggtttcccttgggtagaggagaaaattccccaaccccttgcacttctcgggtgaggcgatgccccaccgtgcttcagctcactccccgtgggctgcacccactgtccaaccagtcccagtgagatgaactgggtacctcagttggaaatgcagaagtcacatgctttctgtgtgaatctcgctacgagctgcagactggagctgttcctattcagccatcttgccagcaatcccctgcaactcttaatttctggctacaggatcagtaatgtcaagggtgtaagtgactggcccaatgtcatatggctcgtttgttacagaatcgggatgcaaaaactgagcttgaaaaatcaaccaaccagtacaaccacaacagcagggcagggccacccagcctctgtgtttcactctgcatggctggcccaccaagttcccttggccttatggcttctcatttaaactgcagagaagctatggttaagtcaaaggctcaagtaggttagagtgaattactgaatcagaggagtcctatttacacaaaggagggaaggagtatcataaagaggaagaaaagtaaaaggaggcataaatgaagaaaatgaaagaggaatccgctaagaatagacaaagtgagcgtcaaaatgactccaccccaggaaggagagggggagggacccatggagcaggagggaaaaggattcctccccctcagtaatcttaattataacagtataggacaggtatgaatagtgttgttttatatatgagaaaactgaagctcagaaaagctgtatcacttactcaaggaaatacagttggtaagagtctcctaattctgtaaattttttcttttcataggtctctttcttcccttgtttccatcattatttccctctggcctccttttatgtgtacaaagtgaagtacggaggtttttaccttttttctgaaatagttatcaaatatcccatgatggagtgagtacgtggttaccatgacaacacagccctcactgaggactagcctccctgctttgcctccggaatcatgtttcacggaacaggttcctctccgtgcaacttctagcagctgtaattctacattttgtttgggtgattatttgctgaatgtctgtcctccactagactatgtaagtttcacaatggcagagaccagcctactttgccaagtgtgcccccagcgttttgcacagtgcttagcaccaggatctatgtgttatttgctaagcaaatgttctgtggttcctctccgctctcttctgaaagttacatggacagtaacctttagctcacaattatgttaataaatactgtgtaacgagtcgggccggtatttacagatagtatacacgtgaatgaacacacacacactcacgactgcacaacagcccggggcaggtgcactcaagaggaaacgcgcacagtcggagccagcctgaccaacgctgttaaacaccgctgcgctgggctccgcgggcctctgccgcgtgggagggcacccaggctgacgcgctgcgggagtctggggcccactgggacttgcctgccgggccgggtggcggcggcgtgggcggtgagctgcgcggtgattggcccgcgcctgccggggcggggcggggctggcagcgggaggcaggcgcctgagccaaggggggcgtgcgcggcggcggctgccgtagtttcagtataaacaaggaacccgactggttagacagattttgtttttcttcttcccgcgcgctttagctccctgtcctttggtcgcatttgtgggcgcgcggcacgcagccgggaggccgaggactcggagttcacctgcaggtaggttgttccctggctgggttgttctcccggctgggggaccacagcccggagcgggaact

SEQ ID NO: 32302 - DNA, 2300 bp, Homo sapien
ctttaaaatcattcctaggttgtctggaacttttgacataaattctaagaattccagaagctcctaagctacatgtgaaatcaaaatgaaccttttggaaaagtcactattaccaaaaggtgggtatgtctaatgatatcttaagatcaaaataaatgacaattaccgtcacttgagccagaaaagattaaacagacttcccttcagtcaatcatcttagttgtatctaacccggaatatatggtttgagcaccatatccactttatcctttgctaatattctggcaggtggagacaaatgtggagtcactaccactttacggtaaacattcttggtattacctttatgtgacttgattattacgggagtttggtaagattatatttttaggacgttttcagaatttgacctgtattcttgagttttaattattctgtaatgtaaattctactaacttgattaataaaacttacttataatcttcctttgagatttttggatagtgtccaattaatacaaattcgtttaactgcagtggaaaatacctaaactttttttttttttttttttttgagacggagtctcgctctgtcgcccaggctggagtgcaagtggcatgatctcgactccctgcaatctccacctcccgggttcaagcgattctcctgcctcagcctcctgagtacctgagattacaggtaccggccaccacgcccggctaatttttgtatttttagtagacacgggggtttcaccatgttggtcaggcttgtctcgaactcctgacctcgtgatccgcccgcctcggcctcccaaagtgctgggattacaggcgtgagccaccgcgcccggcccaaatacttaaactcttaagatttttgctggagtctgcaaactcgtctttgtttcccccgtgcccgaacactttaattaaacaggcaaataattatttgttgactacagaagtacctagaagcttcattttcttctaaggatactgctggaagcagcaaatcccaaagcccgaataatccagtctccagccgaggcagcgggaatttttaataggtgtataaaattactttttatacaccttaatgaaacgcctaacggtgttacaagaaaagaaaaaaaaaaaccacgcacacacaacaaaaaagccaaacccgaacacaaactcataaacctcgtaaagatgactcacgacatttatatattctatgtacaaaggctaaagaacattaagcgaacccttgatttaacacactttccaattattagtaacgtaaaggaatcacggtacgttttaggatctttaaacaacaaaagcaaagcaaaaacaatgttttccttaagatatgcaagttacctgcttcttcgaccaaaaacaaaaaaattccaggagaaaagcaggcaaacaaaaatcttacttggaaagccaaatcttaaaaagaagccctatcggcccagcggcgatagacgaaaacctcaatgtcacccggtcccgggcggcgacggcagggagagtagctgcggcaatcagtgcgcgcgcggtccgctgcggcgcctggcgctccgcgggcgtccgggtggacagcgccaggggcacagggctgacatctcagggctaattccctcctccagtgcgtaaatccaggcttaagccgccgcagggtgtgagcctcccctcccccacccgaacgccgcagctgcacggggcacgacagccttcgcagaggtgcagccacaccccggcctaacgctgctgctcccgccgctactggagtggtggggaggggtgagtggactccaggaatcctcggaagggcgggggcggaggcagggggcccctctagccgctacttcgaaacagcactccttgttctcgatggtccccgcgcgactgtcttagctcacgacacttccggttccttttaaaggcccccaaggctgtgcaacgcggagcgtgagaggaaggtataaagggtagcgagagggcgggaccgaggaggaaagggaaaaaaaaaaaactagggggataggggtggggggacgcgcgaagggcgcgctctcgcgtcacgtgaccgggacgcgccgttcttccgtcggccattttaggtggtccgcggcggcgccattaaagcgaggaggaggcgagagcggccgccgctggtgcttattcttttttagtgcagcgggagagagcgggagtgtgcgccgcgcgagagtgggaggcgaagggggcaggccagggagaggcgcaggagcctttgcagccacgcgcgcgccttccctgtct

SEQ ID NO: 32303 - DNA, 2300 bp, Homo sapien
cacagtttctctgtatggaccaatactctacaaaatcaactgtgccttaattattgcttattttaaattacattttttacagagctatgtagtacctgacgcagaaaagcaatcacataaggaagcatttatttgaggtttaacatgaaatgatacaaataaaatgtgtataaacaaatccacattgagtcataacacagatagcaaaggacaaagtaaaaacaaagaaaactaattggcagctatatacagttggacacaatggtgtcttgtacactagaaagtcttttacaaaataatcatcttagatcaacagaagaccaatcttcaatgtcgtcctgcaagatgggttactttaacatctcctcctaaaaacaaaaacaaaataccagttagatttgtgcaactctgacaagcttttaaaggtccactttcatgaattgttttaagtcctcactttattttcttcaataattaaagatcatatgcatatttattggtaaaatacagtttgggtagtcaataaactcaccctggagttcccaaatgacattaaattcaaatctattcaggaaagaatctgggaatacaaccttcccatattcagaggttcaactatgctagattaaggtctactagaagcatctctagtaacccaagtaaaatgctatcacaaacaccaatttctaataagtttattacaagaacataaattgatctgtgcatatgatctttaatttatatcccagatttaaaagttcttgttttggtttgtagatttcactattagctataaaaagaaaaagcaagcattaaatcttaaaagaatgaacacttaaaatgaggctccacaattgaaatacaacactaaacagaagaccaaaatgattaagctgtaaaaaggcatttatgtactttaactcctgtaaaaaaccatttaagttaagtttagacacttaatctccaaaaagattaaaaatgaagccaaagtctgaagttttccactttaatctttacgctggtacatgaagttggaagagaccataccacaggacagcgttttctggtgtatgccttgcgctctgcccgcaacgtgcgacccccagagatagacgtggtcagggtgacacacggcctgcaatgaagttcccgctggcgggtacaaacaaggtataatgtcagagttagaagacaacattcttgttttccttaagttgtacccatttcagtactttacctgttaatagttctaaaatgtttaattattcctctagaccacctggtacacaaaagcaaacagaaaaactcttaagtttttctgcaatactaaagaaagtgagataagactttaaagttaaagatctatagacactttaggcaaaacaggctcataaagcaattaaaaaatcaacaatttagtaaaaacaggctacatagtattttgtttttacgtttcatttgtctattgatctttaaattaaattagacatttctactgttttcctgtactcttatacacacctgttttctccaatgttctcctttagtatggctggtaattgttttggtgattgccaccccctcgagatgccttgccataagtgctctgttggcctattttgaaaacacagaattctcattaagatagttttctacaaaactttctttacaaacacaaactattaaatctacaaatctttgcatgctaaataaaaagtattaagatattttagcacccattagatgctactcataaatcatacatcctagttcatttataaccaccagtctatgttagtataatcatcctatgattgtaacatgcctcaaacacttaactccgaacactttaatggaaagcccatacacacaatttcagaacaggattgtatgttaacaatgaattttaataccactgctttataaaattaagttaaatattcttaccactgtagtctgcatatccctgtccatatccatagttcccatagttatacccagtataatcatatccgccatagccactatagttttgatcaccaccataggcactattgtaatttccatatccttgatcataatagttattaaatccttggttccagttttggccctgacctgaaacaatgcacaatgattgttaggaaacaacttctgacccccaattctaacataaaatgatgcgttcttgtctctcactctgcaaatcttaaagggcagaatggacatatatattgctatctgcttgaaaaactatttttccagctgttataaaaaaggaggcagaaagtccaattgtg

SEQ ID NO: 32304 - DNA, 2300 bp, Homo sapien
taggaagttgtgccttctacctaaaggaatctgggcagaacctttactgtattttattggtctcttttgagctttgctttatgtagtgcggacagtgagctgtccgctggtttgagtaacttcgttgggatattgggatttttgtgtgacatagattaaatgtaaacatgaattaaattgcctacacttagggggtaaatgtccctgtttttatttcacgatttaattccagaactgaaggatcatttgagttattgttaattttttttaaaaacacttttatttctagtaaaatgtttattggaggcttgagctgggatacaagcaaaaaagatctgacagagtacttgtctcgatttggggaagttgtagactgcacaattaaaacagatccagtcactgggagatcaagaggatttggatttgtgcttttcaaagatgctgctagtgttgataaggtaggaactatgttttgcattgtgctgcttttgtggtgttttgcaaatttttctgggggttatatggtgctgtcagattaaataaatctgtcttgtaggttttggaactgaaagaacacaaactggatggcaaattgatagatcccaaaagggccaaagctttaaaagggaaagaacctcccaaaaaggtttttgtgggtggattgagcccggatacttctgaagaacaaattaaagaatattttggagcctttggagaggtgtgtgattatgtttacacatgttaagcttgatgtgtttataaaatgttcaatccttgtccgatttatgcagggcagattcatgtttcctgtaagagtagaattaaatgactgctcaagtcgcttccagtgactgtaccttgatttcattgctgctctgatggaaacccaactatctaatttagctaaaacatgggcacttaaatgtggtcagtgtttggacttgttaactagtggcatctttgggtacaaaataatattaatttctctcaatgcttcaaatatacaacaaatcactgtaggctgatgttgatcataaagcagtgatgtctgtatagaagtcacccgataagaataacatgtttaagttgaagcctgaaaaggcctttggcattctgacactgtaacgttttacaattatgggatgacgttgagtgtgcatctcgatttcagattgaaaatattgaacttcccatggatacaaaaacaaatgaaagaagaggattttgttttatcacatatactgatgaagagccagtaaaaaaattgttagaaagcagataccatcaaattggttctgggaaggtaaagccatttaagcactttaaatgaaaatttaaataattgaaataatttcttgatgtggagaaaaataaaatgatttaattttagaacttcggtaaaaattatactttcatgttttttgtttatagtgtgaaatcaaagttgcacaacccaaagaggtatataggcagcaacagcaacaacaaaaaggtggaagaggtgctgcagctggtggacgaggtggtacgaggggtcgtggccgaggtgagacttaattcttgaaatatgactccgtggtttatttaagctgtatactgctgaatatgagtagtcctgtaccaaagcaaaactttaaacttaaaaccattccagcggaggggggactgttcagcttagtggaggttgtgtgtggtggttttttgttgtgagctcactggtttcaaaaaactgttaaaagtgtggccactttgacaattagtgtcatcactgataggaaaagtgtaccattacatgatacaccgtggtgtgataggttttcttgggcaggagtccttgttttaaacagaacagtgtacctgtcttcggctttaatggaaaattgaatgattttccattaagtttaggaagtttgatactggcacaattggactttctgcctccttttttataacagctggaaaaatagtttttcaagcagatagcaatatatatgtccattctgccctttaagatttgcagagtgagagacaagaacgcatcattttatgttagaattgggggtcagaagttgtttcctaacaatcattgtgcattgtttcaggtcagggccaaaactggaaccaaggatttaataactattatgatcaaggatatggaaattacaatagtgcctatggtggtgatcaaaactatagtggctatggcggatatgattatactgggtataactatgggaactatggatatggacagggatatgcagactacagtggtaagaatatttaacttaattttataa

SEQ ID NO: 32305 - DNA, 2300 bp, Homo sapien
ttaaatcgtgaaataaaaacagggacatttaccccctaagtgtaggcaatttaattcatgtttacatttaatctatgtcacacaaaaatcccaatatcccaacgaagttactcaaaccagcggacagctcactgtccgcactacataaagcaaagctcaaaagagaccaataaaatacagtaaaggttctgcccagattcctttaggtagaaggcacaacttcctagatgaatccctcacatcttatcttacttaggtccatcttcgttctcagctgtcaagccaacgttccacccagagaactcatcaatcataacacgttttgtgaatctgggtaccagtcgcctgcttgtgccccaactcagtcctctaaaactcttcccaggaaaaccgcgccgagtggtaacagagacacaatgaagaggcggcggcagctgcagcgtgcagcgctgggaggccggcccctcccccccgggtcccacgcggcgcctgcgcgctcgggacacagacgccgccgccctcctcctccaacccctccgcccttcccccactcttcccgggtctctccagtcaccccctcgatctcttactttcctcttccctccaatctagtggggcccagaaggcacgcggggaatcgactctgagaaagaatgggggcagcgcgcggctcacgaggaacgaagggcgcgtgcggcgcgctgggggagggggagcgggggaagaagcgtgcggtacccgtcatcctgctgattcttgctcgcgttgatcttggatccctctgcgaattcctctatattgctgtactcgttcatatcctccatagtgacggagctgtcggcaggggggtgctggcgcgcagtccgggtcgcggcagcagcggcggcggagcgttgtatggagctggatttaaaatggcggcggaagagatccgggcgccgcctgcgccctccctttatagccgccccgcccgccaatcgggagggctgctgggcggtgacgtggcgctgggcccggcgcgccccctgccgggcggagctgggagcgagcgaagggaggagcggggctagctgccgcggcggccgcggccgccaatgggagaggctgcgggaggctaaagtagcgggagcggaggggaacaatggcggcggcacatgggaaagcctgggcgggacctccatcgcggccctcccggcaaggagagaggccacgcgtgaggggacgcgggcttgggagaagagaagaatcagaagagaaaaacgaaggggcgtaaattcctggggtcagcagtcccgagcagagccgacgcagggccacagtccctcttgccttgggagcctttgtctctggcgtccggtccagcccactcctaccaaaaagccgtcaaccccgcctttttctgccctcggttcgccagtgcggagccgctgcggcggccgctgctaccgactagcaccgcggccagtctgctccggaaaaaggcggactgcgcccggcgctggcgactgaggcggcgagcgcgctcgcccgccgcgcgcacgcgtgttttgtcctcgagctggcaggaaccagccgaacaggaagcgggcgcgcgacggctcctccgggcagcgcagcgcgggcgcctcttccactgtgaccacgggcgcgcgggccaagggggcgcggcggggcctcccgggctgatcggccgaagcccgggccccgcgcggcctctggcgggctgacgccgggaggaggggcgggggctggccagatgactgtatctatgcaaaggcggaggcggtgggcggggagggggctggattcagtagagggcaaggggcactcacatccccggcgcgccactcgcggggctcctttctgcacgtgccccgggcctctcccgctcgctcaacctgtctgcggagggcgcgctctcgcgcaccctgctcccgcgttcgcttctttgttcccgcccacgcgaggcccattttgacggatccagttcgaggcctgacggcggccaatcggcgctggcgccttcaccctccccgccccgccgaacccgtcaagggccgccccttttcctgcccacgtggtctcgggctcctgccccgtcctgctcacgagttcagggctcctgggcggccgccttttccagttccaggtgtgcagaagtgtcctctccccacgcgcggcgggctgcacttggtcgctggctccgagatcgcgcggggccgccggaagcccaagacggtaccgggggccgcagccgcagccggcgccgccctccgccctccccaacagcaggccgagtc

SEQ ID NO: 32306 - DNA, 2300 bp, Homo sapien
gcacctctaagaagtacttgtatctgcaatgaattcttaaacctcagggagccaaataaaaagacaaggcccgaggaattctttcaaaaattaaagtaacatttcatatttgcttattctaacagacaaagaataaagaaggaatccgctaagttgcaagctgaggtgcagacaagtgctggttcacagtgacatcctagaaggaatgctctggataagagcttcaagcttctgtggttttctgaggaaagtgaacggaatctagacgtgtcctatagctcaaaaaatcagcgctatggaccacagcgcctaacagagtaaaataatacactgtgcagtttggccactaacagcaagagtgggaaggggcgaagaggaaccttgattgcccgacaccagggccacctgaaaagtcatcttgacacttcagtctttccattttgagatcggaagctttaaggaccattaaatcgctgccgctgccacaccaggcccgacggagcagaaaggctgcgctcacctgcggaagcgaccgggtgcacacctgccgggtggcgaggcccgcaccgtcacaccccgccccggcttacctgcccttcggtgatttttagcgtcaacttccatcccttcccacccatctggatccaaccaagcgcaagggcgggggagggagaagctagtgtcgcgaggaaaagcatccccgcaacccaccgcaggctttctctccttcctccccattccacacaagaggcagccacaccgcctctcctaaccctcgtctccaatgcaaggcctgaaatacttagaaaaaataataactgtttttaaggaaaagtaacatccccgctcccttccgcccctcaccttcacgaaagcaatcggggttgtggtaccttcgatatctaacaggatcacggtgacttcggcggggaccgaaagcacgaccatttccctaccggatgctacgggactcggcctgctgttggggagggcggagggcggcgccggctgcggctgcggcccccggtaccgtcttgggcttccggcggccccgcgcgatctcggagccagcgaccaagtgcagcccgccgcgcgtggggagaggacacttctgcacacctggaactggaaaaggcggccgcccaggagccctgaactcgtgagcaggacggggcaggagcccgagaccacgtgggcaggaaaaggggcggcccttgacgggttcggcggggcggggagggtgaaggcgccagcgccgattggccgccgtcaggcctcgaactggatccgtcaaaatgggcctcgcgtgggcgggaacaaagaagcgaacgcgggagcagggtgcgcgagagcgcgccctccgcagacaggttgagcgagcgggagaggcccggggcacgtgcagaaaggagccccgcgagtggcgcgccggggatgtgagtgccccttgccctctactgaatccagccccctccccgcccaccgcctccgcctttgcatagatacagtcatctggccagcccccgcccctcctcccggcgtcagcccgccagaggccgcgcggggcccgggcttcggccgatcagcccgggaggccccgccgcgcccccttggcccgcgcgcccgtggtcacagtggaagaggcgcccgcgctgcgctgcccggaggagccgtcgcgcgcccgcttcctgttcggctggttcctgccagctcgaggacaaaacacgcgtgcgcgcggcgggcgagcgcgctcgccgcctcagtcgccagcgccgggcgcagtccgcctttttccggagcagactggccgcggtgctagtcggtagcagcggccgccgcagcggctccgcactggcgaaccgagggcagaaaaaggcggggttgacggctttttggtaggagtgggctggaccggacgccagagacaaaggctcccaaggcaagagggactgtggccctgcgtcggctctgctcgggactgctgaccccaggaatttacgccccttcgtttttctcttctgattcttctcttctcccaagcccgcgtcccctcacgcgtggcctctctccttgccgggagggccgcgatggaggtcccgcccaggctttcccatgtgccgccgccattgttcccctccgctcccgctactttagcctcccgcagcctctcccattggcggccgcggccgccgcggcagctagccccgctcctcccttcgctcgctcccagctccgcccggcagggggcgcgccgggcccagcgccacgtcaccgcccagcagccctcccgattggcgggc

SEQ ID NO: 32307 - DNA, 2300 bp, Homo sapien
tccgcctcaaaacaaaaacaaaaaccgtggagaaaatgctaaactcgatttcttctgaacctatgctaagatgtcaaggtactgtgattcttctaaaagaattttaaaggttgttatgtttggtgtcctaaaagtgtacatggattttatattataacctacatcaagaaactcattcaggccaggcgccttggctcatgcctgtaatctcagcactttgggaggccaagaattccagactagcctgggcaatatggcgaaaccccgtctctacaaaaaatacaaaaattagccaggcatggtggctctcccttcagtcccaactactcgagaggctggggcaggaggatgccttaagcccaaggaggtagaggctgcagtgagctgtgattgcaccactccactccactccagcctgggaacagagtgagactctcaaagaaaaaaaaaaaaaagccttattcacagataattttttttaaaaatggaaactaaaatagaatttaaaacccaagctgctcagtttcttggaagatggatttttcctacttggtaatatactttgtatatctcgactattattgtgcatgcaagcacctctaagaagtacttgtatctgcaatgaattcttaaacctcagggagccaaataaaaagacaaggcccgaggaattctttcaaaaattaaagtaacatttcatatttgcttattctaacagacaaagaataaagaaggaatccgctaagttgcaagctgaggtgcagacaagtgctggttcacagtgacatcctagaaggaatgctctggataagagcttcaagcttctgtggttttctgaggaaagtgaacggaatctagacgtgtcctatagctcaaaaaatcagcgctatggaccacagcgcctaacagagtaaaataatacactgtgcagtttggccactaacagcaagagtgggaaggggcgaagaggaaccttgattgcccgacaccagggccacctgaaaagtcatcttgacacttcagtctttccattttgagatcggaagctttaaggaccattaaatcgctgccgctgccacaccaggcccgacggagcagaaaggctgcgctcacctgcggaagcgaccgggtgcacacctgccgggtggcgaggcccgcaccgtcacaccccgccccggcttacctgcccttcggtgatttttagcgtcaacttccatcccttcccacccatctggatccaaccaagcgcaagggcgggggagggagaagctagtgtcgcgaggaaaagcatccccgcaacccaccgcaggctttctctccttcctccccattccacacaagaggcagccacaccgcctctcctaaccctcgtctccaatgcaaggcctgaaatacttagaaaaaataataactgtttttaaggaaaagtaacatccccgctcccttccgcccctcaccttcacgaaagcaatcggggttgtggtaccttcgatatctaacaggatcacggtgacttcggcggggaccgaaagcacgaccatttccctaccggatgctacgggactcggcctgctgttggggagggcggagggcggcgccggctgcggctgcggcccccggtaccgtcttgggcttccggcggccccgcgcgatctcggagccagcgaccaagtgcagcccgccgcgcgtggggagaggacacttctgcacacctggaactggaaaaggcggccgcccaggagccctgaactcgtgagcaggacggggcaggagcccgagaccacgtgggcaggaaaaggggcggcccttgacgggttcggcggggcggggagggtgaaggcgccagcgccgattggccgccgtcaggcctcgaactggatccgtcaaaatgggcctcgcgtgggcgggaacaaagaagcgaacgcgggagcagggtgcgcgagagcgcgccctccgcagacaggttgagcgagcgggagaggcccggggcacgtgcagaaaggagccccgcgagtggcgcgccggggatgtgagtgccccttgccctctactgaatccagccccctccccgcccaccgcctccgcctttgcatagatacagtcatctggccagcccccgcccctcctcccggcgtcagcccgccagaggccgcgcggggcccgggcttcggccgatcagcccgggaggccccgccgcgcccccttggcccgcgcgcccgtggtcacagtggaagaggcgcccgcgctgcgctgcccggaggagccgtcgcgcgcccgcttcctgttcggctggttcctgc

SEQ ID NO: 32308 - DNA, 2300 bp, Homo sapien
gcctggtcaacatggtgaaaccccgtttctactaaaatacaaaaattagctgggcatgggggcatatgcctgtaatcccagctacttgggaggctgagacatgagaatcgcttgaactcaggagtctgaggttgcagtgagtggagatcgcactactgcactccagcctgggtgacagagtgagactctgtctcaaacaaacaaacaacaacaacaacaacaaaaaacaattatttaggccaggcaccatggtggctcacgcctgtaatcccagcactttgggaggctgaggcagaagaatcgcttgaacccaggaaacagagattgcagtgaactgagtgccactgcactccagcctgggcgacagagcactccgtctcaaaaaaaaaaaccaaaaaaaaaaacaagaattagtcacattacatagacgggccagttttgcaagcgtgaagaacagagcttaaagggttttagttgtctgtgccaattaaatattgacttgcctagaattggctgtcctccatcagtaaatatatattggccaggattgatggctcacgcctgtaatctcagcactttgggaggccgaggcgggaggattacttgagctcagaagttcatgaccagtctgggcaacatagggagacaccatctctataaaaataaaaaaaataaaaaattagcgctctcctcctgctgccaaaggtgctgaaaggaaagaaggccaaagtaaagaaggtggctccggcccctgctgtcatgaagaagcaggaggccaagaaagtggtgaatccctggtttgagaaaaggcctaagaattttggcattggacaggacatccagcccaaaagtgacctcactcgctttgtgaaattgccccgctatatcaggttgcagtggcagacagccatcctctataagcggctgcaattaacctctgtaagtgctttctgcaattaaccagttcacccaggccctggatgccaagcagctactcagctgcttaagctagcccacaggtacagaccagagacaaagcaagagaagaagcagaagctgttggcccaggctgagaagaaagctgcctgcaaagaggacgtccccactaagagaccacctgcccttcgagtaggagttaacactgtcaccaccttggtggaaaacaaaaaggctcagctggtggtgattgcacacgatgtggatcccatcgagctagctgtcttcctgcctgccctgtgtcgtaaaatgggggtctcttgctgcattatcaagaggaaggcaagactgggacgtctagtccacaggaagacctgcaccactgttgtcttcacacaggttaacttggaagacaaaggagctttggctaagcgggtggaagctatcaggaccaattacaaaaacagatccgatgagatccgccatcactggggaggcaatgtcctgggtcccaagtctgtggctcacattgctaagctcaaaaaggcaaaggctaaagaacttgccaccaagctgggttaaatatacactgttgagttttctgtacttaaaaaacaattaaagtaatacaaattttccttcaaaacaaacaaattagccaggcatggtggcatgtacctgtggtcccagctactccagaggctgaggtgggaggatcgctttgagccagggagccgtgatcacgccactgtattttagcctgggagacagagtaaagaccctgtctcaaaacaaacaaacaaaccaaaacaaaaacaaacaaacaaaaaaaaccatgtccaaattcctggtctaattttcttatcctggaaaagtttggggtgtatgcttgtagaaacatttctttttctgtaactctccttctgttttcttttactttttctacacaaatgtttttaagggttgggggtattatttatttccttcatcccctcagagttcaaaccatttgagaatagaacgaagagctaatctttctgcaatctatcatcccattattgggatatttcttttcctatcttttcccctcatatattcattccttcaacttgcctgtcttctttgctgaatgggccttcatgtgtcattatccattcatccctaagctcacaaatgatgaagaaatccataacgtcggaacttccttgacctttggatttggcacattgacctgctggatccaggctgcgctgacactcaaggtcaacatcaagaatgaaggacggagagttggaattccacgggttattctgtcggcatctatcactctctgtgtggtcctctgtatcctttgaacgtgaaaa

SEQ ID NO: 32309 - DNA, 2300 bp, Homo sapien
atttgcttcaaagtaaggtcagtcaccatcacatgccatagtgatttgtctgccaaagttctatgcagcatactagaacttggctgagcgtgcacgaagctcaactaattaaaaccttctcaacaaacttgtcttggttagtttgtttgatacaatatcctttgttgtaacattcagtctggttgtttttccatttgctttaaatttagcattgccacataaaaaagagacagagaaaataggacagcttgaagaggtgtaaaaatataattactcttttgaaagtatgcatatttatctattttttgctaacccccgtctcacttgtctttccacttggctaaatagacgaatgttcctggctcatggatatacagcacttatgggttacttctaattgagaacatcccttactgcaatttctatgccactgattttagtacattttaaaaatttcttttgcatcaaaaaggaaatcaaatgaaagcatatcaggcttgaaagaccactggtggtactgtagaacttccacaagccaatctgcaaaaacacttcaaatctctgaaattttgttcaacaggaaggaaggaagggagggaggaagggagggacggaaggagggagggagggaaggaaggaagggagggagggagggggggagggaaggaaggaaggaagaaaggagggagattcatcaagaagtattttcccaaactacacctagttgtgacaatatttggctcaattttataaatctattacagctgcatctacaaaacaatatgctaataattcacaactcatatgtaagagccatgcagaccatgactgtcttcttcaccagtgttttccctgcccacatgacaaggcctgagaggtgggatgtgctcactaaaaatttactgaatgaatgaatgagtgaatgaatgggtagatgcactgtactacaatgcagaaagaaaactctgccagttctggtggctcacacctgtaatcccagcacttcgggaggccaagttgggagggtctcctgaagtcaagagttcgagaccagcctgggcaacatagcaagaccccatctctaaaaaacaaaaaagaaaagaaagaaaattcaatttagtatttctgtgtctcatcttctgtttgccctgttaaatatgaaactgcaggcaggcaaggccctcatttgtcctgtgcacagttgtatcctaagcgcccagcagcaagagcttaccatgtagcaagacctccaaaatttttgctgaactgttggcgtttatgaatatggataggcccttctcttggaaaattgttgacccaagcctggcacggtggctcacgcctgtaatcccagcactttgggaggccaaggagggcagatcacctgaagttgggagttcgagaccagcctcaccaacctggagaaaccccatctctactaaaaatacaaaattagccaggcgtggcggctcgtatctgtaatcccagctactcaggatgctgaggcaggagaatcgcttgaacctgggaggcagaggttgcggtgagtcgagattgtgccattgcactccagcctgggcaacaagagtgaaactccatctcaaaaaaaaaaaaagaaaagaaaagaaaagaaaattgttgacccagaaatctgaacttacaaaagtaaataaattagaagacaattctgaattttacaaagtatttattacgggtttcctttcataagcaggccttgaaaacatgccttaactttaaagtcttcatgtaacttttatgaagaacatgtgccataggatgcaagatacagctgactgccaggactgtgcaatcacagagccatttccagacggtcagagttagaaggctgcgcctccctgccactaggtcaaccactaggccacaagcaaaagactcggctaaggagtgaaacaggcaatggcaatgttatgggctggattttgtcccctcaaattcttatgctgaagtcctaaccctctagtacctcagaatgtgactagagataaggtcttcaaagaggtaattaagttaaaaagagttcattaggatgggcgctaatccaatctgacaggtgacctcacaagaaaaggagattagggtacagatacacacacagggaagaatgcatgaagtccctgggataaggcagccatttacaagccaagggaaaggcctcagaagaaaccagtcttgccgacagcatgatctctcatcctcagaactgggaggaaatacatctgtgttgtttcagccactcagttggtgatctctattacagc

SEQ ID NO: 32310 - DNA, 2300 bp, Homo sapien
tcagagaatgtttgttagaattaaatgagtcaatacatataaaggtctcagaactgccctggcatatggtaagcacatagtgtgccttagctgttagtatttgatcctcacaacaaccctgtagtactacaatttctacctgtgttgggtacttctcaagacactcatattctcagcccagcttttcaccccagctgtttgttcagccacctgctggcacggatgtaacagcgccttgctgagctgtgtggcttctcttacttcctgcttgagatgcctgcagagcccacttggctgttctgacccaagcagacctggaagtgtgggggagctaatatcccatgtggcaccccttgatgccaaggaggtattggagccaatggaaaaaccatcccttcttttattccctgagaagataatccagaggtatattgtgacccatcaaaatccaagttcagttgccccagcagtagccactccattaatgcatgcagtcatggccttcccccattccccatttccttgagcccatttgcccatccatgcctgtcaatggagctcacgtcccagagtaaactgcccagacaccggccgttgcctcgtggtctgcttttttttgggggggcagggcagggggcggggcatctaattgtgcataggagaagggtaaaagaataaaaagaggcatgtcctaaacaccatggaatactatgcagccataaaagggaacaagatcatgtcctttgcagggacatggatggagctggaagccattatcctcagcaaattaacacaggaacagaaaaccaaacaccgcatgttctcacttataagtgggagctgaacaatgagaacacacggacacaggaaggggaacaacacacactggggcctgtcagtggggcagggaggggaaagcatcaggataaataggcgatgggttgacaggtgcagcaaaccatcgtggcacacgtttccctatgtgacaagcctgcacgtcctgcacatgaatcctgggacttaaaaatttttaaaaagaaccatacagtagaagaaagaaaaaaaaagaggcatgttcaacatatataatcagatttggactcaagtcagagtcttccacctaccaaatttcatgccctcacactgtgcctgcactcccagttgatacatatgcatcttaacagaggccttccagaagcttgattaggctgcgggaggccaaggaggaacacactatgaacaggtagcttcagttactttgatgttcctgcccttctcctgcccctgcatagaggcaatcctgcatggcaagagggcggtgagcagtggctccacttggctgaagcctgggtcaggggcttcacctaacttgtctttgtattgccagcacttagctcatgcatcagtaacactcagggtctggcacatagcaggtactcagtaaatgtttgctgggtacataggtccagaactcaaactatgggtgatttgcttcttaatgattactttctatgtggccatgcctgtttctatacttattatttttttgctggtttggaacgtaatctctgatggacagagaacttgtttttgggtggaagattgtctacctttttaccaaggtgagttagtacagaattgtgtacctaaaattatttaagaagcattaactatttctcaaaattatttgagaaaacctgaatatcaggttgattgatgaaagaaatctctaggtgctatcttgaactggtggcctgtgggataaatgtagctctaagatatatgggttggccagcacagtgttgattatactgaagttattctgaggtatgccacagggcctaccacttcctatagcattctacctgtcccaactctcaaatttatgttacctgcctagcccttgcaggtatatgggtcttgtgacccctacacaacaggcttccacatatagaaagcgttgaaggagctgactggcacagttctctccctgggcttttttctgacttttcctgtgacttgctcagcccatcctctctcccatcagcgggtcctcatggtgatatggtgtcttgccctgtaggtactataagatctccgtggtgctcatgtgctttgtggtccccacgctggtgccctggtacatctggggagagagtctgtggaattcctacttcttggcctctattctccgctataccatctcactcaacatcagctggctggtcaacagcgccgcccacatgtatggaaaccggccctatgacaagcacatcagccctcggcagaacccactcgtc

SEQ ID NO: 32311 - DNA, 2300 bp, Homo sapien
aggcctctgcacaccagcctgggcaacagagcgagactccgtctcaaaaacaaaaacaaacaaacaaacaaaagatggattcaagatagaacagctgacctaataaggttctcaggggggacaataaggaactatttttgcttcccttagactccttgtatgtaagtttgatacctaattaaatttttttttccgataatggactgtaactttctgcccttccaaggtcatagtcaagaggttacatttgtttgctccatctttgcttctagatgggagctcctttaggggcgggaccagactttattcatccttggatcccctgtgcccactggtcctggcacatagcagatgcccaataaatgccaaataaatgactgaatgtttagaatgagggtctttacagcattgagcctttccaataacccggagagaggcttttggccgagcaactagtctaccccagagagaaaggacagtctgaactagagagccacagggagtaggaaggtctgctgggtatggggagcagagggagcatgagaagaaaacgtggttcattacatagcccaggttgaacagacagatgaaaatcgcaccctccagcttcatgttccactgtctgactggtcattatatagggccgacatttatctggtctccaggcaaattctataatttcagctccgtctgaagcaacacagtaacactgactcagtggcctagattccacaagtgccacataccttgctttagcttaaatcaggcattgttttgtctggctgctaggactggctcaggtctgctaacaataagatgcttatgcatggccctttcatgcagtcagtcttttaaatttttttgcctctcttgaaatcctggaaatgattcctaacaacggttaatctaaaaatcagctggttttggtcaatataatggcgccccttcgaactcacattcatggaatatggaagctggaaggaagagtagaaactagttctgcttctcaggtaaggaaatccgtgcccagagagttgggctgggttccagccagttaaaactagaactcagagatgctgtcccgagcccttttacttctgctgcctgcccgcaattgcggtcacacctgcttcagacacttccagctcaatcctccctccattttctgtgcaactagggtcctctctggagagctcttaagccatcagctctaggagagaagtgggcagacacaaatctttcacaggttaattttccttggaacattctgggtgatttttttgtaaagcccgattctcaatggtgttgatttcagggtagtgttcctcactgagagctaaggaggcgttgcagaagtgcgctgattagctagaattgaccataaacagagtggcgcggcggatgggcaaagggtgggcagcgaactggcccaaatcatctgtgcatcacctcacaagcaccaactgagcacttactgtgtgcctgggtaatccacagctgcctaattaagaacgagcagctgccttccaaccctcccctggcccgaggagccctactaactggcagattgagggacttctgattctcatcgtgggtctggccttaactagggtcgcgactccaagcaagtatttaaaattctccaacccaggtggcctgaggcttgagaagaaataaaaggcttctcaaagggatgacagtttcgggaagtttttttttgggggggggactggaaaaataccataaaaggcattttgggggtcacacacacacaagagcagaagcgctgtgagccgccctgcaggctccctgccccgggagccaccttccacccgcccccgggcggaggcggccaactcccgcccagcgggctccccagttcggccccgaaaagccgaaaggggggcgcctttgtctataagcgccgcacgggcgctcctgattggctgtagctaagcagggctttcttccgcgctccttcggagcgctccctccagcgtcgccggccccgttccattttcacagctcctcctccccggccgcgcgcccctcccgccccgcgcgcgcctcctctttctcgcggccgagttcagcccgggcagccatatgggggatacgccagcaacagacgccggccgccaagatctgcatccctaggccacgctaagaccctggggaagagcgcaggagcccgggagaagggctggaaggaggggactggacgtgcggagaattcccccctaaaaggcagaagcccccgcccccaccctcgagctccgctcgggcagagcgcctgcctg

SEQ ID NO: 32312 - DNA, 2300 bp, Homo sapien
cattttgggatcctgctttcagttttttgggacatatacccagaagtgggattgctggatcataggatggttctatttttaagtttttgaagaacctccataccattttatagccgttttaccattttacattctcactagtggtgcacaagggttctagtttctccacatcctctctagcactttttgtttgtttcttccttttacattgctgataccttgcctaattctttcatgccaaacttctaatagcttgatttcatatttgttgcttgtcttttccccctctaatctctactacatattccaagattaatcttcctaaaatggacctttgaatatgttttatgtcactcgtaagtctgttctttggatctgcttaatcttctcatcgtcctatctggtcttctctatctgggtggatcacttgaggttaggagttcaagaccagcctggccaacatggtgaaaccctgtctactaaacatacaaaagttagccaggcatggtggccggcacctgtaatcccagctactcaggaggctgaggcaggagaatcacgtgaacccaggaggcagaggttgtagtgagccaagatcccacctttgcactccagcctgggtgactaagagcgaaactctgtctcaaaaaaaaaaaaaccaaaaaaccaaaaaagtacatttcatctagaacagaaattgaagtggtgtcagactgtggcgcatgagaggttgtatcaactaatttcatccagattatctgtttaggccactttataagcactttttttggccatatccttgggttaacactgagtttgttcattctctcttttatagtttggaggcaaactggttacgtttgagaatgtcagaatgccttctcatcagggagctgagcagcagcagcagcagcaccatgtgttcattagtcaggttgtaacagaaaaggagttcctcagccgatcagaccaacttcagcaggctgtgcagtcacaaggatttatcaattattgccaaaaaaaaattgatgcttctcagactgaatttgagaaaaatgtgtggtcctttttgaaggtaaagttgctgtttaaagctatattatttcattatctgcaaatttaactgttcctttatattctaaatctgtcctcctattaaagaaacaattgaaaaagtgtgatttcagcaattcatcatgaaattaagaagccttataaagagcatacaacctaacttatgtccagagtttttccttctctgctttgaaaagtgtaatatgaaatacatttttaataagtaaaaaaaaataataataggtctgtttagaggagagcgacatagtcagcacacctattttgaagatgagtacatagagtttactataatgaaaacagaatatttaacatctatagtagatctagttaaggaaaatgaaaaaagaggaagaggaatagaggagagaggttggaggcatttttccttttactttaagaggagttagattagaataacaaatagaatttcctggttggtcattttgcctccactggaatgtctgtttctttatacggtactggtttttcaaaggtaaagcagtcttgaatacagttaggttaaagtataaaattaaagaatttatattttgtaataattttgggaaagaattttaggacatagaatattccacatagtttgagttttgtatcagtttaacctttggacataagtttgtatttacagaaattactgttcaaaagtaagctttattcaaccaggataattaattactagtatatttactattaataaataacttatttaaaaaaataattctgggcacatgttctcaggacctcctgaggctgggtctccaaataaaaaacaaaaaaacccactattctttggattccttcaaacagtgaatctttagaatgtagacttcagatatttttaataattctctttggaatttgattcattcttataaaaattcggcctttaaatgtaggtctttgttttaagaatatgtctttttttttaaaggtaaactttgaggatgattctcgtggaaaataccttgaacttctaggatacagaaaagaagatctaggaaagaaggtaaacttttgggaaagttagatggcatgctctttatgaatcatacttttaaaaaataaagttctacacagattatctcaaatcacccaataaacatttaataataatttgtgtttggttgccagcgttttttccctttttctttttcttattctccatcattacccacagtggttgccag

SEQ ID NO: 32313 - DNA, 2300 bp, Homo sapien
tgggattacaggcatgagcttctgtgcccggccattgcagcaactttttaattcatctttaacttttcttagaatgtaaaaatttttcctgctggaagcttcatcactgtgaacttgtaatatttgacttcttggcctcatctcttcctctgattaggtactgctaaaatgagctaatatattttcggcacttacccatagagcacattaaattctgaaccttttaggtatctttatttttttatgtcattagatgccataaaataatttagatataatttggagctttttttgtttgtttgtttatgagtacattggatagtttgacattttctaaaataagtttgccaaaagtcaggcatacatatgtagtttaaaaacaacaataacaacaaaaaactatttgggagaacacttcttcagagtattgttttcaagtgaatcaggagttttaaaacagaagtttcaatggaataaaccataccagaagcattttagtcattttgtggaatatttaatagaatttgaacttgcagatagttcctaataatgttaatttattccatatgaaaatttaaatggtagtttttgcttcagatattttgccttgatttttctgataaaatagaggaaaagtatggggtttttttgtgtcttgtgtgtgtgttaatttttttaagggtttttttttttttgagagggactctcactctgtcacccagtctggagtgtaggggcgcaatcatggcactgcaacctccgcctcctgggttcaggcaattctcctgcctcagcctcctaagtagctgggattacaggcgtccgccaccatacctggcgaatttttgtatttttagtagagatgggttttaccatgttggccagactggtctcaaactcctgacctcatgatccacccgccttggcctcccaaagtgctgggattacaggagtgagccaccacgcccagcctgtatgtgttaatcttttatctgttttttgtttttcgtttttctgaaagtattttaaatgtgcataaaatgttttctctactggccgggcgcagtagctcaatcctaacactttgggaggccgaggtgggcgaattgcctgagctcagtagttcaagaccatcctgggcaacatggtgaaaccccttctctactaaaatacaaaaaattagccaggcatggtggtgtgtgcctgtactcccagctattgggaagctgaagcgggagaatcgcttgaacctgggaggcggaggtggcagtgagctgagatcgtgccacactgcactccagcctgggtgacagagcgagactccatctcaaaaaaataaataaatacaatgaaatgttttctctaaacttatatagttttgatagtaaaactcatttttggtatacagttattctgactcagaatggttttgtgtgtatcaaatagctgcatgaattgagaaaatattcaaatatcttacttttaagactactgtttaagactgttcaataaaatttagtagttttacatttgtttttgttttgttgtttaaaataaactaaggccaggcgcggtggctcatgcctgtaataccagcactttaggaggccgaggtgggtggatcatttgaggtcaggagttcaagaccagcctggccaacatggtaaaacctcatatctactaaaaatacaaaagtttgctggcatggtggcttgcgcctgtaatcccagctactcaggaggctgaggcaggaggatcacttgaacctgggggaggtggaggttgcagtgagctgagatggcgctactgcactccagcctggctgacaataaatagatcataaataaaataagccacagctgatgtttttcactatttgtttcaataaaggtatatttctcgttgtagtttggcttttcataaagtaatttgattcataaaatgtgaaccttaactatcttcagatgcattgttctgggttggcatggcatcctgatgttgctactcagatggtccttgcctccgaggatgaccggttaccagtgatccagatgtgggatcttcgatttgcttcctctccacttcgtgtcctggaaaaccatgccaggtatcgtgctgctgttacaaagaacttgatttgtttattttctgaacatgtcggtgatgttttcgtgaccagaaatacaccataggacacaggaacttttttttttagatggagttttgctctgtcacttaggctggagtgcagtggcaagatcttggctcactgcaacctctgcctcccaggttcaaacgat

SEQ ID NO: 32314 - DNA, 2300 bp, Homo sapien
cctataatccttgcactttgggtggctaaagcagaaggatccctggaggccaggagttccagaccagtatgggcaacaaaatgagtccctgtgtctacagaaaataaaataattaaccaggcatggtgttgtgtgcctgtagtcctagctacttgggaggctgaggtgggaggatcacttgcgccctggatgttgaagctgcagcgcgctgtgatcattgccaccacactccagcctgggcaacacagcaaaaacctgtctctaaaaaaacctagaatatctttgtgctatgcaaatcctaatttgaaaaatttgtcattaaattctctccaaacattcttctagtgagcaattcagtttttatttgattcaggattaggcttggatagtagttaactaaattggatttagttttgtgaactaaagagtttttctttttttagatacaggcagtctttgcacagttccaatatgcataaataccagtgaccacagttaaataaaaccagtccaacaatgtggttaataattccattaccacagtactgagaaaacttgcataaattttgctgctagctctttagtccacaaatcattgtgcccccccccccaaaaaaaagatgtgcatcatgatcagtcgccagttacattactttgctttcaaagtttgttgatttgttactgatcatctgtttagttcatgcacagatagcagagcacaaagtgcatagtactgttgcctccttgaccccagagattaaacttgtgaccatttataaaaatggataattaaaagaggtaattggtcaacaaaggacagagcagcaaagaaaagtgataatgctggaagtgaaattggatgtgattagatttgaaagtggtgacagcaaagcaaagataggttgagacccagacctgcatgaagctgtaatacaagcctattgaaaaagtctgataaatgtaaaaaggtaaagttgcttcaacgtctttcagttttaattgcactaggaacagaaagctgcttgcggttgaaatggagcatttacttgtttgaattgaagactaatcaaaaacaaatcccaatcagtttgactagcattcaggccaaagtgataaccttagttactgcgttgaaagaaaatggtaattagaagactgaaagagaatatattactaccagtaaaagttgggttcattatttcagaagttggcgtgaattgatgttaagctgtcttatgaagctgcaagcttcagatggaatgttacagaagatgtagctgactgtgggaatgttaacactgctgctgttcaaggggcaggatccttctgctttagctacccaaagtgcaagagttggctttgaatgctagatgtaatgagaaaagaacttgtctagaagttaggagatctgggttgaatccaatttctggtaatttagcaagtgattttcctttggcttcaccttgctgtaaaataattcctccctaaactaaaagtacacttaggcaacgcatctaattagatttgaggttgtggagaaacagtggcagaaggtgagtgctaccgggtctcaataccatgggatagtaacaagtatgaaacggtactaattggaattaatataacaccccatctatacctctttgtccacaatagcctttgggaatgcccagattgtttcactttgtataagttctcaaaacgccagaatgtgcaatcaagtgggtaattttaagaactcagtcacaaattacaataaagcccttgcagcccgattttccacctggtttggcgcgggcagtgtcgccaggggctgccgacgcctcacaggactagtgctacgtggcgttcctgcgggccacggcggttattcggccagacggggacaccctctgcactagtcctttacccactagtcctggctaccccatccacattctgcgcgccgcccctcagaaaagggtttctacgatcgccggggcgcgatgaccgcagagcgccaccaaccagcggagccgtaccccgcctcccaggctaccgccggtcccggaagtgccgtggcgggctgtgcgtcgggtgggcggggaaagatgtcgctcccggaagtgttgggcgcagggcgtggctgcggctgcggctgccacgttggaacggaacgtggaggtggccctggccggggaggaggggcggcggcgaatgctgggagagtccgacgagcgctgcactaacgcaggatccggctgccgaaggtcctcgccaggtgcgtccgcccgttgctttttgtcctcttcgccggtcct

SEQ ID NO: 32315 - DNA, 2300 bp, Homo sapien
tggcaagtgaatgcctgtatctgcaaacttttgagtccttaagaaaaggcaaacaccacgatgagacagccacttcacatgcacaaaaatgtggagaaactggcagcctcatccactgctggtgggaatgtaaaatggtgcagccactagggaaaataatctggcacttcctcaagaagctaaacacagttatcttatgactcaccaattccactcttaggtgtgtaatcaggaaaatgaaaacatttgtccacacaaaaacttgtacacaaatgttcataatagtaaaaaaaaaaattggaaaacccaaatgtccaccaactgttgaacggataaacaaaatctgctacatccataaaatggagtacgattcagcaataaaaaataaagtactgatacgtgctataagatggatgaactctgaaaacattccaagtgaaagaagccagtcacaaagaccatatattagttcataattccacttacatgaagtgtacagagcaggcagaggcacacggaaactaaattagtgtttgctgagcggggtgggggaatatttggaggtgctgctagtaagaatgaggtttctttctggagtgatgaaaatgttctaatattgattgtgactgttccacaattctgtgcatatactaaaacccactgaattgtacactttaaaccaattagttgtgtggtatgagaattatatctgagtaaaactgttacaaaaatataaggcaactaattttttccttaaagatagctaaaaacaatgttatttttattcagcctcactcgggtcttaattggttgagcaggaaaaggctctaacagcccaaccaacttacagtatttaaatccagttcttactctctgcacacaccttacagccaaaaagtatttgccctgcacatcccccagggaccaatttttccaaagttccttgaccatctatccttaggccatgtgacttttaaggaaccataaccaaaagctattaattccattcagagaagatacaagcatattataatggaaaactggtgtgaataagtaataccttaatatgtatcttcggctgtaatctggacaaagtaaacacaaaggggaaaaagaagcaatcttgttaggcctggatatttggaattatttttgtgtgctatacaaagaaacggaaaagttgcaaacccttctctgttttctgtatgctaaggatctccttctcagagacaaaaacccactggcccgtttccttctctaagcaaattgaaatctcttcctcaaacataagagcttataactaagacattgttctaagctctatctcctgaaagctattcataatgcctcattcccaaccaaaaccacttaattgccccttgtcccctgcccctattactactgaggagccccaagaaccttaccttatttccttcattgtggcaaagtgtttcagaaaagggttccttgaattaaaagtcggcgtatcctatttgactcctgctcctccggtatcacatacctacagccaaccatgccaagagcttccccattatctccgcatcggagagctacaagataaagcgcaagaacacgacacgcatctcagtaaatcatatatttttggcccgactctgtcttcaacacacctaaggcaccgtgttttatccctcttccataccctttcctcccgatatcctccagtttcagagaccgcacccggagacccattggcaggttcctggattcgcctcaattttggtcctgcctctctgcttcgcattttcaggcttggcctcacaagaaggacgatggcgccagattgtgccagaatgggtgaaaacagaaggaaaataaaccggttgcagcaaaacccactattccgcctccaacgcggagggaggagcggtcaaatgcacgtcttcaggctcaggcccttccgattggctgctgggacacaacgtggcctgtcattggctacggcaccggcgcagggccttcggagaggaagtgtggaagtcccgcgcctctaaagcccgcctttcgtgacaaataaaggtcgtagccgcagagtcaacgggcggagctaaagtggtcgtgattcatgctgtcgcgggaaccccgaaggtggggccccacgtaacaagaagatgacccgaagttgctccgcagtgggctgcagcacccgtgacaccgtgctcagccgggagcgcggcctctccttccaccagtgcgtatgggagcagcctcgaagccttcgaactccctgcggggcccggcgggccgtggcgtggcgtggg

SEQ ID NO: 32316 - DNA, 2300 bp, Homo sapien
cttgtacacaaatgttcataatagtaaaaaaaaaaattggaaaacccaaatgtccaccaactgttgaacggataaacaaaatctgctacatccataaaatggagtacgattcagcaataaaaaataaagtactgatacgtgctataagatggatgaactctgaaaacattccaagtgaaagaagccagtcacaaagaccatatattagttcataattccacttacatgaagtgtacagagcaggcagaggcacacggaaactaaattagtgtttgctgagcggggtgggggaatatttggaggtgctgctagtaagaatgaggtttctttctggagtgatgaaaatgttctaatattgattgtgactgttccacaattctgtgcatatactaaaacccactgaattgtacactttaaaccaattagttgtgtggtatgagaattatatctgagtaaaactgttacaaaaatataaggcaactaattttttccttaaagatagctaaaaacaatgttatttttattcagcctcactcgggtcttaattggttgagcaggaaaaggctctaacagcccaaccaacttacagtatttaaatccagttcttactctctgcacacaccttacagccaaaaagtatttgccctgcacatcccccagggaccaatttttccaaagttccttgaccatctatccttaggccatgtgacttttaaggaaccataaccaaaagctattaattccattcagagaagatacaagcatattataatggaaaactggtgtgaataagtaataccttaatatgtatcttcggctgtaatctggacaaagtaaacacaaaggggaaaaagaagcaatcttgttaggcctggatatttggaattatttttgtgtgctatacaaagaaacggaaaagttgcaaacccttctctgttttctgtatgctaaggatctccttctcagagacaaaaacccactggcccgtttccttctctaagcaaattgaaatctcttcctcaaacataagagcttataactaagacattgttctaagctctatctcctgaaagctattcataatgcctcattcccaaccaaaaccacttaattgccccttgtcccctgcccctattactactgaggagccccaagaaccttaccttatttccttcattgtggcaaagtgtttcagaaaagggttccttgaattaaaagtcggcgtatcctatttgactcctgctcctccggtatcacatacctacagccaaccatgccaagagcttccccattatctccgcatcggagagctacaagataaagcgcaagaacacgacacgcatctcagtaaatcatatatttttggcccgactctgtcttcaacacacctaaggcaccgtgttttatccctcttccataccctttcctcccgatatcctccagtttcagagaccgcacccggagacccattggcaggttcctggattcgcctcaattttggtcctgcctctctgcttcgcattttcaggcttggcctcacaagaaggacgatggcgccagattgtgccagaatgggtgaaaacagaaggaaaataaaccggttgcagcaaaacccactattccgcctccaacgcggagggaggagcggtcaaatgcacgtcttcaggctcaggcccttccgattggctgctgggacacaacgtggcctgtcattggctacggcaccggcgcagggccttcggagaggaagtgtggaagtcccgcgcctctaaagcccgcctttcgtgacaaataaaggtcgtagccgcagagtcaacgggcggagctaaagtggtcgtgattcatgctgtcgcgggaaccccgaaggtggggccccacgtaacaagaagatgacccgaagttgctccgcagtgggctgcagcacccgtgacaccgtgctcagccgggagcgcggcctctccttccaccagtgcgtatgggagcagcctcgaagccttcgaactccctgcggggcccggcgggccgtggcgtggcgtggggcggggccgggccgcactgtgggtcgcgccgcgtgtgtgacgcgacgtgacgtgcgcagcgtcggggcgtgggagcggaattggggcactgtgagaattgagattctctctcttcccgcccagtgtttacctctgaatagccggttctcgcaccgcctaccgctttaaggagagttacgcgaaaggagtcctccattaattggatggtcttattatttgaagtgaggaggccgaaagggaaggcagtttaggacaacggtt

SEQ ID NO: 32317 - DNA, 2300 bp, Homo sapien
taactcatggaacatattttgcaagggagcttttccacagattgggtatagtctctaaacgtgcaaggaaccctcaaaagttggctggtccaacaacttctattactagcgtggtcctctgatgcaaagcttcccaacaggtatgcctagtgagtacagctgttgatattcttagtccatggggtgggctgggacacctgagtagttacttgaaggcagccccaaacagtgctgtaggtttgccccaaagtattgaacaattatttcctatgcgtaaaatgctatgaaaaaggctggggctgggcagggtggctcatgcctgtaatcccagccaagaagttggagaccaacctgggcaacacactgagacctcatctctaccaaaaaaaaaaaaaagccgggatggtggtctgtgcctgtagtcccatgaggctgaggtgggaggatcacttgagcctgggagatagaggctgcgctgagctgtgatagtgccactgctctccagcctgggcgacaaagtgagaccccgtctccaaaaaaaaaaaaaaaaaaaagaaggaaaatgttgggaaatattgtaatctaactagcataactagttttgagttctggaaaaaattaatttggtaataataccatttttaaagcatttaccttgtgcgttacatatgctataaagtcttacgttttagttttacaaaattctacaaggcaggtttttattcctcttacagaagaagaaaccaagacccagagccaagtacagacatcagtaaatactcaattaaaattggaattcatgtctccctagtttaaaactacctctatcacaagaaaaatcccaaatcaattatggtctcacatacacaatgagttggttcacactgctaacaatttaggtggaggaatcagccctatttaaaaaatagaaaacaaaaaaaaaaaaaaatcaatgaattttatacatagcctaccatacatactctaaactccttaacctggcatttacatttttaaaatggtttctcaggtacttttccactcctctatatttgcactttctatcctttacattttcccatgccattcctaactaccctcttcctaccccccctttccaaccataaagttctttttgatctttccataaatctgctccttttgtctgtgaggatctattttacccacttttctacttgctagtgtaccctgaatactgaatgacctataccagtctgaaccatggatatgagttcagataagactgatctgaaattcttccccactgtcgagccaaatgaaacttccctgccatgatcaaatccagccagaatcggaccggccttgcacagctcggctaacagcacttaagaacttgcaatgtcaggcagtacaggagaaaactgatctgtactcgtgctcaggaagacgccacacacacacttcaaccgttgtcctaaactgccttccctttcggcctcctcacttcaaataataagaccatccaattaatggaggactcctttcgcgtaactctccttaaagcggtaggcggtgcgagaaccggctattcagaggtaaacactgggcgggaagagagagaatctcaattctcacagtgccccaattccgctcccacgccccgacgctgcgcacgtcacgtcgcgtcacacacgcggcgcgacccacagtgcggcccggccccgccccacgccacgccacggcccgccgggccccgcagggagttcgaaggcttcgaggctgctcccatacgcactggtggaaggagaggccgcgctcccggctgagcacggtgtcacgggtgctgcagcccactgcggagcaacttcgggtcatcttcttgttacgtggggccccaccttcggggttcccgcgacagcatgaatcacgaccactttagctccgcccgttgactctgcggctacgacctttatttgtcacgaaaggcgggctttagaggcgcgggacttccacacttcctctccgaaggccctgcgccggtgccgtagccaatgacaggccacgttgtgtcccagcagccaatcggaagggcctgagcctgaagacgtgcatttgaccgctcctccctccgcgttggaggcggaatagtgggttttgctgcaaccggtttattttccttctgttttcacccattctggcacaatctggcgccatcgtccttcttgtgaggccaagcctgaaaatgcgaagcagagaggcaggaccaaaattgaggcgaatccaggaacctgccaatgggtctccgggtgcggtctctg

SEQ ID NO: 32318 - DNA, 2300 bp, Homo sapien
agtgtaggaagtgaagacaaaatatagtaggatttttaatatgggaattgcccctctatgattgacaaagaaaaatcagatattgaacctttggattaaaaaaaatcaaagaactttgaaaaatgaactaagtaaattaaacttttaattcacttggctttatgtttctataaagcagtaaaataatagatgggtttatataataaatactactgtaatagtactataatgttttcatgttaatggaactttaatgtgattgtcatagatttccaactgataccatacagcgctcaaaatggatcagggctgttaatcgtgtggaccccagaagcaaaaagatttggattccaggaccaggtgctatactgtgttccaaacattttcaagaaagtgactttgagtcatatggcataagaagaaagctgaaaaaaggagctgtgccttctgtttctctatacaaggtatttaaatgtaggtgtaagtcaacaaaatgaaaatttacagagcctttaaaaatcaagatagcccccattatagctagaatttgcagacaaaaaaacccaagtcttaaatccagtaatagattttaaatgctttgaaaatttaaaaaaaaaattatatatattagcatttgttctggagcttttaaaaaactatataaatgcaaatcatttgtctagatatatataaaggttactaaccaattgcaaaaatcaactggtagatataaatagccttagaatacaggcttttgttaagtatgagacagctttcatagtactttgaaattatctatgttttttggttcctcctaataatgttatttatcttgatcaaaaatatacctaattattaacattgatacaggaagtatgtgggaaataatgaaactttctatgagtgagtcaccagtattggtatgatattcttctgtttcctatgactgtttttattttatccttttaccccttaaccacaactctgacacatgggctttcactttctgcacagtctgtgatagtcacctaactgttctattctgacactagccttactttcctcttaatcgtcagtctccttcttccagtattggtttatctcattcccctattcggaagtatttagttggtgtcaaattcaaactcaccaagtcccaagagcttcctattaactgatttgtacatttttaactgtcctgaattatcttttcaaaccatatatacttactatatatgtgataaatttgcttgctttcatacttttgtgtaaaatcaataatggctgccatgtgttgagagctacaatggtccaggcattgtactaggagatttacataaattcttatattgtatcttcaaaagaatcctgtattattatccacattttacagatgaggacacaagggattgtagagcttatgtgacagctaattgagggagctaagattcaaacccaggtcagtcttaattccaaagccatgcactgtccactatgccttcttttttgcacaaataacttctctgtcaccttcattaaccatgttattgtaccttctaagaactgcttaaaactcacttccatgaagccatcccagtttactaccacctttctctagttactttatttcagaaactttcaacatcatattaatatttctgtgtagtgcaaaaaaaaaaagcctgtttatattaccctataaactatacattaaaacattcagagattatgaccttttctttcctaactaactctccacagcaaccagattagtgctttgtatttagggtatttttacagatactcttctatgtgattatttctaaaataactttaattttatatatctgtcatagattcctcaaggtgtacatcttaaaggtaaagcaagacaaaaaatcctaaaacaacctcttccagacaattctcaagaagttgctactgaggaccataactatagtttaaagacacctttgacgataggtgcagagaaactggctgaggtgcaacaaatgttacaagtgtccaaaaaaagacttatctccgtaaagaactacaggatgatcaagaagagaaagggtttacgattaattgatgcacttgtagaagagaaactactttctgaagaaacagagtgtctgctacgagctcaattttcaggtacttccccctagtaacctgtagtatttacaaaaatagctatttttctgaggtaccattaagtatttattttgttcttgcctatgaaaacatgctttcagttgggaagtgaaagtctcagtagcttaagaagaatgaaa

SEQ ID NO: 32319 - DNA, 2300 bp, Homo sapien
gatgcggcggtggaatggggctgggcgcgtgattttgaacaaaccctggtctgtgtctcggaggcgccgccgccgccgctgctgctgggagcccagggagcgccgcgcgaccaggaggcggcggcgccgccggctttggtgagtgtcagcccccgggatgggggctcctgggcgggctggcgggaagggggaaccggcccccgctgcgagtgcctgcgcgggcggagagcgctggaccgctccctccgggagcccgggccggtgggccttggcggggagcgggaacccgccagcggggtccgccgcgccccttccctgaagctgggttgcggggggcgaaggatccttggggctcggtctcttcccgtcggctcccgagagggtggctgtcacccggcagggccagcgctcggccagccgcctgcccggcggtctggagtaagggctcctgcggctgttgacacgcacactgcgcgacccaacaagccacccgtggcggccccaggtttctgggaaccggttttgctgctgtgtcattttgtgccagtccctcctctccctactgcccgccgccgcgttcttcctatgcccctttgtacaggctcttgttcgtgcgtgtccgttttcctcgcgaagcccaccagccaaatgtcataatgttcccgaggtgcacgggggaagggagcgggccgggacttagcttggccagcaacggtaaacaaccaagcagagtgcggatggacggggccgtcagtggggaaatgaagtttaaagatgaagtaattgagaacactttatactctcagcatctggtagtctgcatataaaaacagcaattggggtgggtggtggacagcccttgttgaaggctgaatctaccgacttttatatggagttgccattgaaacaaggtagggaaatgaaatgactttttcaacttcaacttcaaccttactcttcctacactaacttagacagtagagtggccctgttcgcagccttgaaattcagtttgcccagagcttatgttgtggttgaatgatacagaattcagcttttggatggttaactctttctaaaattgacaaaggcagccagtttcctttttttttttttttaatgctgatctcttcagaagccttgcagcttatgttttgttattttttaaatgattaagaattacctctgttctcttttggttacttattcaactgactgatgacaagagctggtaactcttacctacctagtaggtagctctaggatcttgttctgaagcaagctgtttatttttactgtacagaacaaatatatcagcagcagatggtttttttttaatttgatgacttagatcctaaaaaaacatttggcaaataattttagctaagagttatattttcaatattttagaaatcgatcattcatgaatgtttctacaattagttcaatcatttcaaatctagttgcgctttgacgtcttaaaccgatgacagattggaagtcgcagtgttcatggacagaaatgaccagataaattaagttggagaggaagatagctcagaactttatttttttaaattagatattttgaccacttcatctgcatgaggattgctgcctgtaattgacaaaggtgtcaaaggtcgaacatgcatatggaaatagctcatcctgtcaaagtagttctgcgggtggggtaaaatgtcaaagttggtgaatgacattaaaggtctttcacagtgtttttagtgcctgagatagccacagtgaatgaaacgcattccaccatctctctcaagttgctgctctgaaaatgaaagagtttgggttctttattgtccttatgccaccctccgcatggcttttggtcttgcaaacaaaaatatgccggacttgggaccccgcaggtggcgcgacttcctttggcgtccctgcgggggcccgtgctccgcccgggggtgaaaggtctcggcgtagcccgtgtgcacttgcacggcccttgtgcgtttgaaggttggcggggcggcgggaggcttccccggatatgtgggtgtgcgcctcccgggtggggcgggcggggaggggaggaggaggaagggggaggttactggtggtggcggcggcggcggcggcccgggctccggctgtcggggaagctgctgagctgtgatggtgatgacgaggtgaaaatggcggatctttcgaaatacaatcccggcccctgacataccagaggcggcggcgacggcgacgtcgccaccccggctcccttctcggtccccgggtaccctggagcgctc

SEQ ID NO: 32320 - DNA, 2300 bp, Homo sapien
aggctggagtgcggtggcacgatgtcggctcactgcaagctccgcctcccgggttcacgccattctcctgcctcagcctcccgagtagctgggactacaggcgcccgccaccacgcctggctaatttttttgtatttttagtagagacggggtttcatcgtgttagccaggacggtctcgatctcctgacctcgtgatccacccgcctcggcctcccagagtgctgggattacaggcgtgagccaccatgcccggcctaaatctcttttctttacaaattgcccagtttcaggtagttctttatagcagtgtgagaacagactaatatacattctttttttatttattttatttttgagatttcactctgccacccaggctggagtgcagtggcacgatctcagctcactgcagcctccgcctcctgtgttcaatcgattttcctgcctcagcctcctaagtagctgggactacaggcacccgccaccacgcctggttaattttttgtgtttttagtagagaaagagtttcaccatgttgagcaggctggtctcgaactcctgacctcaggtgatccacctgccttggcctcctaaagtggtggtattacaggcatgagccaccacgcctggctgagaacagactaatacacattcttaaaagggattccttcttcaggtattcttctctttctctttcccaatagagggaatatgccatttatcacacatcaagatggcaaaaatccaaaagtttgacatcctttgtagtcaaggctgtaggaagctgcacccctatatatttctggtaggaaggcaaaatgataccattcctataaaatgcaatttggcaatatctaccaaaattgtatgtctatcctttgcctcatttctggtaatgtgttctacctgtacatatataatgtatgcaaaggttattcatcgcattgattaaaaataacatgtcctataaggattaaataaactaaggcatactctcactgtgtaatatcctctagctccaaaaagagtgattttgaaagactggacagctggtaagatgtccagctgtcttagtctgttttctgttgcttataccagaatacctgaaactgggtaatttataaagaaaaggaatttatatcttagagttatgaaggccaagaagtctaaggtcaaggggccacatctaatgagacccttcttgctggtggggacttgctagagttcagaagcagcacagggtatcacatggcaagggagtgaccttcctaacatgctagctcaggtctcttcctcttctaataaagccacatgttctctcccatgacaacccattaatccatgaatagatcaagggttttgccctcatgatccaatcacctatttaaggcccacctctaaatactgccacattaaagatgaagtttcaacatgagttgtttgtttttttttttttttttgagacggaatttccctcttgttgcccaggctggagtgcagtggtgcaatcttggctcaccgtaaccttcgccttccagcttcaagtgattctcgtgcctcagcctcccgagtagctgagattacaggcacgtgccaccacacccagctaatttttgtatttttagttgagacggggtttctccatgttggtcaggctggtctcgaactcccgacctcaggtgatccgtccacctcggcctcccaaagtgctgggattacagacgtgagccacggcgccagccctcaacatgagttttggagaagacaattatttcaaaccacagtaccaggaaaagtgcaaaaaaaaaaaaccaaggcagaacaattatgtggtgttgcttgtgagaggtaaaattttattttattaatatttgcttgtatttgcagaaattctataagaatacatgagtattgaatgttatacaaacgcaggcgaccatataatcttccattgaaatggaacggtttctagaatgaaagggaggatgttattattattattattattttttgagaccgagtctcgctgtgtctcccaggctggagtgcagtggcgcgatctcggctcactgcaaactccgcctcccgggttcacgccattctcctgcctcagcctcccgagttgctgggactacaggggtgcaccacctacgcccggctaatttttttgtatttttagtagagaacggggtttcaccgtgttagccaggatggcctcgatctcttgacctcgtgatccgcccgcctcggctgcccaaagtgctgggattacaggcgtgagccaccgcgcccggccga

SEQ ID NO: 32321 - DNA, 2300 bp, Homo sapien
cagactaatacacattcttaaaagggattccttcttcaggtattcttctctttctctttcccaatagagggaatatgccatttatcacacatcaagatggcaaaaatccaaaagtttgacatcctttgtagtcaaggctgtaggaagctgcacccctatatatttctggtaggaaggcaaaatgataccattcctataaaatgcaatttggcaatatctaccaaaattgtatgtctatcctttgcctcatttctggtaatgtgttctacctgtacatatataatgtatgcaaaggttattcatcgcattgattaaaaataacatgtcctataaggattaaataaactaaggcatactctcactgtgtaatatcctctagctccaaaaagagtgattttgaaagactggacagctggtaagatgtccagctgtcttagtctgttttctgttgcttataccagaatacctgaaactgggtaatttataaagaaaaggaatttatatcttagagttatgaaggccaagaagtctaaggtcaaggggccacatctaatgagacccttcttgctggtggggacttgctagagttcagaagcagcacagggtatcacatggcaagggagtgaccttcctaacatgctagctcaggtctcttcctcttctaataaagccacatgttctctcccatgacaacccattaatccatgaatagatcaagggttttgccctcatgatccaatcacctatttaaggcccacctctaaatactgccacattaaagatgaagtttcaacatgagttgtttgtttttttttttttttttgagacggaatttccctcttgttgcccaggctggagtgcagtggtgcaatcttggctcaccgtaaccttcgccttccagcttcaagtgattctcgtgcctcagcctcccgagtagctgagattacaggcacgtgccaccacacccagctaatttttgtatttttagttgagacggggtttctccatgttggtcaggctggtctcgaactcccgacctcaggtgatccgtccacctcggcctcccaaagtgctgggattacagacgtgagccacggcgccagccctcaacatgagttttggagaagacaattatttcaaaccacagtaccaggaaaagtgcaaaaaaaaaaaaccaaggcagaacaattatgtggtgttgcttgtgagaggtaaaattttattttattaatatttgcttgtatttgcagaaattctataagaatacatgagtattgaatgttatacaaacgcaggcgaccatataatcttccattgaaatggaacggtttctagaatgaaagggaggatgttattattattattattattttttgagaccgagtctcgctgtgtctcccaggctggagtgcagtggcgcgatctcggctcactgcaaactccgcctcccgggttcacgccattctcctgcctcagcctcccgagttgctgggactacaggggtgcaccacctacgcccggctaatttttttgtatttttagtagagaacggggtttcaccgtgttagccaggatggcctcgatctcttgacctcgtgatccgcccgcctcggctgcccaaagtgctgggattacaggcgtgagccaccgcgcccggccgaaaggggggatattaatcattactccaggacgacagagggaaaatcgctttgtactggacaaactggaatgtctgaccaaccattataaagtgcacggagtgggaggaggaatagggacattttaattgtatttctaaaaagtatcttctgtggtgaatcggaaacaaaactcattctttaccacaggcagtttaagcgctgcctgaaagatcgaaggacggtaaaccacagacgtgagaaacggaactttgcgaaaacgcagtcgttttatgtaccggctactcattggagttacaccagagactcactactggagttcatcagccaatccaaagtccaagcgtgagagccagagcctgtaggagagacctgggcaggcctcagacctgaggagtggagctccgcatcactcaaccctgggggcggagctagcccaggctcccacacccgacgctctggcccacacagacgctactctgtagcatctcaggttccctctggctgcactctggaggaccacactcgttttctttttggctgccagaggcccccgcatccaccgctgagctgggagaaagatggcggcagccgtgcgacaggatttggcccagctcatgaattcgagcggctctcataaag

SEQ ID NO: 32322 - DNA, 2300 bp, Homo sapien
tgggattacaggcgtaagccaccacacccagccgatacagctgcttactatagaatatagagatggccactgagtggatttcaaaggcactcagaaaatgttcaggactcaaactgctatgaagtctaacattagccaatttgaatacaaaaacacatatgccatacactaagtaaatacagtcaggtaaaggaaaaacaattacataattgcagggtggtttttattctgaaatcttcagattgctgttattatattaaaaaacagaatataggcttcttgaaaaaataagggtgttaaatgaacatgtttttcctctgaaagagttgtaggatcatctttatttattgaataccagtttcatgccaagcattggctaagggccaagagggaaaaaaatacaaacagctatagtatcatttgtatgacttgccccctcctttttttttatttttttattttttttttggagataagagtctcgctctgtcaccgaggatccacctgccttggcctcccaaagtgctaggattacaggcgttagccaccgtgcctggcctggtatgaccccttaaaattttttttctagtcactggatttgctttttgtttctgaaaaggatatttcttgttttgcttataaaagaaataaatgctaattataaaaaaaattatcggccatgggtggtggcttacacctgtaattccagtgttttgggaggccaaggcaggaagatcacttgaggccaggagctcaaggtcagcctgggcaacatagtgagacccccatctctacagaaaacgaaaacaaattagccaggcatggtggtgtgcacctgtaatctcggctactcaggaggctgaggtggggggatcacttgagctcaggagttccaggctgcagtgaattatgatcgtgccattcattgcactcctgcctggacaacaaagagaccttatcacaaaacaacaacaacaaaaagtctatcagccaatcacctagggatagccacttgacattacggataattagcctttcatattttttctggtatttgataaccaagatgaaatgcagaagaaatttgaatacatattctctagcatttcctgtaatgcttcttcctccaggatttcaaatgtgggaagccatcacccaaaaatatggtttcgaccatgttagtactggagttgggatttagggaagatctggtccccacctgtggaggtctgcagagtcaggtgaaacattagccttgtttgcgtttccagggctgggctctcgccactgtttgctatgcaccatctggagcctgcatcacgcatggcctcagccagcccggaagcggagagcgtggtggcgggggcgctagtgagctcctcctgtgtaccaggtcccgagctaaggttttgagacacctcagtgaacttggcccacaaaatcccctgcctttgtggagcttaccctcagtgttggggatttgggacttacttttcccaaagccaagctaattattgtaaaaggggtgagtgacgaaaacggaatcattgcaaggtccttacctcttatttcatgagattggcggcatgagtgtgtctagagagctgtggttgcttactcttacacgtgggcgtgtaccccaagactagaatccagggtccatctaataagcattcaaatcagcgggcgggggagggggtgggtgatagtttcttgtcttactttccaatcccagcgttgctcagcccataccatctgataaaaactttttacaatttagaaatgcccggtgagcctgggcgcccggagcgacagagcggcgggtgcccgggaggaagcggcgccagccctgcccagctttgcggctcctggcgcctgccgctggggctgggctccgagaccgcgcgcccgctgcccggttcacgccgagtccccagcggcgcgccgccccggcgaatggtcccccgagggcagccatccgcagacgcagttccctgattgccccagcaaaaatgggcggtctccttgggatagattctgcgcgggctgctcttaagaatttaccggcaggcaggtctggtcccagcagaggagacccaggggtcccagagctgggctggcgggaggcgtaatccggcggggtgagggttgatcgaagagccccgcgcgcagctgccgctcacagccccttcccgagtgcagagcgggcagagaaggtaagaagcccacccacccactccccgcctcctgaagcccgtgcttcagacctgtccctgcaactggggaagagccaggcgggc

SEQ ID NO: 32323 - DNA, 2300 bp, Homo sapien
ctaaagtgctggaattacaggcatgagtgaccgtgcccggccaagcttaccgatttttaagatgtactttccccctttaatacaataaataactagtacatatttgttgacatctttttgatttttcaattttttaattttttattttatttatttatttgaaaaaaggagatgagatctcactatgttgcacaggctggtctcaaactcctgggctcaagtgatcctcccgccttggcctcccaaagtgctgggattacaggtgtgagttaccacacctggccatgttgccatctttttattgtggagtttatacatagtatttggaagaaaataggctatctggaattccacatgtctctttttctttctccttcttcagatttctttgtttctttgtttcccctaatattgattatgtgttaggcactgttttaaatgttttgcatgtattaattttttgaattttccctacaatcctgtggggtaggtgcaattattacgctcatttgacaaggaacctgaggcatagaaatgttaagtggctagcagatggcagctaggaattgggactgaaaagggactctaagcacttagagtctgccataatgccacacattctcactgtacaacctcacacaatagccttgttctagtgggaaagatttcccatccgcaaaaacttcagagtgaatgacaggaaagctggccactctcatttcttaatttttttttttttttagagacacggtcttgctgtcactccggctggagtgtggtgacacaacacagctcactgtaacctcaaattcttgggctcaggcaatcctcctgcctcagccttccaagtagcggggactacaagcctacgggcacttaccaccatgtctggctaattttttaattttttgtttttgtttttgtttttttttagagacaaggtctcactgtgttggccaggcttgtcttgaactctgaccttaagcagtcctccgcctgggcctcccactgtgccggcccaccctcatttctgaaaggttttgttaaacaaagtttatgagaggccattgttatggactagcctcctgctctaggccccagaaaatcagaccaaaccagaatgaagtcgcttgtgctaagtgacatataatcaaactgaactttgaaatggaccagttttccaaaaaacaggagatttcagtcaacctcagtcagtgtagtaaggaagtcctctctgttttagtcctataaggaaagtaactttgaaacaaccaatctatctttttttctctgtttccgctttcttcatactcaccaggacactcattctattttatagaatgatgtgttgcttgattctagaattgcaaataaaaggcaattacatcttctaaactaaatttgttgtaattttgtcttttgatagtttaaactatgggatcagaaattcaaagactatgaataaaaatttcaaaagaaagaaatagtaataccaccaataagaagaataattaaaaaggtacaaagaaattggatgcaacattgtaaaaagagccatagtttggagctgagctgacatgagctaaaatcctaggtgagtaacttgttagctatgtggcctctgaaagtcagctcaagaatctgagcttgtttcctcacctctaaaattgaaaaaataaggcctaactatcaaagtcattaacaagtcattgataatgcttggcctattttaatgttcagtatctgtaagttgataccattaaaggatgcttgagatgccaactactatataatctgaaacaataatgatcttttttttccccacaaagataacaaaaaacaaacacaaaaaaacaacagtaagctctgccagacatgtaaaaccaatcaaactatataatgaattaaatcctttccccattaaaaagacgtatcagtgtacctaacacaatataggaaaagaaacacaccttatttggcaagagatatattcattctccagataagagaaacacacattgaaaccacttctgctggattactctggccaataagagcgtctgaaactgttctatgtactatgccctgcgatagaaacacagttacctctcccctttcacgtagttttcatttgtggtgagattctctcccaggccacaagacatttcctgctcggaaccttgtttactaattgtaagtactttacaagtaagaacttgttttaaaaacttagcattcaaaaaaaaaaagctttctttaaaagttatttgattttcttgtttttttcttagcatgttata

SEQ ID NO: 32324 - DNA, 2300 bp, Homo sapien
gtttaaaacaaaatgagttcctgcccaatccaaaatgaggaattggcgttgtgtacatgtaccctaaaacttaaagtataataataataaaattttaaaaaaaaagaaagtcacttcaaaaaaaacaaaaaacaaaatgaggaatcggagccttacaggcccttttagagaaagcctagtcccttccttttctgaagagtttgcagcagttaaatggctttcccaagggcatactgtgccttggcattagtctagaggagactcctgaaagttagggctctactctatgtgactgttctcttgtcctacaaattagcagagtgacatgtgggtacccatctcagtttcctgtgcactttaattggaccaaatatcttaggattgaatcacctctgggcagggtcagcatcatgggtacatgtgcagtcacccagggcctacgctaagaaggaccttgtacttggtttaatgtcctgctgttgccatcttgaaattcttaatatatttttttaaacaaagagtttggacctatattggaaagtcatggatgcaatacatgactgatattacacccttttcaggtttgagtcagatctaaatcatctccaatctaacaactaggagtgttactaaattgcctgctggcctttattctttgcaggcaggagaaaggctaggtaccccctgcctcattgcaccaaagtggccaggcatccaacttgctgtacttgagccatgcaagaagtcacagaatcattgtacatgttttacagaaaggagcctaaagactaagtcaacttcctagaatattaaaatccagatgagtgacttgcctagggttactcagtgagaggttaaatgagttgatacatgtaaagtgcctggcacacagcgatatacagagttgcttatgaataagagtactgaccatctgaggcaggaggatctctttagcccagctgttcaagaccaacctgggcaatatagtgagacctcctctctatgaaaaattaaaaattagccagccacggtggctcgtgtctgtggtcccagatatttagaatgctgagatgggaggatcgattgagcccaagaggtggaggctgcagtgagccatgatccctccactggtctccagcctggatgacagagcaagactctgctgaccagacttttcagcttcaggttcttagcatcacacatgctggttgtctactgattacaaaaactcctttgaagggctgtcaaatttaaaattttcacttgtgtaatgaacatcccttaaccctgaatgcgattttaatttacagtcttgtatgtggccacttggtgcccttttttttttttatggctaaacgtgtacgcaaattcttcttttggattcagtaggtttttcaaagcttttttttttttttcctggtacaactgttccatatgaataaacactatccttttcattttatggagaaagctgataatagggttaaattatagggggccattgttttgaactaagttcctgcactaggtcccaacagatcagactaagaatcaagagtcacccatgctaaagttccaagtcaccaaactaaaactaagttgtatctgacattctgagaagtcaggaaagagagacaacagccaattttccaaccaggccatttcaaaatgcaatcgtcatgacaattaagtttcctgttttagtccttaacctggtgtaacctaatgttaaccaatccgttatttctctgttgttgtttccctgtccccgcctcgcaatgaaagtaatttgaagtgaccaatccgctttttgttctctgcttctgctttcttcagccctttttctgtctataaagccaacttcctccgctcgactctttggaacacttattctattttacagaataaggtgttgcccgattctattttttgtttgtttcctcagagaccccgttctgagtgttgcccgataatggaaccacaaagtcaatcaagatcgagttgtaaaaaattacaactaaatttattgtaatttttttgccttttgccaatagaaatccctttttcattaagtattcctccctagagtaagcgaccacgatgaccccaatttcacaagtaaggatgaggaaaggttctgcccacaccgccgcccagcctggcagactaggattgcatcctgcgggtgccactgcgcatgcctgccggggaatgacgtcaatccgagctcgtcccggcctcaccagcgccatgctgggctcgcgagccgcggggttcgcgcggggcctgcgggctgtggc

SEQ ID NO: 32325 - DNA, 2300 bp, Homo sapien
cacttttcaaatcacccaaacatgttaaagaaattggtatgactgggcatggcacagtggctcatgcctgcaatcctagcattttgtgaggctgagacgggcagatcacgaggtcaggagattgagaccatcctgacagacatggtgaaatcccatctctactaaaaatacaaaacaattagccgggggtgatggcaggcccctgtagtcccagctactcgggaggctgaggcaggagaatggcgtgaatccaggaggcagagcttgcagtgagccgagatggtgccactgcactccagcctgggcgacagagcgagactccgtctcaaaaaaaaaaaaaaagaaagaaattggtatgactgttgactcacaacaggagtcaggggcatggggtggggtgtaagattaatgtcatgacaaatgtggaaaagaaacttctgtttttccaactccacgtctgctaccatattattacactcttctggtagtgtggtgtttatgtgtgaattttttttcatatgtatacagtaattgtaggatatgaacctgattctagttgcaaaactcactatgagcttagcttttaagttgcttaagaataggtagatctatgcaaataatgataattattattattattttaagagagggtctcactttgtcacccaggctggagtgcagtggtgtgattaagggtcactgcaacctccacctcccaggctcaaataaacctcccacctcagcctccccagtagctggaaccacaggcacgggccaccacgcctggctaattttttgtattttttgtagagatggggtttcatcatgttgcccaggctgttcttgaattcctcggctcaagcaatcctcccaccttggcctcccaaaatgctggcatcacaggcatgatggcatcactggcatcacataccatgcctggcctgatttatgcaaattagatatgcatttcaaaataatctatttttatttgttgccttattggtggtacaatctcaagtggaaaaatctaagggttttggtgttatttgcttactcaaccaatatttattagactcttactaagcaccaacatgatcacatgcctgagctatggctagcatagcgtgtgagacaaacttaatctctgttttggtggagcatataatctagtagatgaagccaatgttgagcaacatcacaatactaacaaattgaggatgctacgagagtgtctaacaaattgaggatgctacgagagtgtctaacaaattgaggatgctatgagagtgtgtcatggagagctgcctggagattgagagaaagcttccttgagggaagttacatttcagctgaaacacactgccatctgctcgaggttttgtaactgcattcacatcccgattctgacacttcacatcccgattctgacacttcacccagttactgtctcagagcttgggtccgcatgtgtaaaacaaggacagtatgcacttggcagggttgtgagaagggaagagaacacaagtaaagcacctgtatcaggcatacagtaggcactaagcgtgcgatgcttgctatgattatacatcagtgtaagcatcaaggaaaagctgaagaaaagtctgaccaacagcgaaagataaatgcgcagaggagaaatttggcaaaggctccaaattcaggggcagtccgtactctacactttgtatgggggcttcaggtcctgagttccagacattggagcaactaaccctttaagattgctaaatattgtcttaatgagaagttgataaagaattttgggtggttgatctctttccagctgcagtttagcgtatgctgaggccagattttttcaagcaaaagtaaaatacctgagaaactgcctggccagaggacaatcagattttggctggctcaagtgacaagcaagtgtttataagctagatgggagaggaagggatgaatactccattggaggttttactcgagggtcagagggatacccggcgccatcagaatgggatctgggagtcggaaacgctgggttcccacgagagcgcgcagaacacgtgcgtcaggaagcctggtccgggatgcccagcgctgctccccgggcgctcctccccgggcgctcctccccaggcctcccgggcgcttggatcccggccatctccgcacccttcaagtgggtgtgggtgatttcgtaagtgaacgtgaccgccaccgaggggaaagcgagcaaggaagtaggagagagccgggcaggcggggcggggttggattgggagcagtgggag

SEQ ID NO: 32326 - DNA, 2300 bp, Homo sapien
caggtcgtcaacttgagctataaaggagttttcagtaaagctatcatagtcaccaaacatgtccacttcactgtcattaggctgcaaagagaacaaaaacgcttatggtcaattccagtttcattaagaataaaagcttcaccagcctggccaacatggtcaaaccccgtgtctacagaaaatacaaaaattagccgggcatagtggcatgctcctgtaatcccagctactcggaggctcaggcaggagaattgcttgaacctgggaagcgcaggttgcggtaagcccagatcgcgccattgcactccaacctgggcaacagagtgggactctgtctcaaaaaaaccaaaacaaacaaacaaacaaaacccccaaaaaacacttcagcctagggctgtaccaagtatataattatatggtcacatatggatcacagacctatatgtaaatagatatcttacagctgaagaaatggaggcccaaagaggttaaattacttgcctaaacagcaggttcaggagtgttacgatgatactgagattctaatttttgagacagggtctggctctgtcacccaggctggagcacagtggctccagccactgcacgatcacagctcactgcagtcttgacatcctgggctcaagcgatcctcctgcctcagcctcccaagtagctaggactacaggtgcaggccaccacacccggctaattaagaaaaaaaaatttttttttttttttgtagagactgggtctctgttgcctaggctggttttgaacgcgaacttctgggcttaagtgatcctcccatctctgcctcctaaagcactgggattataggcatgagccactgcacacggccagattgtaattcttaaagctgtactaaaacagcaggaagactggtagacgtctactgaaatgtcagcgcattcgaagtttctgataactgcagcgcttccctcccagactacaatctacagtgactggcctctaacagaaacatggttgtaccactagacactccaaggagttcctaggaatttggaattgagactgagaaactgaatactgacttggagtggtctgctacacagaagacacacaaacctggaggcagcaatatagtaaagtgattaagacaacaggatttggagcaagaactgtactatctcaacttttcagggcctgattactgtcgtaaaatctagataatataactagcttaacataacgggtcttcaataaacagcagattttatttgtacagtaggagctgcagttatctggaagcctagatttgtgtctcagtcatgccacttaactgctgcgtgcacaacttttatgtctcggggtttacatttcatatttatatagaaatgtaaataacaaggcaatcaatacctcctaagtgccgattaacagtggtaacgaagacgagagaagtaaacgaaggcgataaaactggtcaactctttgcatctgggaaggatgccaaaagtttgcagtttcaagttccaagtcctccgtacctggtctcccacccctctgtcagtgggcatgtgacgtaggaggtccgggtttgtatcaccacctccaaggacgagacattccggggaatctgagagtagaaggggctgtacctcaaccggcagtacgcccgcggttttccgcctcctgttctcagccaccatttcctcctcctctttcccctcatctccgggcacgagctcggccgcggtgggagcgccaaaaatacaccccaagcttggacggttccttttggggagagacacccgccggcggatgcgggaaccacattcatccatggcaaggacccagggccctattcagacgtcgttctcagtgacccagacgctaagcccatatggaagggagagtgggacgccggagcccgcttctacatccaccttgggaaaagaccccaagttagctctcagggctcgcggaccggaagcacgcataaacttctaccctgtccaatcataagcctcacgtgacctgccgcgtagggagggcacgaacagaaaggtgctgcgcatgcgtattgaaaaacctcacctactctcgcgggtcctcagcgttctcctgcggaacctttgaacggggtactcgagcccacaggggaagagcagcggaaggggcctttcggaacgatttggaacgaaaggaagtggaagaaacgcggaaccatggccgctgtggttgctgtttgcggtggtctagggaggaagaagttgacacacttggtaacggctgctgtcagccttacacatccc

SEQ ID NO: 32327 - DNA, 2300 bp, Homo sapien
ttttatcactatttttatacacagataatggcccatgacttactgtaataaaaggttctttgactttatcaccccaggctactatataagtttgtatcagtctttttggcttttctgttaccaccactgcctctaatgcttttgtcacagtgcctccttcctacagtcagtatggctgtctccaggatagaggttcttaatctagaaatggctttgaagcccatgactccctgtaatcgtatgcaaaacttcaaatgaatgggactgtgtgcctttttctgtggagagggtccataactttgattagagacaaagtgggatttatgaactaaaaaagaaataatgtccctttactttcttaaagtatggtgcatggattagattaccaagacagatgctcagagaaactagacaagttcttttgttttttccaattcctcaaactttccaatttacattcagctcacgtaactactcttcagctctgtgccaagtgctttgtatggtctaattagtgtcaaaatacctttgcatgtagcaagaacctgtgctttcagaaagtccatgttaatactatagccaacctatagctaagctttgtacagtctcttttcagttatctaaaattctgctcacccaaactaccttttaaaattcccatatcatttgcttacaaagggctatgtaaaaaaaaaaaaaacaattcccaaatcacatatccttaaatttaagatctaggaagaaaaatatggtattatagcagctttgcttctaatctaggaattcccctacttcaaaactcagctgactacatgactacaatcaattcatcatcatttctgaactcagagtaattatcaaattgttttgtcctacggcagaactctattcaagtagctaaaataaaagatgttagagtctaataccagatctcgttttaaaaagaaaaacattttggtcatatttgcaaaggccttactaatagaaaaaaaaattcttaccaggtcctcattgctggatacctgttgtgaacaacctcttctccaaagcactgcgattaaacagaaacagcaattaaccatttctttttcttagctgaatagctaaagatttttgtttttatggagacaggatgaattaagggacacgatattaaagaaaggttttgtattatattcagaatggttaaaaacttttatatttgggacagagtaagactcaacatgggtgtgctttccagggcttagggggaaaagaacatattttcccgcccatacctgctctttctgacatttattttcccttcattccatggttagagaaaattcttaatgcaaattcttataggagaagcaacagaaaggcactgtcataccaaaaagaaagtaacagacccgtcccagaaagaatttatagagaagcacagagaagataaaattgcaaaaattatgcaattttgttctgtttggggaccttagacatctggaatttgctgctgggcgactctggaaatgtcccttcctcactaagattatccagagatcttaggaaagtctctgctttttaagaaccactccaacttcctcatacgtttaaatactttaaaggagtggattagacgacactaaaacagtcaaaggcaattacagattcccacccatcttggagaaacttaatcgcctagaaaccagagtcgttttgctaacagggacgactctaaccattaggactaaggttaatgcctgcagcgctacaatggagcataggatatggagactttacccgtgtgagtcccgggatgtgtaaggctgacagcagccgttaccaagtgtgtcaacttcttcctccctagaccaccgcaaacagcaaccacagcggccatggttccgcgtttcttccacttcctttcgttccaaatcgttccgaaaggccccttccgctgctcttcccctgtgggctcgagtaccccgttcaaaggttccgcaggagaacgctgaggacccgcgagagtaggtgaggtttttcaatacgcatgcgcagcacctttctgttcgtgccctccctacgcggcaggtcacgtgaggcttatgattggacagggtagaagtttatgcgtgcttccggtccgcgagccctgagagctaacttggggtcttttcccaaggtggatgtagaagcgggctccggcgtcccactctcccttccatatgggcttagcgtctgggtcactgagaacgacgtctgaatagggccctgggtccttgccatggatgaatgtggttcccgcatccgccggcggg

SEQ ID NO: 32328 - DNA, 2300 bp, Homo sapien
actaattaacatttatctctttctcttatatttccaccacacctcttcccactaccatttattctgtgacctaatcagttctgttattttacttggctgtagtgttttggttttttttgttttgttttttttgagacggagtcttgctctgtcacccaggctggagtgcagtggtgtgatctaggctgactacatcgtgcacctcctgggttcaagcgattctcctgcctcagcctcctgaatagctgggattataggcacccgccaccacacaccatgcctggcctcagttattatttttgatagatactgcagggatgtttcctatatagcactgaatttggatcctctataacatactttgtgtttggttaaaagttgttgaatgatcaaaatggattttttccccaaacacaaaattttttcaaggcactactttttctcttaaaactttgatttgaaaataaaaatagattaattgaaagatgtttcttggctgggcacagtggctcatgcctttaatcccagtactttggtaggctgcggagggcggatcacgaggtcaggagttcgagaccagcctgaccaacacggtgaaaccccatctctactaaaaacagaagaaaaaaaaaaagccgggcgtagtggcgcatgcctgtaatctgagctactcaggaggcagaggcaggagaatcacttgaacccgggaggcagaggttgcaatgagctgagatcgtgccattgcactccagcctgggcaacagagccagactgtctcaaaaaaaaaaaaaaaaaaaaaaaaaaaaaaaagatgtttctttcaacaaatatgtttggctgaaaatgcttgtgttttttccccccaattattatttgagtatttaaaattgcacctgtaaaaatgccttatttttaaaaactaattttaatttcctcaattcaaatgtgcaaatatataatttagttgctgaaactcacagatctctaagcaaagtgattggttttctctttgtcttaagtaaaggagaattattttccaagttaaaaaaaggtctagtagtattaacacatttgcttagtatgttgtagtttacaaaatcctttaatgtgatcttaatcttgaagccaagtttgtcgggtaggtgatatcattcccataaaaattttaggtaaaagctgtagggttcagcttaacttatttaacaaaccaagtgtccatacaggcgattaatttattttcagggagggattgccttttaagtgaatcaatggcattgatatttttttcatttaaattttgactaaagagtgagattgcaagatagcaaatgccataaaagaaactacagaaagtcaagaatttatttctcccttttaatctatattgatgaaaaccgtaccctttcaaatgaatggaaagtaagtcagtttgtatgttttacaaaagtaaagcatatgattaaatgtattctttgtttatatatgccccaaatctttctaaatattaagaaagccattttaaggttgtttattttatttaattataatagtaagacatatcattgtaactattaagatgtatatcctttttattctgtatttcagaatgtggtaggttggtacaaattccgtcgtcattcagatcagatcatgacgtttagagagaggctgcttcacaaaaacttgcaggagcatttttcaaaccaagaccttgtttttctgctattaacaccaagtataataacagaaagctgctctactcatcgactggaacattccttatataaacctcaaaaagggtaaatgttggccagtcactggctgtattaaactaatagaaaaatatatctaatacttagtactttttgcagcttacaaagtgttctcatatattgtcgcatcagattgtcacgataaccttcagaagtagatcttaccatctgttaatttataggtgggaaaataatggtcagacaaggaaattagaagcccagtgtggaatgatgacttgtattctggcactgaagatttgctcttatttactacttaaggtggaaaaaaactttttttttaattgattgataaagggtataatttagaatttagaatttaagcctagatacttcagcagtttttctataactgaacaaagaaacaaagtagctcttgatggtccagtaaaatgagtctaaccagggactccttacaggttttatatatagtaaactacattttcgtggaatatgagaattacgttaaaagagtaccaactaagaataattttattgttcatggaagat

SEQ ID NO: 32329 - DNA, 2300 bp, Homo sapien
actatttctccttatctccactcatacccaagcttttttggcttccgaaggagtatttggttcagctactgtgctgctctgggttgcaggaagtaaaactagtgatgtggttcaggacacactactccaaaatatagcacctgagcatttgagaaaatagcagagcaaagaggtcatttgcaccttcccctcactccttttgccctgaagcaggccataaaccatagaaagaatactctggccatctcccttgaggcaggccataaaacccggtgtccttccctgaagtaggtcataagaccatcatttgagaggtaccctccctttacatagagaaaaggaatatccttacctctgaagacaccaggacacagagaagaacctgaacaaacagcccattctaagttcccccagtttgttaccattacatcatactccctttgtgtaatcatactcctgcacgactgtccactctttatcaaccctacgacaattgtcttccaccccttcattgaaatttcattatctactgactgtggaaagaagactgaaagtcaaacatcaaatctagagcccagaggaactttgtactaagttattgactgctgtttgggctcatccaacttccacaaagaattctttgcaagcaatccctcaagctcatccaaagaatcaattgtgatcctcaaaattacttacattcctccatctccctctcccttatgaaaaagtgtacataagcatctgaacctcattggattattgggtaatcactctactgtgattttctccagggcacattaataaatttgtatgccagtcgggagcgcctgtaatcccagcactttgggaggccgaagggggcagatcacccgaggtcaggagttcgaaaccagcctggccaacatggtgaaaccttgtctctaataaaaatacaaaaaaaataaataaataagccgggcttggtggcacgtgcctgtaatcccagctactcaggaggctgaggcagaagaatcgcttgaacccgggaagtggaggctgcagtgagctgagatggtgccactgcactctggcctgggtgaccaagcgagactcagtctcaaaaaaataaaaaataaaataaattcgtatcccttttccttctgttcatcttttcttttgttagttcactccagtgaaccttcagagggcagagctttcccttcacccctacaaaatgaaggcaagaaacttaattctagggaataaatatataatcattaattatatacatatgtattgtgtgttacgcagccacagacaactgcttgacaacaaaacccacaaatgtgccacactaattcagtagtctgctattatgcttactttcagtcatttaagaaacatacctttacgtgtgtgtgtgtgtgtgtgtgtgtgtaaaatacatttgccaagccctggtccactcaccttaccatttacattaaatgaaccagcttactatgattatgcctatcattaaactgtcagaacattaaatatccatgtattgtttaaattaggctgaagttttctaaaagcaagggaacacacacatgcacacacacaaacacacagacacagaacatggctagagagttctagcaaagacaatccccaaatggttattagtattctgtaagtttcagtgagtgaagggtgctaaaatgcagcttgaaaaccaaaaccgtggcatatccactgtggcatcgtaatgttgctactcaactcttttattcttgtaatcattgcttgtcttaaaatgaccctgtcaaccgtgttcattttgatagctttgcatgtttgtgacaggtcgctcagcaggcgcaggccaccaaaagcaattcgcagccctctgcagtggtaccgacatgcagcggccttccgggagaggccggcagcagaagcgaaggaggagccgagcgcgcggctggggacccgcccgcgcccgccctcagccccctcgccccgcccctctgcggagcgcgcagcagcccgtgcgccggcgcaggccccgcctcctcgctgggccccgcctcgctgccaccacagggtcttgcctccgcgcgccccgccctcgtcctcttgtgtagcctgaggcggcggtagcatggagggggagagtacgtcggcggtgctctcgggctttgtgctcggcgcactcgctttccagcacctcaacacggactcggacacggtgagccgagggacggggcggggtccggcgtcgcctgggaagagccctgcgcgcggcctgcctccccgctgttgctccggtc

SEQ ID NO: 32330 - DNA, 2300 bp, Homo sapien
tttcttctcttccctcaccctcctccatcactgcaaagatgagcctttgttaccctggggagcctgtgttggctctcctgccttttaggcaagaaaaagatgaagagtttttgcccttgcaccaggctgcctgctgatctctgcatagagctttgtcatttaccatgcagtttcatgctcacaatcactttcaaccctgagaagaacccatcttcctgatgagaaaggtgaagcacagaagcacttgctcaaacttatatgtgttcgtgctgctctcaatcgaagactccaaattccattttattaccattgcaccatacagctgtggacgaataattcttccgtaacagttaaaacaaaaccaaaccaaaaccattttgtggagtttgttcatgagcaccaaaaatcactggagagtgtgtgcactcagcacacgcaaagttgtgtgtattatctcccttgtggggtaaactttggtacaaggatttagccttccttagttatcttggtttgaggaaataaaaggaaaataagagttttgcctgaacatatggtgttaaatatgccaatataatatttgaagttttgcactcaatatatatagtgtttgaaagcaaggactttgggcagctttcggtagttgcgttttccgtgtttttctaaactagccaaccttacagaggtttaattttgagaaaccaagctcctaacacttcttcattcataaccctttttttttttttttagactgagtctcactctgtctcccaggctgcagtgcagtggcacgatctcggctcactgcaacctcctcctcccgggttcaagtgattctcctgcctcagcctcctgagtagctgggactacaggcgtgcgacaccacgcggggctaatttttttgtatttttagtagagacgggggtttcgccatgttggccaggctggtgttgaactcctaacctcagatgatctgcccgcctcgcctcccagagtgctgggattacaggcgtgagccaccgcgcccggtccataacctggttttaatcatcaagttataattttttccgttcttagtgtgggagggggcttgtgacagctacctggcagtaagtacttaaggcagacatctacattctttacagaggggcttgtcacttcgttggctccccacttcctccacaccctgggcagggaccattttctctgcaatatttgctatcagcgctgtttcaattcagtttgctggccctctcagtttttttccagcttgaaacaacacctgaaaagtacctgtaagagattttggtcgaattcagcggcaatctggaaaatcccttctcaaaatcccttctgctcattcttaaaaatagttctggtctctaagagaacagcaatgtagtaaataacatacagggttttgcccttcgttgctctgataagggctggcgcggtagaagcgcggagcctgaacacccaggagacacctgtcagcttggtgaatgaaggcttgcgccggcctggcatttctgctacgcctaagcgcggatagtattggctgaatggtaggggaaggtgtggttggaatcttcccccagaaagggagtgacagatacttagccgcagggtttctgtgccagggagatggcggctcagtgggctaggcaacgcgtggagagagcttcctactctcgggataagcaagattgagccccacagctgtaggccatgtggggaaggaggtgtggaagccagaagcggcgtacacggctgcgtggtgcgctctgcgttttcctgtccttggaagccctttccaagagttcgttttacacccacacaaacaagacctcaagcgtcccagatacgtcagcagttcattctgcgggtgaagaaaatattgacatttttcagatgaaaactctcctcctgaaaggacctttgctgagtgctgggggaggcggggcgcggggaagaacggagaccgcccaggaggctgcggcactcctgggctaagtactgccagggagctcccccgttgggtgacggaggaggtggggcgagggcagcgcgcagaaatagggcgctgggcgcccgagcgcagccagcttccagcacagcccgcggcccggtgccagctccgccggcgaccggtgtgccaaagtgcggtgctcccgcagggaacctggctcggggagggcctccgtgagtcatctgctgagttgtcgcaatcgccacccagaggaaatcaggcaccgggcggggcgggttcctggctgcgctcgcgcgctctgcccgcgccgcgg

SEQ ID NO: 32331 - DNA, 2300 bp, Homo sapien
ccagaatggcacaataaaatgtttctatttccttcagcctcaaaaactggctgagtgaactggtccatctgacttgctgccggatctgtgtgcgagccctctctggtaccattcattatcataacaagtgagtatctgctccaatgtgcctgtctttttctaggtcaattcagcatgagattgacaaggaagcattggaagtggttgggaagaagtgggtggagtcagagtgcttccaatgtgttcatctctacttctcagtgtggcacaggcatgatgcacaaaaacactaaatagcagtgtttgcagaaagaatataataataaacacgtagttgtgctcaataattgggcatttatggtgtgcaggccagaccctgtgtttcttgtagctcatccctatgagataggcactgttaacccattttataggggaagaaatgtaagctttgggatttgttgtttagggtcacagtgaataaacaatggaatcaggttttgagccatgtctctctgattttaaaaacaatgaagttgacaggtctgtactgtggtggaaataggactagacgtggagtctggaaatgtggtctctattcttagtcctgctacttctaaaattccataattgagccttaaaacaaaattctgcttttctctcccagaattgtagagaatgaaggcagcaaaggaaaggaattagctaagtgaaagtgattttgattgcatttgaactacttttctattatcttaattttttttagatttaacatcattttaaaagttctaggccaagcttctcttttttactgatttggtctttctttctcatttgtagaagggaaacattttgccatttggctttaccatgtggtaccaacataaaagaccctttaaacattttaaattatatgatgttgcaattggactatgagttttaaagtgaagagtgaaagaaaacactctggcaggtgtgcagtcagaagaaacacctgtagaaaaggcacacttattacataaagaggagttcctaacttcttatagaattgcttctcattttgaagaaaatatgctaaataattgtgtatttggttctttcttctctgtataggcccaaagaaaactactttgctttattggtgtcaaatactggtttcactctagggtagagatcaacaaactgaactgggagcctataggccaaatctggcccaccagctgttttctgtaaataacattttattggaacacagccgtgctcattcacagccgtggctgcttttgtgtcacaacagcagagtcaagtaattgtgacaagcattgtctggcttgcaaagcttaaagtatttgctgtctggcccttgataagaaaagtttgccaacctctgctctaggaggataggagggaggaaattatggtgaattttctccgtggattaccatgaaaccactaaaagtgatgtatatgaagatcagaataatgtgaaaatacttcagattaaataagtgaaagctgtgtattatcaatggaaaaatcatgggccccctaccacactctcatcacactacctagagatcaccttttaaagatgggcccgtgtacctccaaacttaatttttaaaaatatacttaaaaaagaccaggcacggtggcttatgcctgtgatcccagcactttgggaagccgagtggggcagatcacttgaggtcaggagtttgagaccagcctggccaacatggagaaacctcatctctgctaaaaatataaaaattagctgggcctgatggcacatacctgtaattccagctacttgggaggctgaggcaggagaattgcttgaacccctggaggtggaggttgccatgagccaagattgcaccaatgcactccagcctgggcaacagagtgagacgcgaaaaaaaaaattacatatatacacacacacacacttaaaaaagtaagatgagtatttacatgctgtggctattttagaagacttcgaattttccattgtttgtaattgcaggcagtacagaccccagaagggaggcatttgtgttgccaaccatacttcccccattgatgttttaatcttgacaacggatggatgttatgctatggtaagagcagctcattgatatttcaagtagttgcatgttttatggattgatcaaactttttattttggcataaattagcaagttggttttatgttagaaatttgactgcgttatactattgtagctatataagttatgtaatgtatttacatgaggaatatgtagtgcaagaaaaggaag

SEQ ID NO: 32332 - DNA, 2300 bp, Homo sapien
aaagaaaaaaaaaccaccttgaaggttaaatatttgataactacttgctaaatatatgattgattaagtgtttgctgaatgattgttatcacttaaatccagctagaagctgggcatggtggctgacgtctgtaatcctagcactttgggaggccaaggtaggagaatggcttgaacccaggagttcaagaccagcctgggcagtatagtgagacctcatctctacaaaaaataaataaaattagccaaatgtggtggcatatgcctgtggtcccagctacttgggaggaaggatcgcttgagaccatgaggttgaggctgcagtgagctgagattacactactgccctccagcctaggcaacagggggagaccttgtcttaaaaaaaaaaaagaagatccagctagagacagaggaatgggagaaggaacctctggggtttagggtagagatgagctaccagaaaccttcgttaggaaacagcttttggcccgaggcctttaactggaaggcacattggttatcgcttctataaacacaaaggtggtccattactcttaatataatgaaaagtacttgatgaatctgcttcaagttagaaaaacgattccctatcttgagatcatttggcagtgggacactctggcagctgcagtctggctacctcagcccttaccagctctggagagaagagttggaaatatagggttggttgcagggaggacaggacataagcctggaagaatgtcagtctttctcagcttcatggtgtgcaaatggaaagttcaacctgaatcatttaaggattgtcttgtacttaatggccataatgcaggtaggtccagcaacccaatattcccatttttcagatgaggaaacctaagtacatggagaagagcacaaagctcatgacacagaggctctagagtccatgactctagagtcaaatgactgtctaatattctcttttaagaataggcgaagacactgaaaatcacttactttggtccaggcacattggctcatgcctgtaatcccagcacttggggaggttgaggcgggtggatcgcttgagctcaggagttcgagaccaacctgggcaacatggtgaaatgccatcagtacaaaaaatacaaaaacttagcagggtgtagtggtgcatatctgtggttccagctacttgggaggctgaggagggaggtttgcttgagctcagggtgtggaggctgcagtgagccgagatcatgccactgcactccagcctggatgaaagagtgagaccccatcccccacccaccaaaaaaaagaaaaaagacttactttgaaattagagaaattataatggtgcagatcttcttaaacttttttggaaaggaaacaactcaaatttatttcttttacctgtatctcaattattttctccttattgcttcacaattgtgccagtaaagtgcaaggaatatcaaaaaggacatccacctctctctttataaaggcagaattttgatcctttttttttccatagactaaaagaacatattgctgataagaagaaactacccatactaatttttcctgaaggtaagaatgggcctgcctcccgagctatagttgataacaacaaaccatcaaaagtgtgtgaggaatagaattgccatagaattggcaaccttagcccagatctctgcccttagaggaatgggatggcactctctgagttattaattccttgctttcttttgagacttgatagaagtcatgttacctttttaattcaaaagtcatttctgggtagtgaactgagagcagaattgtccgtgactttaagggttgcatgtattgaaatttcacctgttgagaagttgttcccataggcccatagagtgttcagtagaaaagtaaaagcttgttgttaaacctgcttagtcagaactataggattactaccttggcaggggttcgtttgtgatatggtagtacgatgcctgtaattttgatattttaaattattttatatcaaaataatttcttttaaaatttatttttaaaatgactgcctttaaaaatattcacgctcctaccctcacccccttgcaggaacttgcatcaacaatacttcagtcatgatgtttaaaaaggggagctttgaaattggaggaaccatacatccagttgcaattaaggtaaaacagataccataataagaataataattattataaagatattggattggtaattttattttggtagcatttcaaacttaaaatttgcaagaacgaggaacaccagttttcgga

SEQ ID NO: 32333 - DNA, 2300 bp, Homo sapien
agctgctgattttctttcagagatgccctgcccagagaggaggaatctagagaggcagtctgtctacagtgtctttgcccagctgccattggttccacccatttgaacttcctggcggctttgtttacacttttaggggaaacccacatactcaggcctcaataatggcagacgccccttcccccaccaagatccagcattccaggtcaacttcagactgctgtgctggcagtgagaatttcaagccagtggatcttagcctgctgggctgcatgggggtgggatccgctgagctagaccagttggctccctggcttcagcaacgtttccaggggaatgaacagttctgtctagctggcgttcaggtgccactggggtatgaaaaaaactcttgcagctagctcagtgtctgcccaaacggccatgcagttttgtgtttgaaacccagggccctagtggcataggcacccaaggtaatctcttggtccacaggttgtgaagaccatgggaaaagtgtagtgtctgggctggagtgcaccgttccttacagcacagtcccttgtggcttcccttggctcagggagggcattccctgaccccttgcccttcctgggtgaagtaacaccccaccctgccttggctcagcctccatgggctgtacccactgtctaaccagtcccaatgagatgagccaggtacctcagttggaaatgcagaaatcacctgccctctgcattgatcttgctgggagctgcagaccatagctgttcctatatggccatctggccagccactgattattggcaattttgtgtattgggaatatgaagtgttggagttttatttgatggagtgtgagtagagacatctttggagtatttgacatgatacaagagtttcaggttttgaaactcaattgtaattcagtacatagtcattcccccaactcagcataggaatgggtgcctagagagaagaaagagagacatcacaaaacattgcttcttttatagaattatttgagggagggcattgcctaatagagcgatttgctcagttttgtaattatccatggtatttatagaactcacataaagcaatctaatgttacagaagtaatattacactggacttagatggactagagagagctcaaagtgatttggatgatgccattgtccaagtgagtgaatttatttccaatagcaacagagtacaatacagaacttgaagtaaagcatgtttatttctagaaaatgtgtttattctcttatgagctgtttctgtctctgattaagagactgttatagtaagctgagaagactcaggtcagactcccaggagctcaggcaataactcaatcagaaacaggtaagagctgaattggagggtactgtcaatcactgctcagttaggtcaaactgatcatgactgttggcatggcttcacctggcaaacatttagagtactaagagaaggaaaaaatagacactcatacacctatgttctcaaagtaaaattcattttggctacttgcctaagaccccctggagaatcccaacagagatgagactcagctttactagttagaaagatagacttctgctcaatgttccagcagttctacatggttgcttccagcaccaatttatttgataacaaacttagttaccaagcactacacttcctctctcttgcctaacccagggaaaaattcaattggttttcaattactcctttttgactgaatttgtccaagaaaatatctttacccttcagtgagcaggaggaagagagaatttggggatgagggatggagaggagttgaaaatcatggcaagaagaggcccacaggtggaaattatgtgcgactattacctgagctcctgctagtcattacatacatggcttctgggatcagctggcctgtctagttgtggttccaacacaagaatgcactagaaaatgcattcttaggaaagtatttcacaatcaaatcatattttgacatttagagtagcccaattaaacagtaactattgttttcttttttatgatttttgtcttccagtttctaataattttatttattcctttctaggtattcagtgacatctttctaaattgtttaaaatgagaagcattgcacactgagagtcaggatccaagtgtctttgactgagccaactcagctctgctattaacttatggtgtgatcgcaggcaagtcacttatttttcctgatatttaaaacaaagaaattgaacaaggtagtctgtaaggcatcataccactctaat

SEQ ID NO: 32334 - DNA, 2300 bp, Homo sapien
tcaattcctgggtattcttgttgactttctgtcttgttgatctgtctaatgttgacagtggggtgttaaagtctcccattattaatgtgtgggagtctaagtctctttgtaggtcattcaggacttgctttatgaatcttggtgctcctgtattgggtgcatatatatttaggatagttagctcttcttgttgaattgatccctttaccattatgtaatggccttctttgtctcttttgatctttgttggtttaaagtctgttttatcagagactaggattgcaacccctgcctttttttgttttccatttgcttggtagatcttcctccatcctttcattttgagcctatgtgtgtctctgcacgtgagatgggtttcctgaatacagcacactgatgggtcttgactctttatccaatttgccagtctgtgtcttttaattggagcatttagtccatttacatttaaagttaatattgttatgtgtgaattcgatcctgtcattatgatgttagctggtgattttgctcgttagttgatgcagtttcttcctagtctcgatggtctttacattttggcatgattttgcagtggctggtaccggttgttcctttccacgtttagctcttccttcaggagctctttgagggcaggcttggtggtgacaaaatctctcagcatttgcttgtctgtaaagtattttatttctccttcgcttatgaagcttagtttggctggatatgaaattctgggttgaaaattcttttctttaagaatgttgaatattggcccccactctcttctggcttgtagggtttctgccgagacatctgctgttagtctgatgggcttccctttgagggtaacccgacctttctctctggctgcccttaacattttttccttcatttcaactttggtgaatctgacaattatatgtcttggagttgctcttctcgaggagtatctttgtggcgttctctgtgtttcctgaatctgaacgttggcctgccttgctagattggggaagttctcctggataacatcctgcagagtgttttccaacttggttccattctccccatcactttcaggtacaccaatcagacgtagatttggtcttttcacatagtcccatatttcttggaggctttgctcatttctttttattcttttttctctaaacttcccttcttgcttcatttcattcatttcatcttccatcgctgataccctttcttccagttgatcgcattggctcctgaggcttctgcattcttcacttagttctcaagccttggttttcagctccatcagctcctttaagcacttctctgtattggttattctagttatacattcttctaaatttttttcaaagttttcaacttctttgcctttggtttgaatgtcctcccgtagctcagagtaatttgatcatctgaagccttcttctctcagcttgtcaaagtcattctccatccagctttgttctgttgctggtgaggaactgagttcctttggaggaggagaggcgctctgcgttttagagttccctggttttctgttctgttttttccccatctttgtggttttatctacttttggtctttgatgatggtgatgtacagatgggtttttggtgtggatgtcctttctgtttgttagttttccttctaacagacaggaccctcagctgcaggtctgttggaataccctgccgtgtgaggtgtcagtgtgcccctgctggggggtgcctcccagttaggctgctcgggggtcaggggtcagggacccacttgaggaggcagtctgcccgttctcagatctccagctgcgtgctgggagaaccactgctctcttcaaagctgtcagacaggggcatttaagtctgcagaggttactgctgtctttttgtttgtctgtgccctgcccccagaggtggagcctacagaggcaggcaggcctccttgagctgtggtgggctccacccagttggagcttcccggctgctttgtttacctaagcaagcctgggcaatggcgggcgcccctcccccagccttgctgccgccttgcagtttgatctcagactgctgtgctagaaatcagcgagactccgtgggcgtaggagcctccgagccaggtgggggttataatctcgtggtgcgccgttttttaagccggtccgaaaagcgcaatattccggtgggagtgaccccattttccaggtgccgtccgtcacccctttctttgacttggaaagggaactccctgaccccttgtgcttcccaagtgag

SEQ ID NO: 32335 - DNA, 2300 bp, Homo sapien
ctaaagtttccgcctgaattttgatgattctacccccatgtaaacccaaaggaaataacaacaataatcaaagggagaaaagttaagggaaaaaactccctcactgttctcaggtataaacatcatctgacagataaatattcctattaaacggattcagttttcagcgaattgagtaacccataaatgataatgaacgcggtgggaagcgacgggcgggggggaactcgggaatgaaaaaaaaaataaagtggaggagaaagaacagaaaaggaaagcaggaggtggaaagatggaagaggacgatcctttggcctacaaggggattaaggacatctataaggcttaaggagcaacaaattaatttacacaattctgggagagcccagatggcctttaattaatcccttcaaaagaaggagccaggccagggctgcgccggctgcctgctccattagctccattttacaagggaccagacttggttcgaggtgaggcgccctccagagctggtgggggaaggggataggatgacgcgagcgggctagtggggaagcaagggaagaatatgaactgcttttccataaaagggctgagttttcattattcctctctttaaaaagtaataccctcttcgtctctgcttccccctcccctttctcattttatttagcacaattaattgaggcggccactggccccagcgcggaaccgcaccactcaccagctcccgcccctcctggccccgcccacaggagaaagaagtagggagcgggaggggactaggcgggcgcggccctacgcctggcccgcctcagccaatcagagggtgcggcgcccccgagtgggcgagccccaggggcgacgcaaggatcgaggcggcgagctattggacacggtggttacgcccccggcctgcgcccggctcgccggcccccgcagcctcggagtgacgtccctcaaagttctcattttggtcccccacttccccctccctttcgtcccccagctaaagaggggtagggagtgatgcaaatgttttattacctttgagagcttcatctgaactgtcaggcccggagggagagaggaaaggagagaaagagcggaggagccgcggagagggtcagtttggccagaggacaggacttagaagaccgaagcctgggaagccgcgaagaaaatgccagagaggagagtcaaaggctgagagtgagagggagagagggagcgggggtggggcgggggtcgccgggcccgtttgcagaagtggactgacgagcggcgccgaaacccagccgtcagacttttcacacttagtcttttgtttttctgtgtttttcctccccctttttcttttcaatattgcaactccagtgccccgtgggccagagggcaaggcgggtggaggtgaggacctgggagccgcggggatccgtggcactgccctttctggcgcagcagcccggggcagcgtgggcggaggaagcccgcacagaggctagatctcccgcgggctggatgcgctttctccccgggcacagtgagcgtcgaatgcgaatcagccgcgcgaccgaaagagcagagcatcccagtaagatcagaggagcgccacgggctgcacaaggcgtcctttgaacctccccaaagaaagcaagccacccccaccctccaacttcaaagtggagattcggcaactaactttgctacaaactctccggagccagcctgggttttgttttgcttatttcccgggggcagaagatgagaagtagcgcactttgaacagctaggaaaagtgaggaagagagaatagccagggatcgaatctaggactcgcggaacgaaaggactgcctagcccgccgggacgcctgcttttctcggcgagctgccgcctcccgcgtggagggtttggacatctctgctgcgcagctaggcgagcaactcccggcagcggcatttttggttcagttggcagctcgcctccgggcgcgccgagtgcctctccgctcgcgccctcggcgcttccggctcctctgagccccgcggggggcaccagccagcgccctcgctgcaaggctacggtctccggcgtggccgtgggatgttagcggtgggggcaatggagggcacccggcagagcgcattcctgctcagcagccctcccctggccgccctgcacagcatggccgagatgaagaccccgctgtaccctgccgcgtatcccccgctgcctgccggccccccctcctcctcgtcctcgtcgtcgtcctcctcgtcgccctccccgcctctggg

SEQ ID NO: 32336 - DNA, 2300 bp, Homo sapien
tctaagtaataggctataccatgtagcctgggtgtgcagtaggctatgccatctaggtttagtataccctgtgatgttgcccaatgatgcatttctaagaatgtatccccactgttaaacaacatatgactgtataaatttcccttgttgtgctatacctttgccatcccatcatttcttcattcacctcttcagcaaacattgttacctatagaagggtggtttttggcactgtggaaagagctagacctgtaaagatgaataagccagtttctgctgtctggactcagtctattcactcaactagtggtaatagctataatgaagaagattgaaagaaattgctctcttagctaaaacacaagaaggagcagagcttaaggaaggtgaggtaagtagaacctcacattctattttggcagtctttgcattggtcccacttttcctgggttggggaatactgtttcttctatcacgcactactgtcctctgttgttcccctctgtcactcctctcactctcttttttcctcctgcagcaaagggaaaaagtcaaagaggccatgagaggactaggcaaaggggaaacaggaagttgttcaggtaccttgtgtagtaggtctccttttcttggaccatgggggaaagcaaaggctggattctgatcgtctaagagctaaaagggaccacagaggccatccttactatccgtttacagctgaggacactgagggttaataacttaccaaggccatgcaattagtggcattggcagcactagaactcaggcttcttgacttccagagagttagaatggagcacttctaatcctttatgcagggtagggtagtagccagagatggaaaccctactactggcttcagccattattctgattatcttcttcactatcaagcactccttcatttccgatcctccaaacaattggacaatttattaatgtagtcaccccatagttctctgttcagtagggacttattttcaaatcttctctgtcatttcagttatccaccccataaggaacaaattatggtttctcgacatccttttgaaaacgtgcaacccaaactaaccgcacagcttcaaagatctgtttggtgaggtaaaatgatgtctttgtgttctgcttttcaatgcatcctaatttgacttttggttttgctcatttgttagtaaattttcaacactttacttacttttaccgtgtcagtaaagaccttgaggaatttacatagttgatctatttctataagggtgctctcctgaaccttgtcctgtgtgaaggcccgccttttttcttttttctctttgtttctctctttttttcatttgttagcttgtcagtaatgaccgggtggcggatacatgtcaagaaaactaatcaccttctaacaggattaagactagaattaatgcagatcttgtgcccttcctgttcccgctttggcagcccaaggtccaccactgctcagagactagctggagggcaacggcgtcccatagcatctcacactgtgttgggatcctaggtggtgacctttgtgagattcagtactgagtttctgggagacggcgctgcggttgtgatcggaattgttggccgacgcacctctggacgcccagtgaggcaaaagcatctcctgttttcaaggtgatgacactgggctggaatgccgcggggccaaccagtccgtcctgccagacaagtttctggtccagtgagcctccgacccgccgcgcgtgtcaagctgacaaggccggggaggcgtttgaagcagcagtgttgagcgctgttaacatttagcgggcgtctttgagtagctcctccagccctcgcagcggcccagggactagcctgcaagttctcaacgctcacttccagcccgcgctggccccgcctccgcctcccagctcctcagcctcctcccgccccaccgctcccaccttttctcaggcccccacctgccagcacgcagaggcgggggcggggtcgcgggccgggctcctgacgtcacctcacggggaggcggggctgtgggaaccgcagtgcagcgcagaggggcggggcctgcggcgcgagacctggtgcgggaggcccgggcagggagaagtgtgcggggccgggacaagccggctccgagtccggctccggggggcggggcgggaggggcctgcgcggcggcgggagcccagagccgcgctaaagcgggtcaagcgtcctccttttctccccgccccttctcctcctcctacctgggcctctgcgtggagacgcgcacc

SEQ ID NO: 32337 - DNA, 2300 bp, Homo sapien
agaaagctggcttcaaatctctgatgataaataagttacttaaattctttgcccctcactttcatcctttacagcagggctagtgataatctcacaaggttgctgtgttaactagaacatctgaagtctccaccccagtgactggcacacaggagatgcttcagaaagcatcctcctttctttaactatagtgggttgtgttcttaccaggttaggtagagcccagcctggtagaatttaagaaaataggttgttcttttctatctttggatctcataaaaacataagttatcagctcagggagtcttggtttttactaagtttgccaagaagtgacccatttaccagtttccttttctccccccacattcccccacccctattttgaatacagattttaaaataggatattacagcattaccaagattgtgccttttgatttactgaagaaacacaactatatctggactgaaaaatgcctcttctaccctgtggttttagtggttggattcattttgtaaaagtggaggtggattcctgcctctagatgaaaggcgtaatagattttgttaacaatgggaggaagaagagtagttcttcatctcctcagatgacagggagctttcttgtgtcgccagaccttgctcagcagtgtgccagggacgtggacctgccctttgtctccatccgtggtccctttggccactgcatccactcaactgtgaattcttaaagaagcctctgttcggagtatttttttttaagtcagcaagcactgaatttcaggttacctaagaaattagccactagtcttaggactgaaaggctttctgagaactaggccagggattcaatttgcttcagaaaccagaaggtaattggaagggagcaaagagaatgacgtttttctctctcttctcagggggacattgtgtcctgcgctggcacatatatccatgtgtggagcatcaatgggaaccctatcgtgagtgtcaacacgttcacaggtaggagccagcagatcatctgctgctgcatgtcggagatgaacgaatgggacacgcagaacgtcatagtgacaggacactcagatggagtggttcgggtaagtgaactgagagaaaaactcattaggatatttgtcatcctagtttaccagaaacttgtagctaattacaggttaagaacacctgaacaagttgtaatgtttagtgaactctcgctccagctcagacaggccttggcctctgcgttatcagacatgaggaacactggtgtcttggcctcttttcttcctattaagtagatctggtagtgctactggccatttgacagcttgacacagtgaggtcagtcaaacatgattcccatgtcacactgggattgctcaacatgcgaactgcagaagtactgggttttcagcctgtcaaatggcttcgtagggaaaacatagtgagcagggataagtctcttccctacagagaatcacagtgctggaaaacacttcgaggatccccagctaggatcccagatgactgcacctgaagcctagatgtagtttatccttttcttaggttgctatgtgctgggactctacagaaaatagaggcaatggagtattcacttttgtagtctgttgaagtatttgagtttttctgtctcaggagatttttctttgtgcttgtttttctttaattgtgctctttgtaaaagcagagagcagctgattaccaccctctttagtcagagtcacatgttgaaagacagtgaagccatcagtccactccaataccacaccctgtacctcacacggtacacatctgtgcacacacaaaaactcacaaacacacacaccctggagtctgcttcctcgacagtggtatttcacactgctcaatctgtgaagcagcataaaatagctccctagccaggcacctggggattctgtttactgtatgccctcttggagatatataatgtgtattagcatatgcaagactctgagaggtttttgtaggaaacaaaaaagtttacttagttgaactatgtttttgttttgtttttgagacagagtgagttgctctgtcgcccaggctggagtgtagtggtgcaatctcggcttactgaaacctctgcctcccaggttcaagcaattctcctgcatcagcctcccaagtagctggaattacaagcatgcactgctatgcccggctaatttttgtacttctagtagagacagggtttcaccatgttgacctggctggtctcaaactcctgacctcaaatgatccgcccatct

SEQ ID NO: 32338 - DNA, 2300 bp, Homo sapien
agattactaaatacctactagtatttatattttctctttttgcttttttttctctgttttctttttttggcttgttggacttcatatcagaaagaaccaaacagtcttctctctcctctttaagataatcaaagctctaaaataccaaaaccttgtaaattcaactttatagataaaaaaaatttgtcttcataatttcattctcatttaaatatattctgcctatccgatatattagtaaaagaacacatttttagtatgccaatgaaaagacatctgtgttttatctaatggtataatgggatatctaaaaatattttttcaagtaggttttttccccttagaatgaaaaaaaaaaagttctgcaaaatcttgaagttgtcgcttaaaaatatccaagaattggaacaaaatctggttaacttgtgtgccattctatgccatttgtcctcattacacagactctgctctgtgccagcgtcagtcactgttggcgattcttctggagtagtaatatggtcatcagagtgctggtgtggagcaaggagtccgttcctctggggaatgacatgaccttccttgaggaagtctaaggtctggctataacttgggaggtactaaagacataggtttgttgataatctgtgtccctatgacattctggggagcatcccagattactctgtacaaccctagggaggcaaacctgaatggtagtacccaaaccagagagtgcccagaaataggaaagctggaggaaagtcctgcagaggccctgttaggttgaacattccacccagcaggtcttgtaggagattcaaaagcccagctctatttcagagatcattttttctcaacgtaggtatcaggatgcttgatttatatgaatatttgaaattatcatgctctatgagataatgacattagtttttcctgttcctgtcctaataccatgatttcttttttctagaactcaaagaacctgtaggacaaatcgtatgtacagataaaggtattcttgcggtggaacagaataaggttcttatcccaccaacctggaataaaacttttgcttggggctatgcagacctcagttgcagactgggaacctatgagtcagacaaggtttgcattatttcctgcctactcatttaatattgctcttttgtggtctggctatcctatatgactaatagggttggggagaacccagtccaagggcttgtcagctgttcctccaaagcccaaaagaaaagtgagctttcctatttggggaaaggagagcttcactgaatgagagcaggataaaggagctcatagagatgtcatgttccctgcagaacaagcctcttttgcaaagttgtgtaacaggggctagcagtttccttctcactcaaagaattcctccgagagatcctagccagcaaggagctcagcatttctgtcaaccagaatagcctccttttgatgagtcaccatctgccccacttttcattttagtgctccaaacaagctggcagaaaacctgttgctccatcccacaagaagcaacagcaactgttttgggtcccataagtacctcttggagagacaatccatagtgatcctttagtgccctgtgtttgccctccaacagtcccttcccaaatgcaagacgaaaagaatctgcatagtctgttatgttgctttgtaacacgattccattttgttgatgttctccttagcagcagtcgtgctctcttttcacattctgtctacagcaaatgcatccttttgccacattgtcccctgcaccttccatagatcacacaatttgagcatcactttcccaatctggagaaaccagagacccccattatgagcaaagtcctttttggttatggctttcagcagcaacaatagtttggaggcggtaggggtagttcagggtagagattcagtggatatgcttctgaactaaagctagctcagaacatgagccgctatttgctggtgaggtgcctgcaccttcactcaattctgctccttgagtttcagaagtttgtatagtacttaacggcatgtgtgtctcacatccgttttactttataggccatgactgtttatgaatgcttgtctgagtggggccagattctctgtgcaatctgccccaaccccaagctggtcatcacgggtggaacaagcacggttgtgtgtgtgtgggagatgggcacctccaaagaaaaggccaagaccgtcaccctcaaacaggtaagagagaacatagaaaatgccaagaaggacatagtccatctcctgtg

SEQ ID NO: 32339 - DNA, 2300 bp, Homo sapien
tggcaggtcccattactgaaccttcagttctctaccacattctcccgatgcaattctgaccttcaccgtgtattccccatctcaggaaatggcaccatcatccatgctgtcttacaggctggaaattatacttttcctactgtccatgtctgctcagtggccaaggcatgtctacctttgtctccatcagtgtacccagtgtctcatttcaggccctcctcatctttattggaccattgcagcagtctcctaactgggcttaatgctctagtctctccttccttcagtgtgccctctacactgcagccagtttcaggaacactaattgagtcatccccctgtttaaaatcattcagtgaccaggtgctgtggctcacacctgtaaccccagaactttgggaggccgaggagggcaaatcgcatgagtccaggagttcaagaccagcctggtcaacatggcaaaccccatctctacaaaaaattagccaggcatggtggcatgcatctgtagtcccagccactcaggaggctgaaatgggaggatcacttgagctggtgaggtggagattgctgtgagctgagagtgtgccactgcactccagcctgggcgacagagcaagaagctgtctcaaaaaaaaaaaaaaaaaagaagtaaaaataaataataaaattattcagtgaatcaccatcataatttgggagagagttgaaaaacctcactatagcaaccttttcagtgcagctcctgtgtatatattcctcatatactcccagaactgctatcgtggggcaccccagttccctctcttgtaatttagtggcttttcacatacagcctgacctgcctggtgcccatcgtgcatttcttctctccaccaactaactcaactgaccagctccacttcatccttcaggaggcactcaagtaccagcccggtgatggggacccttctgttctttttctcctctgccttctattcccacactgccctatagctgtataacatggtacctatgttgggttttttttttttttttcaccattttaatcagggagctttcttttacagcattgtcctgctatttgtttgaccctactcaatcgtagggtcaaggtccttgagcacatagtccattttatgtctctctcaactctcagcccataggatgacacctggtactttgtacatactttaacatttgttgaattaaccagaaaatataaacaaggtactttacatataaactttgagataacaaatatgctaacttgacttacattcataaatgtagatcagtttctcctgcccaagatttttaaaaataaaagtttggcaaaattagttattcaggatgtcctataaaaaggacacaaatatgccacaggcacatatttcaaatttccacttttaaaatcctcagggagtaaattttagtttccttttaaatatatgaattaggtcaactcatcaacttttaaagtgatctctggtaaactagaagaatccatctcattgggaagttacttgatctggtgtgatgttatcttttagaggtgaaagaattactgagtgttctagtttttatcacttccagatcacctctgagaagaaaatgctcagaagtaacgttggagggagacagggcgggggtggagggagggaggacacaagggagatctgatcctccagttatgtgagtgatgaagttaacgatgaattggagctattgtgtccacagtctcctgctgggtccttgtcaagacttggaagtattttccctcttaatcctcatcccctaaacctggatcctgagtggcttcctctgtgaaacatataatttccaaagcacttgtcttccaactgaatctgttaaccaactcccatgtgcctgtctgtaaagtgtgtataaacagtacatatatagcattattttggagtccagttataccagtttgaccccacagatactagtgcgtttataaatcatcatcatccacaacagccactgtatctacgttagtgaggctagatagtgtatagtaacttggaattgagttacattttgtattttaggaggtggatcttactaatcccaagacgtttagaaacctggctaagccaatgggagcacaaacagatgaacgattagctcagtataagaagcggtataaagactgggaggatcctaatggtaaggaactttttctgtcattggactttgtacccaagtttcaaaagtaagtcattatgtagcggtctgacattcctacatcctccttcaaattgcttatatatcat

SEQ ID NO: 32340 - DNA, 2300 bp, Homo sapien
taaaattgtatgttgtggctaatggtataaatataatcttatattaaaatgtgtttttctacctaaaagttgattttttttctgatttttaaaagaaattaagacattttcttgggccccaaaatatgtgagctgaggcactgtgctaaccatgtctggtagataacttggtcctgacagtaataaggggatttttaaaattatattcatcaaagggggttccttgtatctcaggtagctaacaaattcttcttgtaaatatattttttaactgaaaattctgatatatattactcctccatcctgttcatgtgtttaaaattagcacgccctttatggaacagtgaatttatcccttgctgtgtttttatttgctttttctcttggctgcctgtagtatgcatgagcctattattcctagaggagccaggcaaggccctagtcaactcaagagaacatgcagcatttttgcatatgaagatatcaaggaagttcataaaaggagatatctcctgcaggtgagtcaatttagtagtactgttttatcatgtttctttattctgaaaatgtattgttttattttattttattttttattttttatttttattttttgagacagagtctcactctgtcgcccaggctggagtgcagtggcatgatctcagctcactgcaacctccgcctcccgggttcacaccattctcctgccttagcctcccaagtagctgggactataggcgcccgccaccacgccaggctaatttttttgtatttttttagtagagacggggtttccttgtgtcagccaggatggtctcgatctcctgacctcatgatccgcccgccttggcctcccaaagtgctgggattacaggcgtgagccaccgcgcccggccgaaaatgtattattttaaaattgatacatgccatggaaaccctcaataggatctgcatttttttttttttttttttgagatggagtcttgctctgtcacccaggctagagtgcagtggcacgatctaggctcactgcatgctccacctccctggttcacaccattctcctgcctcagcctcctgcatagctgggactagaggcgcctgccaccacgcccagctaatttttttctgttttttagtagagacggggtttcaccatgttagccaggatggtcttgatctcctgacctcgtgatccgcctgcctcggcctcccaaagtgctgggattacaggcgtgagccaccgtggctggccaggatctgcatttagaataatccttagatatggttatagacagactcaggtcatgtggatgcataattttgtataatgcatttctcttgtttaaacacagcctaaaatttgggtaattatctttgttatccatctttccctgtagctatccaaatcaacattttagttttcttctaatataaaaattacatccttactataattttataaaattataattataaaattataattactttttttattctgttactaaagactttagaaataaattgagcagaataagaaatatctatttattgtgtagcttaatctgcagggaattcatgactctaaaagtgttagcaaattaacttcttttttttttttttttttttttctgagacagagtctcgctctgttgcccaggctggagtgcagtggcgcgatcttggctcactgcaagccctgcctcctgggatcatgccattctcctgcctcagcctcccgagtagctgggactacaggtacccgccaccaaggccggctaattttttgtattttttagtagagacggggtttcactgtgttagccaggatggtctcgatctcctgaccttgtgatccacccgccttggcctcccaaagtgctgggattacaggcatgagccaccgcgcccggccgcagattaacttcttgaacattgtagaaatttatagtggaaaagttaatatataattttatttgtgaacttctgttttttcttaatgtttttctctctgatcatttcagcctattgctgtggaagttttctctggagatggacggaattacctccttgcttttcagaaaggaatcagaaacaaagtctatcaaaggtcttgtttattcggaacactttgtatactattatgggaagatatgggagggggaatcttttctcagttttgctggtttttaaaaatctagatcaatgagccaacatctttgaagaaaataatttatattatttttgccaccctcttgaaacaattattcttctgacttttaaaatggtgcaat

SEQ ID NO: 32341 - DNA, 2300 bp, Homo sapien
gattggacatagggaaaagtcaggctgcagtgctggtctagtgacagcctcagccaagctaagtggagctttgaggacagaataccctcttataattgacctccattaagctgaaatgtgtgagtcttcttacccctagatcgttggatgtggggcaccccgtcggccctctgcagctaaggccatccctgagggtgttgagagcagcccagacacgtgggcagcaagcccttccttgaaggggctttgggggtgggagagcatgcagatctgtgtccatcacacaagcatataattcattctgaattttttgttttagttttctgttttggtgcttttggcagaattttaaccaattatttagcattaatttcaagggtaattaactatttttttccagaaatccatgaaatattaagactctttttccatccattgttaggagatttcgcagtggatgtttactcacattgctgttgttcgtgacttagtagatacacaatataaagaatatcaggaggtaaggacttataatcatcataatggtttgttttacattttttgtatgtgaaaggtctctgtttgtcctggtatctttctgcccattttaaggtacttgctggactgcattcgtcatcagatgatggttttaattattcctgccatcagctactttggctactgattttaggatggaaaattttaatcttctgtcaacaaactgcatttcaaaaagcaactaactgaaaatgagcccagctgaattctgttgacattcactactgatatgttacatgtctttgttcctaataaaaataaaaatgtaagaatgagccttctttttcaggcttttaacaaggagattgtgaaaatacgcatccaagtctctgagaagtctcttaaaattgtaaaaaattacaagattgaatgaaattattttttactatactacaagtgcttggtgattatgtcagtgaaaaataaatttattgaaattctcttggtaaattcataattactcaaaagcttatcttaaatattttattctcagattagctattttggatctattaaaggtttctgaatggttaactgctaatattttacggatataacactagatccttagtttccccaaccaaagaacatatcagtactactgtgatagataattttttaattgttcactcagtaatctttactgtcagttatattttagaaatctttatttttagatttaaattgtatatacttatattccatgaatcattgggcaagttatttgtcactgtctactgttgaaatgttatatatttgtcatttgatagataagaacttgtactgtgtcataatttccatttaaaaaatggtttggatctatcccagtggccagaagaaaatggtttctctttgatttttgtatgaacatcaagtttcctcttagtgctgcatgtttatattcttcatctaaaatctttggaaatgtttacctagttcaccagtaatcaagcctgttggcactttttcttcatctgacttcctagaatatcccccgtacatgttgtggtagctattttacagtttggtgtatccttaaattaccatatatatttattaacgcacatagggctaaccatttcaatataattcatagtaatattaccatctttcctgtgccagagaaacaaacttctttcaactctctgtttcactatattgcacactctaccctatccatgtctgtcatttacttgatgctttaagaagtccaccttctacaacaaaacctcttactttaaccataaacaaatgtaattttacttttataatgttaactgaaatggtgtggattgtgtttgtttccaaataataacttgattttcagtgacttgtagacttgttactgttactcctgcttttgcttgaaaaccgacctggactctttcctgtcagcgtcagcagaatgccctgaagtacgtgacagaagagtggtgtcagatcgagtgcgagctgttgagggagcgggggctgtggggccctcccatcggctcccacctcgacaagtggatgctggagatgacagaagggccctgcaggatgaggaaaaagatggtgcgaaatgatatgttttataaccattacccttacgtgccagaaactgagcaagagacaaatgtggcggtgagtatgcagaattcaatgatcacaatggctctttcaagtttttattttcctctgtaagcgttttttctctatttagtcaattacctcaaatagctaattttaaaaattcaacatac

SEQ ID NO: 32342 - DNA, 2300 bp, Homo sapien
agtttcagacataggagggaaatgctgtaacttacattttatcactatgacttctattgacaataggttgaagagaaacaaaggtagtagcagagagacaagttatgaggccaatgcgataaataattcctatgagagattatggtggttttaatttgggcagtagcagtggtagtgataagaagtgatcagattcaaggtgtgtatgtgtgtgtgtgtgtgtgtgtgtgtgtgtatatatatatatatatatatatatatatatatacatatacactttttttttttgagatggagtttgcctcttgtcgcctaggctagagtgcaatggtgtgatctcggctcactgcaacctctgtctcctgggttcaagtgattctcctgcctcagcctcctgagtagctgggattataggcatgcaccaccatgcccaactgatttttgtatttttattagagacagggtttcaccatgttggccaggctggtctcaaactcctaacctcaggtgatccacctgcctcagcctcccaaagtgctgggattacaggtgtgagccatcccacccggctcaaggtatattttaaaagttgacctagcagttttgtgtgatagaatgtggaatgagtgtggaaggtgagagagttaaggactccaggtttttttcttgaacagctaggaaaatggagtcacattttctgatttggagaaaactacaaaaagagtagagttgggaggaatattgagaattctgttttagaagtttgagaagtgtattagacatcacagtagagatttcaaggccattggaaatacgaatctggagttcatttatacaggtggtgtttaaagccatgagtctacatgtattcaccaaagcatagatgtagatagggaaatggaaagttttaaagactgaaacctgggacgttccagtgttatggagttggggagatcaagaagaaccagaaaagactgagaagtagcagtcagtgagaagggagaaaaaccaggagggcttaatgttgtaagatcaaggattcactgtggaaatgacttaagtggtcacagtaagataagaagtgaggactgactatggggtttagcaaggtgaactcatcagtgagcttgacaagccattttggctgattatcagaggcaaagtccaaggggaaggatatcaagagaccaggaactgtaagtattgacaactcttacgcagagcttttgtgtgtgtgtgtgtgtgtgtgtgtgtgtgtgtgtgtatgtatgacacatatacatatctaaggaacataaacttcacataactctatagtgaacaacagaattaaagttatatttgccttgaaaatagatcttgtgtatgtgtgaatgtacaaaatgtaagattcctttatgtaggcatgttttatctataaactcttggataacttatgtttacttggatatggaataaagctaatatgttcactgatctgaaatactgtgaggcagttagtgataacaacctttaaactaccaaagaacttcattcacaaagacccctgaagctgtgtctcaagatcctctcaccatctttatctcagtaaattgtgtttaacttacctcctgtgagtttccacactttggaagtgtttgtacatttccaaaaataaatgctcccaggctggagtgtggagtgccagtggcacaatctccgttgactgcattctcgacctcctaggctcaggtgtttctcccacctctgcctcctgagtaatgcaccacaagacctggctaattttttgcattttagtagagatgggggtctcgccatgtttcccaggctggtctcaaactccgggctcaagcgattcccttgcctctatcttacaaagtgttaggattataggcatgagccaccaggctggacctaaatgctcgtttttcagtattctgataagggaggagagaaaagatatgttaccattcatgtgtttggtttcttttccaatcaaaacattgaaactgttcttatataattacattcttttcctttcctatttttcagttaggcatttcctcacatgagaatgccactcctgtgaagttgatacacaattcagcaggacatcttaatggatctgcacggacaattggggccgctctgattggatacttgggtgagtggacttatctttgttgtttcaaacttctttatttgccatcaagtttgcattcactttcctcacttaaggggcagtatttaagttcatattttaatagcactgacctatagtgtacgtgcagtattcagag

SEQ ID NO: 32343 - DNA, 2300 bp, Homo sapien
ttgctaagtttttaaatcaattagacagttgatcgtatcctagaaattgggtatagctggatatactctatactcatcacaccatgatgtctctttagaagactttgtttcaatgccaaacccagaccttttcagtatggaagctaaacccagactgtttatccataagggaagctcacctgtgagatcgtatctttgttttgtgttagtttttgatgataacttaggtgttaaatcttaggttagtagccaagtatccttggaattcttcttaggaacagcatcctacagatggaaggttgttgtttgtgtttttttctgagggatgcagaattcactttccattttgttgtgattccctttgccacaaaaagctggaatttggggttaaaagacaggtaaataatcttggatataccaatagctaatgaagttggagatgatgaataaagcaaaggaggtctatttttctggttatgatttactattactttttctcttctgaaaaagcagtgaagccccaggaccataacaacatcagggaggtgggaagaccattttgtgctaatagtagtccagtcatcttcatgcaatggttgaaagactgtatccgtgagtgggaagtgctactgttgatatgatatgcttttttaaaagaggtaactatttggggacgaaacaaacaaaaaaactcttttctactttctgcgggcttgggcactggcacttgaatcactggtgtggcaattgaacatgatctcctttgacaatcaaataaaagtcataggtcatctctctagaatatatgtatgtttacaaatttaatatgaagttttggggcttcatttacccccaagccagcattgtccaatgtaactttctgtgacaattaaaatgttttatattggctctgtctaatacagtagtcactagacacataatagctgttgagcacttcaaaagtgtctgcaactgaggaactagattttttacttcatatatttaaattaatttgtatttaagattaaatagccacatgtaggtagtggctgccagcttaggctctttcatatgccataggttataatccctataaaagaggttttgtgaatgtcattgttaggaatttaatttgtttatttcacttttgatttttgcagtcaagcagtagttaattgtatcttgcttttcagttaaattttaatagttgttatctctaaatatgtaacttctttgtaattcaggaagatttaaaggcgattttcaatatttgatcctgtttctttcataatgaaatatccagaataggtttgtcctgggattttaagcttgttcagaaaatgtgaggtgaatacctattgagtcctgtgttgtgggctctccagcgtcactttgtcctgcgttaggaacactctggttatttagagccacctttgcccaagtatcttaaaagtgcatttcccctttgggagaccgaggcgggcagatcacctgaggtcaggaggagttcaagaccagcctggccaacatagtgaaactctgtctctactaaatgtaaaaattagccaggcatggtggcgtacacctgtaatcccagctactcgggaggctgaggcaggaaaatcacttgaatttgggaggtggagattgcagtaagccaagatcaggccattgcactccagcctgggtgacaagagtgaaactgtgtctcaaaaaataaaataaaataataaaataaaaaaagtgcattttccatactcatacgttatttagcaacaagctgaaaagtttataggtgacctccataccatatgattttatatttctgtggcagtggttctcaaccccggatgcacattagaatcagttgggaaacccataaaaacactgcccaggctctagccccagagacttaatttgaacagagtgtggcttccgggcatcagagcattttttaaaaagcttcttagttgattccagtatccaaccaaggttgaaaagtcctcatgtatgagatagttagtggacctgggctacctgtgttgaggaaaatattctgaattagagattaattcataacctttttccccctctttctagctggagcccagatttcaagttttgagtaaaataccttcaagcgaatgggccctattgtgctcacacattcagaacctgttacccaaggaattccctaaaggtcagtctctgggaagaaaaattgtgggtttttgtttttaatctttactatcactggatttattgataaacaaagactgttaattatgtgtagacaggac

SEQ ID NO: 32344 - DNA, 2300 bp, Homo sapien
cagggagaccctcatctctacaaaaaatagaaaaattagacaggcatggtggcatgcacatgtagtcctaacttcttgggaggctgtgggagaaggatcactcgggcccagaagttcaaggctgcagtgaaccgtgatcgtgccactacaccccagcctgggcaacagggcaagaccctgtctctaaaaaaagaaataaataaataaattaagaacaactgatgtaaacttttaaaattgcaaagttgagcagtggaatttaagaatctcttcaaagcagagaatccaactaatattgaaatatactgtcatttactttttcaaaaacagattatgcaagagtagaacattgtattttctaacttatccctcctttttggaggtgatacaaattttttgaaacatttttttttttctttacaaaaattgttttctctttgttgcccaggctggtctctaactcctggcctcaagtgatcccccagccttggcctcccaaagtgctggaatgacaggcatgacccactgtgacccaccaaaagcatacatatatttcagatgaatccattttaactcatggaaagaaactagcagtagaaacctctttctagcagcttgagatagaatggttcaaagtattaacatactttactattgctcaaatatcataggaagagttctcaattctaatgcaatatatatttttaaacataaaaacataccaacctaattcctatacttaagagtctcatgataaagttttattttttttaaagtcggatttttttactagacttatgcactaatacaacatgtttttctataaattagcacatttttagttctgttttatgttatgtttgttacgtcgcctgatagtcgaaaccagttgttctcaacctgctaccaaataccaacctggaaatatgccactatttaaaaagcccgaagaatagggttttgtttttcctttttaattgtttggtgttcaaactacatagtaaaccagttggcaaccattactgaacaaaaatagtttttcgtatgcatgagcaccattttccaacagaaaacacttaaccatttttaaggtactggaagtccatgcaagggttcacatatgcagtaaatatcctttcaatctggttgtatcacattgtttctgtgaaaggaagacctgatattgcagatctcacaattaaatggtaaaaatcaatgaaaaactgcacctgaggctcaaacactagccagatggcctttggttggaaaggtctcatctgcttcttaaatcccgccgtaactgtgaatgtttgcgatgccaccacatccccagtacaagagaactggagcatctctggctccttccataatcgaagggcttccagcgtagggcgtagggggagaggcccgaagccctggagacagcgcccgagggatggaggccgcgctcggctgcgctcaggtccgggtggctccgggagctgagaccccgcaggatgcagcgggggggggccagggcctgatcccctacccctgcgagccagggccgcctacgcccccactgcttcccacaggtaacgtccagccctctcctcccctatcccccgaaatatcccggttccgctccgctccgctcgccgcccgtgaccccgaccccgacccgtccgcgacggcgccctccccaggaggcagcggaggactagggccaggccgcccaccctggcggcggcggcggctcccggccaaggcggaccctggggaggacagcagctgggccgcggcctgtccctagggggagcgggcgcagggccgcgagtgggcagcgcctccgccccgcacgaacaaagcggccaggcgcgccgggccgaggcagcaccgcctctccgggagcgcggggggcggggaggatggcgggggtactcacctgagggccggcggagggcgcgggcgggacaggcccaggagacgggaccgcggcgggccggggctccgcgccgagggcgcacgggctacggggaaggggcgaccggcgcgacgtccgcggcggggcccgggagccccgcgccgcgggccgggggccggggcccgagctcgattctgcggccgcgaggtatgggaaccggtccgccgggccaggcagcggtgctaggcagcaggggcagcgacgccgccgcctttcccttctcctgcccccgtccctgctccgccgcgtcctcgtcctcgctgggtccccgccgccgccgcctcagcctcggcgctcctcgggtttcttctctccatcaaggccgggccgacccgca

SEQ ID NO: 32345 - DNA, 2300 bp, Homo sapien
ttttttctccaattattatacatacagttttataagtgaatatttaagagtcaagaattttgtggtattttgcctagaaatagactggaagaacacaaaatctaaataaagaataaacaccaaaaggccaaagggaaagaacaaaaaaagtacatgtacatgcatatgcacacacacacccccacataggtgctttgtttttaataatttatttcaaaacgtattgtacaatgctgtctcaaatactttatttgggtttaaaagagttgtagatgttagtataggttgttgatttcaaatggaaaaattattggcattgaaagatggcaactgaaatcttgaacctaacagttaattaaggttacttcgtgaggattaaatattagaattctgctccgccccccaccaaaggataccggtatttttactaaaatatatttttaggtttgttttggcatattcttttcaaagagatttgaaactcttaaattgttataattacaaaatcttatatttgaactttcaaaacattactcattttgaagtagaatctaaaactacatttaaaaacatttctgcccacatttggtctgtttaagggactaacctttgaacacactagtcttattttgaaagggcaaggtgttttttttttttaatagccagtgccccacagaagaaaaactgtgacaccccccccccacaaagtgctcatatatatcacctgtgtttgttagcaatgttacctccaactttgttatcttggagtaattgacgagtaaatcattacaaatgggtccaactctaaaggcaaaatcgtcaaaaagaagaaaacagcaaatccaacttgccttatgtttattagaggaaatcctgaaacttctgtagattgcagtgttaggaaaaacaagtttgtgattacagcgatgttatgaccacttccccactctaactctgttgtttaagggagtccactcctaactgctgactcagtttgtctttactgccagaactgaagcgtgacccaaattgtctgctgggttgagtaggaacaaacgggcaaaatgatgatcacttggcagttctaggtttactaaaggatacttatttggtctaaacactgtttgtgggactgcaaaggtataaataatgcccctcccaggaaggaaaaggaaaatctaaaatcttaggcaaccgactcaaggtcactgacggaaggcaccatttgagaccgagctcctcaactacagtcccatcacggacgggagccacacaggagagcgtgcaggagtttcgaagctgcgtagtacaatagctggcgtgggcagttcttttatactctggctagagtaaaattaacgcacctttgcgtttctccatcgcctctgacagcatccagctaaagggtgtagggttaaggaaagcggaacccagttgtcctttctcagctgagtcctttcagaaactgggactgaggagggtgagcgccgcggagaggggcaggggtgggagaggagagaggggcgcggggcggggaagaggcgcgtctggaaggcagtggggagagggactgagaggagtggggttgaagtccagctgggagcatccagcggcgctgtctgcagacaggggcgaaggcagccgctgagagtgaggcaagagcgggaagccgagggaagggaaggaagtaaggaaagaggaaggaaaggcaggagggggtagaagctgagcggctgcaatttctgcggccggctcagtaggaggagcaggaggggaaagaggaggatccagtcagtcagtcagacagccagcgggaggtggagaaagcaggaggaggaggaggattaaagatggccaccaacagctgcgggaaacggcaacaacccctcactttccgggatggtccctgcgggtcggcccggccttgatggagagaagaaacccgaggagcgccgaggctgaggcggcggcggcggggacccagcgaggacgaggacgcggcggagcagggacgggggcaggagaagggaaaggcggcggcgtcgctgcccctgctgcctagcaccgctgcctggcccggcggaccggttcccatacctcgcggccgcagaatcgagctcgggccccggcccccggcccgcggcgcggggctcccgggccccgccgcggacgtcgcgccggtcgccccttccccgtagcccgtgcgccctcggcgcggagccccggcccgccgcggtcccgtctcctgggcctgtcccgcccgcgccctccgccggccctcaggtgagtacccccgccat

SEQ ID NO: 32346 - DNA, 2300 bp, Homo sapien
ccagaaaacaacgcagtttctagttcaggttatattctcttggaacagactccttgctgaggggcttctagaaaaggaatgcaatggtccacctctttctaagtaggaggggaagaaggggcttgtattggtggatataactcctttcctatcctctcaactgtctaatccccaagtgacaaccatcctctccttctgttgtactttctagcttaagataatcacatatatcacacacaccaatgaagtgctatcagttggaaagggtggagacagaaccagaagatgggaaggaaaaggccttgaacacagcctgtgtgtgtattagaggtgtgtcttaatcttttggactagggactacccagtaaccaccctgagttcagttttgtatcactttgagactaaactgctgtggtaatatttgttagaccctgaaataaattactgacatgacagtttccttgtttttttaaatgtccccatcttgaatcataattattggtacttgtcttcctgaggcttttgagtccatcaaatgtgtgcaaatttcatttgggttaatgttattttccagctttcatctgaaactgcccatcagcattcacctgctagggtgttgctagaacatgtaaggccatgtgggttgatgaaggtaatttattcccaccaattggaaaataagctacattacttctagcttaggaattccatacatatttttaaaatgaaatatgaaacgcaattttttccccacacaaattaatttgattcattaaagggctgagaattctcccaccagaaaatcaagtttatagtaggacctcagcatgggatggggtagattcgtttctccaagaacttggagaaagaggacaaaaaggaaaaacatatcagtgtccactcagccttttatttttggtgtttctaaaactaaacatttgctcttcttccatatccctctctcactggagatccctagtgaggacacccccattctgtgtcttaaggatatctggtgatgatttctaaaagagagtttcttttattagtagtagcagtagtaattgttcgagacgggggtgtcactccgtcacctaggctggagtgcgctggcacaattatagctcactgcagccttgacctcctgggctcaagggattttcccgcttcagcctcctgagtagctgggactacagacatacgccgccacgcccaactttttttttatttttttaattttttttttatagagacaggagtctcattatgttgccaattttggtctgaaacccctgggctcaagcgatcctcctgcctcagccttccaaagtgctaggattgcatgactgatccactgtaagtgggtttctaaaacagagatctttacaaagctttttgaaataatttgactcagcatgccaggtaaccagaactgtaagatcacaatttgaaacagacattgtggtgatggtgggaagagacggcctgcatcaaaacaatgtttactagtttgtccttttgtcccatattgtgtaactccgagagttcttacaccaccgtaagaaagtaattatactttgaatttctctaaggctctagttagagagcatccatctaaatgtgcatttccaggaatattgctttaatggcccaggtaattctaattggagaaataaaatgttagcgagacagagttggtagaagcaagtaaaaccggtgtatggggtttggccaatgaaatgcagagctccttgagggcaggagacatgtattcaccaaccttctcgcgcccacagccccagatctgtggccaacaagtatctatgatgcacttgaaaggaacgagcgatgccagatgcggaggaaccaggcagggcgcattctgtcagtggcgccaggcggtgtagctccagctctcagataacccaggctttgggagggcggggctcctgccggcctcccctgtagtgcggctcgagtcctgtgaagctaccagttgccaaatgaaatctgaaacctcgagctgtgtctgagggttggccccactcagttgttccagcctcttgtactgtatatttacacattcacacacaatcaccctttctaacttctgggactctttgcgcaactgctaggatttctcaagtgcatgtggcaacacagcccagctccgggtggaaaccagcagggctctggaggggctcggagaccaggggagctgtcaaggctgcggcggggaccagagaggagcctggcgggggtggctgggtggctgggggaatccccccaacttcccatcg

SEQ ID NO: 32347 - DNA, 2300 bp, Homo sapien
tatggctcagcccactcctgttctaaacaatctgtgacttctcttcactctttccttccttcctgcagccatttaaccctctgaatcaccttgactcattccatgtaaaactctatgtctcctcaaggcctattaccttacaaggtcttactcatatttccttcctgctctttctaatggactaaaggtaaaactgtcaatatcgaaagtaaagcttaagaagtaaaaggaaaatacagaatatttttagcaaatgcaagtaatatgtatcaatgtgtccaactcttgtcacatttgacatattaatgttgcttaacctttgcatagggctcaaacagacataatcaaatgagaataaaaggaaaataagatgctgtcattgtgtcaaaaaccatggttttccaaaatttctttctcaacatttctgttttgaatctcagttgcttatttgtcagcattagaaaagtgctatcatacccattaatttctcaacattttggaaaatgtgttccagaaaatctaattgtcattttaaatattaattacattttataattatttggtcataagcatactgcttcctgccaaagaacagggcaagagtagatgccttaaaagtagacgagaaatattaaaaccaaacagtgcatttctgaattaaagaataggtaacagtttgaaaataggccttgaatgatctgagcatttctcattgtgtcttggaattgcaaagtgtaaagaagattttgctttaaaatttaaggagccagatcaaatggaaagattaatagtggccagagtgatttcagtgtgggccacttcatattttggtttacttgatctgggcaggatgttttaagattggagcaacccaatcgataggatataaagaaatcaaggacacatgtttgaagtgtgagaatgaatacagaagtagtcatagagaattgaccttacttcccatgcaaaccctttgattttatttgaaaattccctacttttctaaggaagctattgcttgtctgttacactatttcacgtgggagggatgagatagatcttatgaatgttcgataaatatttgttaaataagtgaatgaatgaatgaatacatttcaaaaaggtaattttaaaaattattataataagcacatcactctttcagttagaaaaacataatttattcaccaataaataggaaatacatgaaagacaccaatgaaaattgttatgttgcttctctgttttatttaacaaattatacaatcaacaataatcaaaaccaaatgtgtgtattcaaaaaatcttgatagattgaaagtggggatttgtgataatagcaaatgtgtgtctagtttaagagccgtggagtagtatcactgatactaggtagaacacttattctgccacctgtcacagcaccatgccttactgaagcagtactctgtaaggactaataaatgttagcatcccttgaaacatggcagctcctgagttgtaaaaatattctggacaatcagcaaaggaaaagattatttcctaatatacaaagaaattggagattaaagggaaagtttcaatattaaggattttaaatccaaaggaaatgttttctctgagacagttctcacatcctaattgtgttactgctccctgccaattcctttgcttattatgcaaggatatagaggaaaaggcaaactatttcccctcaggtatgttagtgtagtggaaaaagcattgaagcaggagttgtgaaacctggttatttgttaactgtggcactaactagccgtgtgagtgaccttatacaaatcatatttttctctgggtttcacttcccttatctacaaaatgggttcacccggctaaattatatttaaggtcctgatgagctttctatgattcctatttcttattttgttttgttttgtttctaaatgctcaaatactacattatttaaggtatatttccttgtaggttttttttcccctctctgtctctttcttcaatatatgggatgggaggatactgactaagtctgagaaggaggagaaagaaaattagctacaggaagagtttatatccccttctacaagaaaacttaaatatagctaccaccgctttgaaaggaatggtttgtgtccaaacagcattttccagacaagctctgtacttttttgccaaaagaattaactttaaactgaaggcagtggacagttaaacaagagtcggcactgggaacagctgtgcgtagaccagaccagtgacttataaggtactgtttttactcatttaa

SEQ ID NO: 32348 - DNA, 2300 bp, Homo sapien
ctgaatgtcaaacatttatttagctttgggaaggtttcgttttccttccttccttccttccttcccttcttcctccctcccaacctcccttcctccatccctccctcgcactctcctttcctttcttccttcctccctcctccttccctcctttcctcccgtccttccttgtgtatttttatactgggtttctgttcaattgtttttgaggcaatatttatggaagtgtctagtccggaatctgagatctgaggagagtgaaaattcattaatagtttttttgttttgttttgttttgttttggagacggagtctccttctgttgtccaggctggagtgcaatggcgcattctcggctcactgcaacctctgcctccctggttccagtgattctcctgcctcagcctccccagtagctgatattacagtcgcctgccaccacatccacctaaattttttttgtatttttagtagagatggggtttcaccatgttggccaggctggtctcaaactcctgacctcaggtgatccacccgcctcagcctcccaaagtgctgggattataggtgtgagccattgtgcccagcccaatagttcttgtagctctgattgcttagcctaatgttagctactgccaaaatcaggtctttcctgtatatttctgcctcctaatgaaaagagttgattcagagacccagcaaggcagtaagaatactatttgtgaataatccttacaatgagtaattggtatgcaggcagacagaggttaattaagaggcaacgtggtcaggcaacgtgcacagaccaagtgcacaatcttggatatgtagttttacttcccttgcctttggttttactcacttgtgaaataagaaaattagaagaaaaaaatgctttcacttcctgtgaaaatcctgtgattacaggagttccctgtagatcagtgttcaggtcagtggatttttctattggctgaagtgcttgaagggcagcactgtctctgtcttcgtggtgctgagttacactttgtggttctttattttcttagcagcgtgctgtgacacagaaggtaaaataccatttgaaccacagggcagaactaaataataataatcctttcaatgacaaaagattacctacatgggcatgctagtcagagtaatgatgtttttaatggaaagacctttttaatactcctcatggtcttgtaaagcttctgccaaatggctgggaaggaacacagaggccttgggggtcagttggggttaaggcactagcattccaaatcagttcatggaacaaccaggtggatgaatgattaacccagcaagtaaattgttcagtgagtaggactgagagacttagtggacatgggggctggggtgcagaaagtacgggcaagagcatggaagaatgttgaaaacagaattggtttgcaaaccatgcctagagaaacatatatgtgtgtgtaaatacacatacaaatatgtgttgatgtgtttgcagctttacccacagactctttgccactggattttaaacatttttctgttttacagacacacacatacacatgtataaatatgttttcagggtatgcatgttaaatcagtgctcacaaatgaattcaattacaaatcatttgaaagaaagtaaaacttgtatgggaggggaataaatgcaggtatgaaggggcaaaaagtttaccccctgggggttggtttggtgccctgtgatttctggaggggctgagccagccagctgtaaaagtgctacacaagacaagagctgggaagtcaacacaaagtcaaaagaaaaagaaaggagtttgtaccgtagcgtggcattctccctcctcccctcatcctgttgtgactgcacctgctgaatgtgaccggcgggcactggaagcagccgcagccacagccttggtgaggagcaaccgcagccctgccagctccctcccagttctcattgagaaaaggggagacggagcaggaggagggggaggagatgctccctgcaaagctgcctccccccacagatccaaagagcctcttggaatgggcactcgactgttctgacgttgtgattctctcgggagtttgaagacagaaaggaaaggggagaaacctgcagagagcatcaaaggatggggggtgctataaaagaagcaggggggtcctttgaaagaaatctatcatgcactgaaatgctttctggagaaggtgccattattttcctcccctcttgctcagatgaaaggagccagcaaggacagtcctgaaatattcctcag

SEQ ID NO: 32349 - DNA, 2300 bp, Homo sapien
ttaacttatttgtagcagtaatcatttgccttatttagagctctgtaggcaagggggacctcatcagtgctactgcaaaatggctatgttgattgagtcaatggaaataacatttcacttgatactggcttttaattttttcccttatccttactgttaggatttaaaaccaagtaacattgtagtcaagtctgattgcacattgaaaatcctggactttggactggccaggacagcaggcacaagcttcatgatgactccatatgtggtgacacgttattacagagcccctgaggtcatcctggggatgggctacaaggagaacggtagggatgcttcgggagagcagcatcaaaaccatgaatgaaacgggtgcacgttgtagatagccaaggggaatgttctcttttatgtacatgcttttataaagtagggctgccagatagcatattcagggttttttttaatactactggtaagaaacactcattaaaaatgtgaaggatgttattgagaagtcagttttgctagaagagcactaaatgttaatagtgaaaaagaattgtaaatggagtctgattaaacagtcaagcggatgctgattagcacacgtgcctagatattgagaaaaattgctatttgggttgcagctcagctgagcatgagtgtgaaagcagaaaggaatctaccacagttagccatgtggcttttatgttgtatctcagactgatggctgtagttctagaaaaagacaagcaaaaaagtgacacaaatccttagagtgaaaatcttcatagacaactttgaaataatccaaattatttaaactgaataagaatttctgtaataatttaagctgctctgtaagaaacatttagagtagcaattgcctaataaatccttatatattccaaaaatcgtaaaaaaggaaaatgtcaaatttgacactactgctttcataaagaaaacttaatgttcatgaacactttaaaatgaaggctatggaaggaatcttaaaaatgtatcacaattgagtgtagttgattaaaactaaggatttattaaatatgttagaaagcattgcaatgtattattttgatgagactatatcttacaagtaatgcaccatattgaaaacatattcaatatacttaggaattaaaatagttttaaattaggattgtatatgtattcagtgtatctttaatatttatttttatattctattctatttagtttttagcagtctgtattaataagttttataaaaataatcagtgtatttttatgtacaggtgctacagggtacttttgtgaaaattccctggccactgaagtttacagaaacttctttgtatactcttagattagaagacagataatgtatgtatgcatttatacagaggaagttaaaaagtcacctcttacaaaggtcaggttcaccctggtgggcaatatcggagttctggtaccttttgactcagaagagatgaatctagccctccttgctaggcaataccacatctaatttattcagaaaagaagacatttttatactttcttcacgagttatttttaaaaagtcaaaggagaaacaaagtcaagaatcaagaatgtacaggagactggggggtggggcggtctgaatttgcctatttgggctttcagatcttggcactaccaatagctggtattaaaatccctttcccttccctcactagaaggaattgcaagttgctgccttaggtttttgacttctctaagtccatggaggaggcctgcctagcaccctggtgctgccctcccaccaatgggaggaaggttatcatgcagaaaaacctgcttgctcccacatcaggcatgccctgctgtcccctgcacctagccccgccttccttccccatggaacaattcggccaaatgattctgcccaaaagttccctttgtccataatgaaaagcaagttggaaaggggtaaagattggtaagagaaggcaaagcatgttttcctaacaagtttgacaatttggaaataaatatatgtacataacaatttttaacacctttaatacttttttcactttccttccagatgactcctttatacatgtgctaattcatcatatgtcttttttcttgaaatatttcaaatggaaactaaaactgatgtttatttacaagaataaacttctgaaggaaaagctaagtcccaaataccaggaattccaattcttttgcctctaaaccatggttccagtcatttcctggtttattggatttggttgaatttatcttgtttt

SEQ ID NO: 32350 - DNA, 2300 bp, Homo sapien
accgggtatatacccaaaggaatataaatcattctgttgtaaagatacttgcatgcatatgtccattgcagcgctatgcacgatagcaaagacatggaatcaacccaaatgcccatcaatgatagactggataaagaaaatgtggtacatatgcatcatgaaatactatgcagtcataaaaaggaatgacatcttgtcctttgcagggacatggatggaactggaagccattattcttaacaaactaatgcaggaacagaaaaccaaacactgcatgttctcacttataagtgggagctgaacaatgagaagacatggacacagggacgggaaccagacacattggggcccgttggggccaggaagcagaggagggagagcatcaggaaaaatagctaatgcatgctgggcttaatacttaggtgatgggttgatagatgcagcaaaccaccatgtcccacatttaccaatgtaacaaacctgcacattctgcacatgtacccaggaactttaaataaaataaatttttttaaaaagtgaaaaagaatagtgtggaatgtcattattaaagagttccaggacagacttagctgtataaacaatgtcagaacaggattgttgaatgaatgagcaaaggaatgaatgagagagttactagctctaccctaatcttcagtaacactctatacccagagtagcaatgtttatttagcacaaggtccacattttcagagcatattgacacactggagtttattcagaggaaactgaccagatagtaacgggacttgaaaccacatctgacaagtgatggtaggggactggtaatatttaatttaagaaagtaaagacttaggggaaaaatgctaaaagctaagagttaagagtgttgactctaggccacgcattgtgtgcagccttttaatagatttcatatattatggttaataatggaaaggaaacattttattttgagttgccctggaaggcaggactaacagtcgtcagtggaaactgcagaaagataactctgtttattagaatgatggcatttctattctcaaagctgccgaacaatagaaagagctgcttagatataatgatttccatgtttttggaggtgggcaaacagagactggtgaaacttttcatggacatattttagagaggaatgagtattaaatgaaagtatggaccaggtgaactctaagacttttttcaaccttattctgtgaatctatcattttcttacagtacagaaattccattttttgcccctagttctgtggcatgaggcttcaatggtcaatgttacttctaatttagtagatcagttgtagtggattctggttttgcatttcctcctgacaactaagacaaaacccagcaggactcaaagtttcagggatgggtcacatattttgtgagtgcatcattaggtataatggcaaaaagagcctctctcactttctcatttgatctctaaactcatgtactctgcatatgagagaaatagcaccaaatatttagatagctttttcaaagcattgtaaattttcaatctcggtgtgaaagcttcacatgtgaatagcatttatttttgtctttgtatttaaatgcagttatttatgtttctaaaactctctgattgcatttcttattttgagctttgttattgttaatgagagtacactttgatcatcagcccaccagtgcttttatggcaattaacatcacatcttaaaaattggttcttagttgggtgacatagtatgtggctgtagtcacagctactaaagagactgaggcaggaagataccttgagctcaggagttcaagactagcctggggaacatagcaagactctgtttctaaaaaacaataacaaacaaaacacctggttcttgtgaatgggtatagaaaatgttcatttaaaacaaacaaagaacaatgaaattttatagctataaaaattaaatatcatatattaacagatgagaaattcaagctcagagagattaaatgacttgccatagtcacatggctagtgggaaatttgaatgcctgtcttacttctttattccacccactcactgaggcaattatatgctatattcttggcaagatctttttcttctcctttgccctcttctactccttccccccttctcctgtttctccttcttcccttcctccaactcttcttcatcctcctagcatgtagaatattcttatgccagtcactcatatctttacttaaagcctgattggcatgtgaccagagtagacagtatctaaga

SEQ ID NO: 32351 - DNA, 2300 bp, Homo sapien
cttatttgggaagcaaggtcttgtggagatgtgaggttttcttccaaagcaataattcatgtcattctctagattcctggttaagaggaggagtggaagcagagtccccaatgaactccaggttccactcccccgttcacagcataatagagtagccatggcaacagtaagtgcatagttccagctctatgatttcctatctcagctttgattgtatgttctggaaatctgatggttctaggatactctcagaggtgggagctccctggtgattcagctcttgggtgtctgggagtcattcaaggtagcccagagtacagcccacttctccaggccttcctgtaactgcaggcacccatttacagcatttaatctctgctgcttaaaatgcttctgtcttctgccatgaaccttggctgacactacaatctttcccattttctgtaattcctcagtgattactggcagaagtttagcaaatacatctgcaaattggcatcattgatgcggtacagtcacagattcatgtctgaaagttttctattactcttgagtcatctatttttccaagaatcttggcctgtggaatcttactttttttctttcagtatttttttctttctgctatctttatgcaggtaaaaatggagataggtctttatgaagatttttccaacaattctccagccacactgctgaagattttccagcaacttcttggcatacagtactaacacacctccacttctaccaggtttattcctaaaagagtgatagagctttctgctgttatgctcctgtcatttaattcagcttgatgatgctataaagctatgtttacctccttgtatgtatttatataaatacacatacacacacacacacacacacacacacacacacacacatctctgaaggcaaatcttgttctcaatatatttatcaggtatttttttcttctgacaattgcagataacctcttacacaaatgttcttcttcctaagtcataatcatttatttgacaatttttcttgttcctctttccctttacatttaaaatgtttgtaatcatattaaatatttgtgggggaaatccctaagcattactggagcatcttaaacatcttaaatcatagcctggcaaaccaaattctttaataagaatcatgtttttgaacctgccaaattcacttctgccttaggattctgcaattgttccccctaacaggaatgctcttcttgcatcctcacttggctaaccccatttgtgattcagatttcagcccaaatattatctcctcagagaggctttttttagtttttctatcaaaagtcaacagttgatttttttggttaattattttgtcattgaatggtttggctgtacaagtttggttatatttgttgagaatactttcaattacaagtaacagaattctgaataataataacttaagtaataaagatattcattatatcatataacaaagtataaaagtaggcttatcaaagtttcagagatgcacagtgatttttgagggccctacgcacttttgccttcgattttctgcaaatttgttctcagcatgttgggaataaaaagccaatagggccgggcgatgtggctcacgcctgtaatcccagcactttgggaggccgaggcggatcacgaggtcaggagtttgagatcagcctggccaacatggtgaaacaccgtctctactaaaaatacaaaaattagccaggcgtggtagcacgcacctgtaatcccagctactcagaggctgaggcaggagaattgctggaatccggcaggcagaggttgcagtgagccactgcattccagcctgggtgacagagcaagactccatcacaaaaaaaaaaaaaaaaaaaaagccaataataggagaactctattaatgtatccaagggcaatggtgtaggtgctgtgatgcaagaagattccctgtcaggaataaagggcttattatgtcagatgctaggtgtgctgccagcagacagcctctcagctcttagccccctttgaggatgacctcagctgacaaaagctgcctaacctagcctacacactcttcataggtagccttcattcaatgactgatgaacatgtggttataaaagcctggccacttcaccccaattcaggacagctggtaaggctcattacctcttcagaactcccaatagggtcagcagaggcttctattgagattgtattgcagctgaacttgtctctattttctttttccacaggtgttggcccccaaaatacttccta

SEQ ID NO: 32352 - DNA, 2300 bp, Homo sapien
ttggagcccatcttttcagaaacctgtacgtgtttgcagagtgaagttgtaaggttttgactcaagatttttcagtttgagtacattttatcctcatgaaccgatcaaggcaaagaaggggaaaatacaaaacctgtgttttgcatatcttttgttttctgtatttaatagggagaagctgtatttcttattgtgaatcttggtagaaactcttaagaggagacatcaggtaatattgaaaatcactaaatataaacattttaggtttaaaaagtagacctcacacatatactatttctggtaaaggattttctagtttatttgatgttttggatccatatcaagccactatggcttttcttacagttcttatctctggtgactatgagatgtaaaatccttgaggcttatggaaataatgctagtaggaatggaaattgaagttttcaatggaaaaagaaatgaatacagtctcctgagaagcatccctaaccacagctgctctaaaaccctgcatggtgtgcaggtttaaggcaaagcttccctataaggcaattgggcatttgcagtgacctgcacagtaataaacaggattttcactaccttgtgtttgtacacgtgtgtgtgtgtgtgtgtgtgtgtgtgtgaagaaaaacaaaaacaaaaacagcagtgactttaaagttctagaaattcatcttagtgacttgtcttcatagaaataaaactgactcctgtttgtctgtgttaacctgcctgggtgccctatgtgctttctgaaaatggattgcttaaagcaattgtcctcttcttatacattggaaataggatctgaaagcattgatagtgaaggaaagctcttaggttaggtctgtttatttggcaatgtttattcagtgtttgtaggcggaagctccagcacagcatttatataatatagtaattgcctattcttctattacctgtattctctactaaggtttaatccccatcagggactgactttttctgtttggcacacaatagggacacaccaaatattcattgaatgaatatctctcatgtactgagttctctgctaagtgctatggtagaaaaaattgggaaactgtaacacagtttctgccatttggaacctatactcatttgggaagatgaggctaaataacaataaagatggtataaaatcaagggcccatattagtgttttgataatgagtgcaatagaaattcagaggagaaaggaatttacctcctctgaagtgatggtaggtgacaatggggctacactggggtgttggggtgaggtggtgggatagtgagagggtggtagtcctaggagtaattgtgagcacctgggcaggaaagaaactcttacttggggtaaagaggaggcctattttgggtatgatgaccatattttccaaactagaaataaaaacttatggtttgacattgggtagaatgttgcagactgccacatattctgaagaatcttgtctaatataatgttgggaagtaacaggctataatggtgaaaaagtaggttagtaactagaagaacataaatacaggtctcttcagatgagctccagcttaggtttactttcttttgcatacttcagaggttttcaaaattctcctcctttattggtacctatgtaaccattgttccaatgaaatcttgtatgaaaagcagaatatgtaaatctatgtaatagtggagctgtcccagttgaggatgagtggggtgccttgtattagaaaaccaaattcatatcacaagactaattatattaactgaaataagaattactaatttagtttatgctcagatattaaaatagttgttctggtattataacatcaaagttcttgtgcttgcaataaatgatgaatagagataattaccttgagatattttctttcctctgcctacactcacccacccagtaaccaactgtctttgatgtcagctttttggttttctaaatacaaatttaaatcttaaaatcaaactcatctgttttttggctttgctttcaggctagtgtgagaaacaccaacagcaggcccatctcagatcttcactatggcaacttatgcaagaaactgttgaattagacccgtttcctatagatgagaaaccatacaagctgtggtgagttgccaatttaaaaatattccttagcatgaaaactaggatctatatagccaatttaaatattgcatatggttttgtacatggagctggagaaatactgctccaaataatttcgactacagaagtgaaaatcaat

SEQ ID NO: 32353 - DNA, 2300 bp, Homo sapien
aatttgagaagtccaaaggctggagttggtttaagcgaaatttgtattgaaaatttttcttacataaaaaaggtaaaacaaatttggtaaacctaatttttttttatagtgcaagtagtcaactgttgtcattctaagaaactattatttatggatagtaaaactgtttggagactttaaaaataccctataacagttaaaggcagagcaaattactgaaataaaattgcgatatttgccccaaatagtaacagtacaattttcatcagttctctagaaaattatctgcaattaaaaaaaaaagaattctgatgtgttaactcaaattaatcagtattttctttgtacactcagattgcaacctaagtattagtctgttgaatttggtttagtggatatttattcaggatttttacaaaaacaaggaaacagagaagaggaatagtgctgtgcagatgacctcggggttcaggcgacactcaaatgcctgcttctcctctgaggttattaccatctcttacttgtttgacgtttagagatactacaagagatagttgaaaagcagaggttgcatttccagtggtgttttgctctgctggtatttgctcctccgtgctgctgtgcaaagggccagaactgcatcgaatggatcttttcttcaggttgtgcaggctggctgccttgatgtcgtagttgctgatgttggctgccgacgaaccttattcctttacatttgcctggtcctcatttcaccggaaaacacagtagctgtagctgcacatagacgcttcctctttctgtttccccctcatccccctccctagacctctctgggctttgacgtcatgtgtgctcctttcggttgccatagcaaccccattccccaagccctctgtccgtctcctctggtaggttccacaatggtacaggcagcatcacgctgcacaatggtttccaggcagtgaaagagggtgattcagcaagccactcttcttctattttctttaacctccccttcactttttatttttatgggggtgggtggtgcttgctatatgcttacctttttcttttcttttttcatttttacaaatttccttttttgtcctcacccctcaattcctaggggcttgagtgagtttaagattgggttttcttggaaatcacctgtccatcgttaattttaaacaatctccatatctccaaagaatctcttccatgttagtctggaatgtggttaatgaaaaacaagtagggaggatttctggggcaaacactgccggatcaggatcgtagttctcaggcacggaatggtaggtggctctttgctcgttctgggttctaacctgtttttggagggtggggtgatgtctattgattgctcctggtggggcgggagagggagtatggaagagacgagagaggtggggtggaaagcaggttaatcaagtgaactagctttgaagcaagaagctaccagtttttccctctgtgcagaacatctctttccagacttgggcgtgttgaaacctttccatttggagtgaggggtagcagagggagggagggagcattcttattgtgaccaggggtttttagaccaatgcagggctacagaagggaagggagagagagagaaacacacacacacacacacacacacacacacacacacacacacagagagagagagagagagagagagaggaaaaaaaaaacaccaaacagctgtgcttgttagaagtgctgaccttagttccatatctgaaaaatgtgatgggttccataaaacattaaaaataatgtcttttagtatgtatttatgtttacttttgtgagaagtataatttaaatattttaagatgtattttactaaggaacagtatttatatatatattagatataaaactattggcgttactcttgcagagcaactctaggctaaatctgagccggggagaggaacacagaacaggggtcaggttagagataagaggaaacattggcactgcagtcaaataggtaaggggtccctttaagaaagtgatctcctagtcacagcagtcagctttctttttttcatggcaagattcccaggtattctgtgctgggatactgtgtcccctgcaaatgtcagagctcttttgaaaaaaaaatcagaaataagtatggcagtatatttgttagaatctatgtatttgtgccttcaacaaaataaatgtaatttactggaaaatctgtaagtaaatcaggctatagatattacaagaaaactatctatccatatatttttctcacc

SEQ ID NO: 32354 - DNA, 2300 bp, Homo sapien
ataattgtatatatttatggggtataatgtgatgttttgatacatgtatacattgtagaatgatcaaatcaggctcattatctgtcacctcaaatatttatcatttctttgtagtaagaacttttgaaatcctctcttttagctattttgaaataggcaacattattattaactatagtcactgtgctgtgcaatagtacaccagagcttatttctcctttctaactgaaactttgtacctattaaccaatgtcccccctttccctgtccacctttccgtcctccagccactggtaaccaccattctactttctagttttacaagtttgtcctttttaaaatttcacatataagtgagattatatggtatttgtctcactgtgcctggcttatttcacttagcataatgtcctctaggttcatctatgttgttgcaaatgacagaatttcctgttcttataagtctgaatagtattccagcatgtgtgtgtgtgtgtgtatgtgtgtttgtgtgtggtatgcataatatatatacattcatctgttgatggacacttaagttgtttccatggctattagaatagtgctgcaataaatatgggaatgcagacatctcttcgacaaactgatttaatttccatgggattggggaactgacttttgatgtccaaacttagtatataatacctcaaaagccagaatgccaattattttgtgttataaagttgtttggctatcaatccatatttttgcatgaggtagttatcttgcaggtaggcccattgagaagactagaagatagtcttgattgattcttgttgaaattgaaattagagtaaagggacatccaaacacttatccaatgaactacaatgacatacaactcactcaagccttcctttttctaaattttctccccaaataaaacaacagcagcaacaacaaagacaacaaaaacgtatgcgtttcttacagctttatgatgtgtttcagtgtctacagtactgctgagtttgcatctcttgcatgttgtatctttctggtaacatatggaagaagcttcatattcatataagtatgctagttctaaaacataatgtggaatcatttacaactcagcactacttggtagcaataaacagaaacccacctcaaaagagtgtaagcaaaaaaggaattgaattagattacgtaatttgagaagtccaaaggctggagttggtttaagcgaaatttgtattgaaaatttttcttacataaaaaaggtaaaacaaatttggtaaacctaatttttttttatagtgcaagtagtcaactgttgtcattctaagaaactattatttatggatagtaaaactgtttggagactttaaaaataccctataacagttaaaggcagagcaaattactgaaataaaattgcgatatttgccccaaatagtaacagtacaattttcatcagttctctagaaaattatctgcaattaaaaaaaaaagaattctgatgtgttaactcaaattaatcagtattttctttgtacactcagattgcaacctaagtattagtctgttgaatttggtttagtggatatttattcaggatttttacaaaaacaaggaaacagagaagaggaatagtgctgtgcagatgacctcggggttcaggcgacactcaaatgcctgcttctcctctgaggttattaccatctcttacttgtttgacgtttagagatactacaagagatagttgaaaagcagaggttgcatttccagtggtgttttgctctgctggtatttgctcctccgtgctgctgtgcaaagggccagaactgcatcgaatggatcttttcttcaggttgtgcaggctggctgccttgatgtcgtagttgctgatgttggctgccgacgaaccttattcctttacatttgcctggtcctcatttcaccggaaaacacagtagctgtagctgcacatagacgcttcctctttctgtttccccctcatccccctccctagacctctctgggctttgacgtcatgtgtgctcctttcggttgccatagcaaccccattccccaagccctctgtccgtctcctctggtaggttccacaatggtacaggcagcatcacgctgcacaatggtttccaggcagtgaaagagggtgattcagcaagccactcttcttctattttctttaacctccccttcactttttatttttatgggggtgggtggtgcttgctatatgcttacctttttcttttcttttttcatttttacaaatttccttttttgtc

SEQ ID NO: 32355 - DNA, 2300 bp, Homo sapien
ataccttgttttttttgttgttgttgtatttttgttgtaggtcctgtgagatgtatgcattaaagaggttctattttgatgtgtttctaggatatgtttcaagatttagacctccttttagcaattcttgtagtgctgctttggtagtggcgaattcccttagcatttgtttgtatgaaaaatactgtatttttccttcacttatgaagcttagtttcactgggtacaaaaattcttggctgataattgttttgtttgaggaggctgaagatagggtccgaatcccttctagcctgtagggtttctgtggagaaatctgctgttaatttgataggttttcctttataggttacctggtatttttgccttacatctcttaagattttttttctttgtcttgacttcagataacctgatgacaatgtgcctaggtgataacctttttgcaatgaatttcccaggtgttctttgagcttcttgtatttggatgtctagttctctagcaaggccagagaaatttttcttgattaatcccccaaatatagttgccaaatgtttagatttcttttcttcctcaggaacaccattattcttaggtttggccatttaacatacttccagacttcttggaggctttgttcatattttcttactcttttttgtctttgttggattgggttaatttgaaaaccttgtcttctgaagcttttctgcttgtttgagtctctgaagctcttctgcttgtttaagtctattgctgagactttccagagcattttgcatttctataagtgtgtccattgtttcccgaagttttgattgttttttatttatgctgtctatttcattgactatttctcccttcactttttgtatcatatttttgatttccttacactgggcttcgcctttctcaggtgccttcctgattagcttaataactatccttctgaattctttttcaggtagatcagggatttcttcctggtttggatccaatgctggagagctagtgtgattttggggggatgttaaagaaccttgtttcatcatattaccagagttggttttctggtgccttctcatttgggtaggctctgtcagagggaaggtctagagctgaaggctgttgttcagttccttttgttcaaaagggtgtttccttgatgtagtactgtccctcttttcctagggatgtggcttcctgaaagccgagctgtagtgattgttatctctcttctgaatctagccacccagcaagtctaacaggctctgggctggtactgggggttgtctgcacagagtcctgtgatgtgaaccatctgtgggtctcttagctgtggataccagtacttcctccagtggaggtggcagactggtgaaaaggactctgtgagggtccttagctttgattgattaatgcacaatttttgtgctggttggcctcctgccgggaggtggtgctttcaagagagcatcagctgtggtagtatggggaggaacaggcagtgggtagggccttggaactcccaagggtatatgccctttgtcttcagttaccaggatggcttgggaaggaccattaggtgggggcagggctaggcatgtctgagctcagactctacttgggtgggtcttgctgtggctgctgtggtgggggtggggtgggggggtgggggtgaggttcccaggtcaatagagttatgttcctaggaggattatgtctgcctttgctgtgtcatgcagcttgacagggaagtgcgggcaagctggcagtcacaggcctcacccagttcccacacaacgcaaacagctggtctcactcccattgtgcccccagcagcagcaccaaggctgtctccaggcagtgggcaagcaggaccgagtactttccccaggctacccgcctcccagctgtgaaaataaacagggctctccttcttccctgctctgttgagtctgcacactggattcatgccctccccctgagttctggccaagagacttctccatcagttgaaattgttacaaagttcagctggagttttccttctccctgcagctttcccagtgcctccagcagccctcctcaaggacccctgtgaggccaggcagaaatggcgtggcaggggacccagcgagcccagagggattttgccgctgcttcctctacccctgtatttcacgcagctctctaaattgactcagctccaggtaaggtcagaatcttctcggataatctagaccttcaggttccccagtggggctgtgtgtttgggggcagacgacctccctttccc

SEQ ID NO: 32356 - DNA, 2300 bp, Homo sapien
ccaaaaggaatttaacctgtagatttcccttgtgtgtactttttaacagattgtattttaaaaccagtctttcagctcatccaaaacagagggattactggtgaaaatgccttgagggcaaccacctgaaatggccttaataaaaaaaaaaacacgaagaagaaaaagaaaaggaaaaaagctaacaacactgtggtttgtctacttttgcggaaatttacaacactatacttgctataccttctttctgatgtgaatccacaagctattgcagccattaattaaggatattgcttttctttccaataaatacatgaactttctttcagaggcaaacagagacagatgtttcatgaaagtttctgttcttcccaacctgcctttcctacctccctgatagatgatccagaacatttaaaaatgggggaagaactgagaaaagggctccaatcatccacttgtgtttcccatccaaggagcctggcctgttatttactttcaccacttatccctgctgctgctgtttagtttttgttgttcccctcaactgactttcctcatctttgctgcattcatcaaagcccagtgtaaattcccctcttccataaactgaggaatccagcccattttacatagcaaactttctcttagctgctacctactcaaagtttggctgcacattttagctataattgttctcaaattgtttcaagagtgctagttttctttcttaggctccaggttagctccttgggagcggggacttagcttaaaatcctgctgtgtattttccgttgtgtttagccctatgagtaatcacattcaatgcatacttgtaaggcatatttgactgaagatatctatcatagttattcatttagtaaatgatataatgaaaactcaagtgctcgccaaagataaatcattactattaattccctcattcatcatacatgtatggcagcctcaggggctagggaacctaggattgctgctttgactttttttggggaagccaaataagcctcagatctctccactttggagccagccatgaaattcagatttacctagggctcaacattaagggtctcagactaaatttatcttcaggtaccctttccagagtggaccagtttaccttatacctctgagaataacccaaaactttcaaaactcaaatcacaggatattatttgttcatgaattcagcaagactctcttgtttaactattgaaactcaaatatttcggcttgcagcaaggaggggtacagctgtctggatataccttggccaaatttcagtgtatatagaaaagtgggaggttatcgactatgttaaaccttttccttaaattttcaaacttcgggattattttagtctcatagataaaataacaaggcaagtatttacaaacttttttcaaaaatatgagaatttcagttttccctagggcatttggcgttgtgctgtcaccacacttttgaagatagctttacaaccgtgggaaaactcaccgggcttttttcgttgaccccgccatttctaagttgctatattgctgcaaggagctggcaaagccatgctcttcctctcccccattctcctcttcctttcaaagaccaaagcgccccgtgagaatatagaaacaaggctgagaggcagcgaagagtaagggaggagccagcacttacgcatttttcactctcctcctcactccctagggtcatagttttgattctgaagttagaagtgtgggggtcgtcggctgcattttcaacttggcctaaaagttggagttcaccacactgcaggcgctaggaactctgccgctcggtcaccaacctgagcctctggctagtccgaagaacgcgaaaagccaggcccaaggcactggttgtcatggcaaccggggcgctggtctccctggcgacctcgtccctagggaggaggtggagctggatgccaggcgggccaatgaggtcgaggggagctcggggtgggagatctgcggtcctcccagtgccggggaatggttgagtgacaggaccgggggggcggagccggcgcggctgcccgaggtggagccccagtggtgcgagtagctccagcggccacgctgaggcgagggtgacacaccatgctcacggcccctggagaccgtcgtgctggcgagccgtgctccgtagctccccggtccgcctcggcagcggtcagagtcgcctacaggagttgagccgcccgcgccagaaggttttggcgaagctcttggagaggcgtcgagcacagtagggcggcg

SEQ ID NO: 32357 - DNA, 2300 bp, Homo sapien
aagttgaagtccccttaccccatttcctagggaaactttttggcatacatgtagccttctgtgtagaatagatatatatgtgatgtgtgtgtgtgtgtaaatatatatatatatatatatatatatatataaacacaacacatacacacactattttttaaaaatctgttttatactctaaataccattctgtaactgcttactcaacatattctgttgctatccatgtacatgcatatctttttaatgcaacattatatttatgttatagacatatcaaaacttacttaacttttcttctattgttatgtatccaggttagctataattctattataaatgttactccaacaaatacaccttttaatacaccattgaaaatgtatgtatttctagaggttagatgcctggaactagattaaagagtatgtacattaaaattttgacaagtgccaccaaattggacttcaaaaagttttaccaatttatagactaaccaagtagatatagcagtgcttttctcctcataccatcagtggtgcttaaaattatcagtcattctcatttttgtcagccaaataagtagagaactgcattaaactgcaggtccctgagcaatagtgagaatgtcttttcatatatttactatttgtattttactctgaatttccagtctacatatcccttgttccgtgggagttttgaaaacctcttttttgttgaattttagcaactctttgtatattagggatactaattctttgtttattgtttgttgtcacaaatattttctctccagttgctcattactcttaatttttcccttgttgtcaattactacataaaacttttaatttcatataaattctcatctttaattcctttacacgtgtctttggtggtttgtgtcttcagaaagctttttcaagtggcgttttgtttgtttgttctttgagacagtcttgccctgtcacccaggctgaagtgcagtagcacaatcactgctcactgcaggctccgcctcccaggttcaagtgattcttctgcctcagcctcccgagcagctgggactccaggtgcacaccatcacgcccagctaatttttgtatttttggtacagacagggtttcaccatgttgggcaggctggtctcgaactcctggcctcaagtgatctgcctgcctcaacctcccaaagtgccgggattacaggattacaggcatgagccactgcgcttggcctaaagtggcttttgataagaactatatataagcaatttggagttgccttccatgataatcacttggagtccaaaaagtgcaatctagtaggtcaatataaagtaagtgtgcaaataactatttaataaggacaaagaatgtgggacactaagaaagtataaattatctgtggaatcagtagagtctccacagagaagcctggtttgaaatggatcttggagaatggaaatggggagttaaggtgaaaggggtatgcatttcaatagaggttgtcacaagaatgaccaaaggagaaagcaaagaaagtctaccaaacacatgacctaatggtgttttgtgtgtcatccttataaaatccttccaacaatcttcaagaaacattgtgtatgtgtgtaagcacgtgtatcactaacttgttactctcattgatggattttgacttttagtgccttctactcctgtgcatctcaccaatgagatgaaaaactacatgaagaaatcttcctacatgcaagacagtgctatagattcttcttccaaggatcaccactggtcacgtggtaccctgaggcacatctcggagaactcctttgggccatctgggggcctgcgggaaggaagcctgagttctcaagattccaggactgagagtgccagcttgtctcaaagccaggtcaatggtttctttgccagccatttaggtgaccaaacctggcaggaatcacagcatggcagcccttccccatctgtaatatccaaagccaccgagaaagagactttcactgatagtaaccaaagcaaaactaaaaagccaggcatttctgatgtaactgattactcagaccgtggagattcagacatggatgaagccacttactccagcagtcaggatcatcaaacaccaaaacaggcatagtttaattttaatattttggttttctcatttaacaaagcaaaatagcagcaaataagttacagagcacaataatctacaagatgctttcattattctggaaaaaagaaatagtttatatcttctaattgctactgcatttgatg

SEQ ID NO: 32358 - DNA, 2300 bp, Homo sapien
tggtggtggtcgcctgtagtcccagctactcagaaggctgaggcaggagaatggcatgaacccgggaggcagagcttgcagtcagccgagatcgcgccactccactgcactccagcctgggcgacagtaggagactccatctcaaaaaaaaaaaaaaaaaaaaaaagaaggttgactaaggggcttttggacattatctaggcagacacccctgaccccttctcttgctaaataagtaaataaagttctgcttcaccagacatagccacatatgtgtaaagcacctagccacctgtattggtctgtttttacgctgctaataaagacatacccaagactgggtaatttataaaggaaaaaggtttaattgactcacagttccacatggctggggaggcctcacaatcatggcagagggggaaggggaagcaagacacgttttacatggtggcagaaaaggcaagagcgtgtgtaggggaactcccctttatcaaaccatcagaacttgagagacttattcactatcatgagaacagcacgggagaaacccgcccccatgattcaatgaccttccaccaggttcttcccatgacacatgggaattataagagctataattcaagatgagatttgggtgcgggggaaacacagccaaaccatatcaccacctctgtcacccctgagaagtgctcagaaaatgttagctgtctccctcctcccttcctcctcagcctgaccacacctctgcatcattcaagctgggaacaccttgccttccagagacctttcccgttcctcagtgtccattctctgcagggctctgcgtaaatacgccctgtgctgactgaccccttatacgcaacctccagggaggctggatggccagagctgccttcagggtttgtttgccaaaggcagtttattctttcttcaaatagttagaatttacttcacatttgaatctaacttgtatttttatacagtcagcatgtcctgagcattctgtcatggagaagaatttgctcatccatgaataaacaatgcatagctagtatccctcttgagacaggtagaggcgtttatgaagtgtgccttgttactagcctgtgccccacaaataaactttctgctgtgagaaggggtgtggcacctgctttttcagaggtttagtttcacagaaccatacagtccttgggttttgccagcagtgcctgcttagaatgcacagaggggccctgggcactgtggtcagaggctgtcctcagaccccatctccatttcagaccaagctctttaccacatccccttgcaggattcccagatgtccctaggaggccaggggtatgtatctcaaagtagactcttatctccaaaagcaagtgagagctcccttgaattattttgggtgaaggaattagttttcacatgtttcatgagacataattaggtgcctaataccatattattctcacaggtgtttaattattgactttagacacaaattctaatagaactagaagaaaaactgagacaaattctgaagctccttgaaattattcttagtccctcctgacatttcctccaccggcgttttttttctttttgctctatttccagcagacacgctttgctaatgctacaaggtgtggctttggctttgttgttttttccggagttagcttttctgtctgtgcatcctggctctttgaaatcccaactgaatttggagaaattatttcttggcatccaccctactttccagggacacaatgtgatgctgacgacatagcccggtcactccacttgacaacaagtttgtttgtctcatctcacatacatattcagtggtgagtaagaacagaagtggaaagccttacttaccacagtttattatatgtttcatgcctgtgataattacttttataatgccacttgtgaaaaaattgatcagattaggatgaatcaccttgctggccaacagttattggaatgattctccatgtgtgacttcgttgcactattacaaaatgtggcaggatagacctgcccagccattgttgccgatgttcatttgtaatgctgccttaaggagatgaggagatgagagccaattgttccagcagctcagcctgccctgccaacagttcagaggaggagctgccagtgggactggaggtgcatggaaacctggagctcgttttcacagtggtgtccactgtgatgatggggctgctcatgttctctttgggatgttccgtggagatccggaagctgtggtcgcacatcaggagaccctgggg

SEQ ID NO: 32359 - DNA, 2300 bp, Homo sapien
accatgaggaacttcccttctaaggtggcttgtcccctatctggatataacctcaaataacttctctgtctctgttttttcatctctaaaataaaatcacctaagaaagtgcctttcaaattttttagacccattgttaagggctgtacattgagcctgagcacacacacacgtatgtgtatatgtgtatatatatatgtatataacagaaatgaaagtgccacaaaataataccttcttacacttatctgtgtgatgtactctaattttattcgccattctatgctaactcatttttaaaaattccggccaaagaccgggcgcggtggctcacgcctataatcccagcactttgggaggccgaggtgggcggatcacgaggtcaggagctctagaccatcctggctaacacggtgaaaccccgtctctactaaaaatacaaaaaaatcagctgggcgtggtggcgggcgcctgtagtcccagctactcgagaggctgaggcaggagaatggcgtgaacccgggaggcagagcttgcagtgagctgagatggcgccactgcactccagcctgggcgacagagcgagactccatctcaataaataaataaataaataaataaataaataaataaataaataaataaaaattcaggccaaaatctgtagtacactggtctcacagtccattgagggtttcaacattctttgtggaaagaaaacacccactgtcactcctcggtgctcacttttcattggtggtagagcagaaatgctgaagagcgagtgacagtcctcaccttccagtttctgggaggcacaaaagcacctttgaaagatgggtcagccctgcgagcctactctaatcagaaggatcagaagttgcttgtcagatggaaaggttactgtgttttatcttttttttttttttgagatggagtctctgttgcccaggctggaatgcagtggcgccatctcggctcactgcaacctctgcctcccgggttcaagcaattctcctgtctgagcctcctgaatagctgggacgacaggcgcgcgccacctcgcccagctaatttttgcattttagtagagacagggtttcaccatgtcggttggccaggctggtctcgaaccccttgacctcgtgatctgcccctctcggcctcccaaattgctgggattacaggcgtgagacacgcgcccggcccatccaccgtgcctggcccatctgtgtttatctttaaaagttggctttggaacttgccatgtgactctgggcagccctttaaccaccctgaactcattcgtcggctccacaattgaaatgagtagtatcgctcttacctatttcataaagttgtttttaggctcacaatcaattaggcatttatcacgtggcggagaatctcagggcaggatctttcatcctcagaacaaccctctaagacatagagcattatccttgttttatagatgaagaaattgatgcttagagcagtgacatgcgaaatcttaaggttaaatcttaagtggcagagctagaattccaaaccagttctgacatcaaaaccctcactcaaaatggaaatgtaagctcgtttcatttgaccgtaaggggtggccatctgatgtattcaaatgaagaaatacgaaatcaccacagcgtaataacggctttagaaattgatgctgtcttgctctgaacacgaacacctaaaatatcacacgtgggctttgagctcactgccttcacccactgcagtgtgagaacgctggcaacagggcttcggttccccagatgtcagcagccaggactgggtacatttctttaaatggcgcccgcaaacgaagtccagatcgcttggatgcagccccctacattggaaagcgtccttcccaggaaaggtctggcttacagccctctctggctggttggctggattccgagagcgcggcctgccccggcccggttaccagagagcggaccccgcggggcgcgtctcccgggcccggcgtcccctccctggcgggtggggagggccccacaaagccctttgttgaggctcccgtgtgacgcgaggagccccagactcggcgcccgcggcgagcgggaaggaggcgtgtgcctgcggcgcggccccgaggcgtgtgcgcggccatgtgcgcttagcgcagcgcgctcttacctcagtaccccggccgcgaccctccgagcccctggagcccgggtaaccaggccgccggcgccggctcgcggggacccgccaccctggaagccccgcgcacacagcgcattcct

SEQ ID NO: 32360 - DNA, 2300 bp, Homo sapien
acctcccgggttcaagcaattctctacctcagcctcctgagtagctgggattgcaggcgcccaccaccacgcctggctaatttttgtgtttttagtagagacagggtttcaccattttgcattttggccaggctggtcttgaaatgctgacctcatgatccacccgcctcggcctcccaaagtgctgggattacaggcatgagtcaccatgcctggccccagaatatttcttaaaccagtctttctgacttcacttttgctagacattttgctctactggaaagctgcccttgattttcacttgtacgtatttacttattctatttctgttccctttagctagaatgctctagttctacctgtaataaaaacaaaaacaaaaacaaaaacacatgactggatcttgctatgtggcccatgctgggttcaagcaattctcccacctcagcctcccaaaagtgctgagattacacacatgagtcaccatgcccggcctccaccttttgatatatctgtcctttgaagcttatttattcatgtattcattcattcaacaagcctgggcagggtacattctaggcccttaggagggaaaatagaacaagatgactcctatcttctagaatgggggtgggcatactttttctgtaaagggccagatagtaaacattttaagttttatgggccacatggtctctgtcacaactactcaactctgctattatagcacaaaggcagccataggcagtacatagagaatgaatatgattattccaacaaaactttatttacaaaagtgggtgttaggttgtagtttcccatggtttgttgaggccctcctctaaaaactcacagctaaacagatggaaaagccagcaggaaatgataatgcataaaacatatcaaagaaatatggaggattgtacggcaggcacatgtgacaacaataacataaacataccctgagaatgacccggtatggcagatgcacctgacagcaataacgtaagtatacccagagaatgaccctgtatggcagactcacctgacagcaataacgtaagcataccctgagaatgaccctatcgtctaagaagaatgtgtgtttggagttccaagctaaggaatctaggagtggccaacccggagattcattccttatctatgaggaccataacctgcagcctattccctggaatgcaggctgtacaggggatggaggccctcttttgttttgggttaaatgaacattgccaggtggaggttgctaggggaagtgtgttaagtgaaaatgctatataaattgcatgctttttacaattggttgtggttctcctgtccagcccaccaacactagaccaccctgtatttaagtctcctcaataaaccctgtcttgtttgcaggttccaagtctcttcttcggcctctcaaacatggtaccatccctaatgaagtcaacgggtccagcatgacaggatggaagtacaagtgtcagcacctatgtgagtcccaagaggggaaattagaaacaaaaaggaagaagaggacataggccaggcacggcggctcacgcctgtaatcccaacactttgggaggccaaggtgggcagatcacctgaggtcaggagttcaagaccagcctggtcaacatggcaaaagcccatctctactaaaaaatacaaaaaattagccaggcgtggtggtgggagcctgtaatcccacctactcgggaggctgaggcaggagaattgcttcaatctgggaggcagaggttgcagtgagctgagatcgtgccattgcactccagcctgggcgacagagtaagactctgtctcagaaaaaaaaaaaaaaaaaggaaaaaaaaagatgatatagtcaaagaaataacattaaatttcttataatttaagatgaatgatttcagattgaaaagtttataaaggtgccaaagagaaaaggaaagatccacactagatacattagaatgaaatgtcaaagtaacatacataaagaagaaattctgaaatcttctagaaagaaagaacatgttatctatgaaggaacaaggatcatattgatattagatttctcaacagcacatgtgctgcaagaagacaaaggagtaatattaagtattgtgaaacaaacctagagcttagaatttcatatttaaaattctaaataaattatcattcaaattgttatagtttgggggccaggtgtggtggctcatgcctataatcccagcactttgggagactaaggcgggcagatcacttgagctcaggagtttgagacg

SEQ ID NO: 32361 - DNA, 2300 bp, Homo sapien
atgtaatttaagaattcttgtaaggaagatgatggaggaaagtgtagctaacaaagttaaatatctgcaactccattacataattactctccttttgtttatgtctgaaatttaaaaagtagatataaaaaattttttaaagtagatatagtgtaatcactttttaaaatagccttcttattgactatttatataagatgaccagcagaagagagagaaaggcaacttaaaaaataataataactcactggcatggctatccttttttattcattatcagaaaattaatttgatttagtctttttaaatagccagtcaccattcacgaaataaatcaacagaagtgtgtactggaattatttacttgcttgtttctgccaccacactggaatgtcatgaaaataggagctctgtctttgtcatcaatatggctcgtcacctagcacattgccttaagaatattgatataaatggaatgacttactctctgaaccaaagctacatcatcttcaacaaaatttttgcaaaattacaatcttcaattccaaaggcaggaaaataaaatgatcacacttccactgtcaacatcatttactaagttgaccacagtttgaagagccctataggagatactatgggatgacacaaaaagaacacaaaaaaggaaaacattttagatagaagtggtaaaagttttcagattataaaatattaccatgctaatatatatttcacaatgaaatgtattcattatatagcaaaaacgttaaaatacttgttattgattagaatagagatcagtctctgttagaaacctttaaaaggtgtacaaacactttgtaagagatgactcctgtcccatcctgctcagggatgaccagaactttcatcttagatagatacaccaccaggtttcatcagggacaccttaattattttagctgtctaggtaaaccaatctcccgatgggaggatatggagtagggcgaagagttatattttggaaaacaatccatgggaaattaagtcaagtagccaaaggtttaatttggaaatgcaaatatccatcaattaggttttcaattatgtggacaataaaagagttgagcagagcagtagagacaaacaaaattaaaaagagaaaaggcagagaaggcagggaggggcttattttcacacattataccaatttacattacacatcatattaaatttaagtaaggcgcttttcttcatccaaataatttcacccattttaaaccataaaatactgtcggcgaaatctcatctgggccatttgatgtaatctttctgcgtccctttcaggaaggaaggtgcgacaacacaatgaagacagcctgttgctttccttggtatgtttacagcaggaatcgggcagcgacttaactagacataagtttccccttcttcccatgggtctatttgccaaagccccctgcacctattagaattttctgaggttgggctggtggagagcagaaacccggaggctagattcaggagacctggtttcccatgccacttagtagcctgtgacattgagcacaatacttacttttcggcgcttccgtttcattatttgggaaatgggaacaatatatctgttttataagattgttgtgaagatgaaacaggcctgtgtgtgaaaggccttttctaaattgtaaagcgctccccagatgttagttattatctcctttaaagggcacagaatctgtttcaatattataggaggttgcaaaaaggctccttgacactttttgctcagaacttgaccctgagcttaatctcgccgtaaagtgaaagggttcttgcgcccccacagcagcccggggcagggtcaccctcgcgaccggggcggtcattgccgtattccgtcctgagctgccgctcccccacgatcctcccaccaatcccgggagggccgcgacgtcccttgccgcttgggtggcgccagctagagggcgcgggccggggcggaacccggtaccgcagctcgggaggtgggggtgggggcggggcctcgcgcggagggcgtggcctcggggcgtcccgggcagccggcgtgctgagcttgccagccagctagcgagcgacgggcgcgcgcggcccctgcgcactcggccgccgcctgcgcgcgttgcggccgcagctgcacctttgcctccgcggttccgcagccgagccccgggaggaggcgctcccctgcgtcgtccgcacttgcgccctttcccaccgcaacaggtcaggggagggcggaggtgacgagggcgcccgac

SEQ ID NO: 32362 - DNA, 2300 bp, Homo sapien
cgacttaactagacataagtttccccttcttcccatgggtctatttgccaaagccccctgcacctattagaattttctgaggttgggctggtggagagcagaaacccggaggctagattcaggagacctggtttcccatgccacttagtagcctgtgacattgagcacaatacttacttttcggcgcttccgtttcattatttgggaaatgggaacaatatatctgttttataagattgttgtgaagatgaaacaggcctgtgtgtgaaaggccttttctaaattgtaaagcgctccccagatgttagttattatctcctttaaagggcacagaatctgtttcaatattataggaggttgcaaaaaggctccttgacactttttgctcagaacttgaccctgagcttaatctcgccgtaaagtgaaagggttcttgcgcccccacagcagcccggggcagggtcaccctcgcgaccggggcggtcattgccgtattccgtcctgagctgccgctcccccacgatcctcccaccaatcccgggagggccgcgacgtcccttgccgcttgggtggcgccagctagagggcgcgggccggggcggaacccggtaccgcagctcgggaggtgggggtgggggcggggcctcgcgcggagggcgtggcctcggggcgtcccgggcagccggcgtgctgagcttgccagccagctagcgagcgacgggcgcgcgcggcccctgcgcactcggccgccgcctgcgcgcgttgcggccgcagctgcacctttgcctccgcggttccgcagccgagccccgggaggaggcgctcccctgcgtcgtccgcacttgcgccctttcccaccgcaacaggtcaggggagggcggaggtgacgagggcgcccgacccgggactagaggacggaagggtctggaaggtgagcgcagccctgcgccacccagggctgggggtcgatccgcccggcccccgacgccgccgccgcggacttctcggaagccgaggctctccccgcctctctgccggcttcccagcacgctgactcaagtcgctggcgttcccacttttccggtgggagccctcggggagaacgggctagggctcagagctctcaccgccctacttgcgatcccgcggcaggtagcgcgtagaaaaacaggggacggggacatgggaagagacccatgctcctccctcacgcgcagcccccaagtcagacgtttgcctgtgcaccccgcgttttgcggagagctgtcccgttgttgggacctgctacttgagttgcgtaatgagtcccagaagtttctcggggggagggggcggggaaaagtggggttcttctctcctgcaccccgggacccttccctgtgcctgtcgtggagagagatgagggcttcccgccgcgtctcgctgagagcaggagggaggcgtgtgtcggtggtccgtagcctccggggaggagttggagccaccttctgagacttaacttcagggacagagggagaggcgtctttagtatgggactggttaatttctcttgataatgcttttttccctcgggtgtcccatcctctgtggccgtcgcaaccccaccctccgacggtgcgagcgccggagccagcgaatgagaggggagagaaggtggagagtgtgaatcacacgttaccttagtgtaatggtagttgcattaatggagctgcgacgggcctgcgggcggttcgataccgtccggctagttttctcttcccggagcttctccaccaccagcacccgcaaattgttatgcagatcatcccgggaaggcacttggctttggaggtggagatgtgtccgaatctcccttgaaccagtctctgttagggggaaaggccttgcagccaagtgatttgttttaagggtggagccggagataattttaaacaccctcccccttggtgcacgttgcggggtgtgactcaccacggggaaatcagactgatttaaaaccttcagtgcaaacttgtaaattaaggcgaagacccagtgttccctgggacagttgcaaagtgagaagagctcagaaactgaagcacagaaacgttaggtaggagtctgagaggcgtggagaattttgcttgtgcaagattatttcagagcaaggtcgtgcggtgtgtgtagaaggtaggtggccgtgggttacctctctcagacctgcgtggtgttggcctctgggtggggataaaagtcacgaaaaagacctttggacccagagtctagttttttttctttggggccgaagaatacctagg

SEQ ID NO: 32363 - DNA, 2300 bp, Homo sapien
tctttctctccataaaaatggcttaattccagtgagtttctctagttttacgtactacttatgtattttgttgctttctctcatctccccttggatcattttcctttagttctcaccactgcttttctccatatttatcttcaaatattcaagtacaatacttcccaacatccacaagagacaacaccttgaaattaaagcaagcaaaccatccagaattttccattctcctgtgaatctacttccggaatatccactcaagtaatccttcccactaaagatgaaaggcgagctaaggaaatacattagacagaggaagtaaacactgaaacagggccatgcctaggtattcttcggccccaaagaaaaaaaactagactctgggtccaaaggtctttttcgtgacttttatccccacccagaggccaacaccacgcaggtctgagagaggtaacccacggccacctaccttctacacacaccgcacgaccttgctctgaaataatcttgcacaagcaaaattctccacgcctctcagactcctacctaacgtttctgtgcttcagtttctgagctcttctcactttgcaactgtcccagggaacactgggtcttcgccttaatttacaagtttgcactgaaggttttaaatcagtctgatttccccgtggtgagtcacaccccgcaacgtgcaccaagggggagggtgtttaaaattatctccggctccacccttaaaacaaatcacttggctgcaaggcctttccccctaacagagactggttcaagggagattcggacacatctccacctccaaagccaagtgccttcccgggatgatctgcataacaatttgcgggtgctggtggtggagaagctccgggaagagaaaactagccggacggtatcgaaccgcccgcaggcccgtcgcagctccattaatgcaactaccattacactaaggtaacgtgtgattcacactctccaccttctctcccctctcattcgctggctccggcgctcgcaccgtcggagggtggggttgcgacggccacagaggatgggacacccgagggaaaaaagcattatcaagagaaattaaccagtcccatactaaagacgcctctccctctgtccctgaagttaagtctcagaaggtggctccaactcctccccggaggctacggaccaccgacacacgcctccctcctgctctcagcgagacgcggcgggaagccctcatctctctccacgacaggcacagggaagggtcccggggtgcaggagagaagaaccccacttttccccgccccctccccccgagaaacttctgggactcattacgcaactcaagtagcaggtcccaacaacgggacagctctccgcaaaacgcggggtgcacaggcaaacgtctgacttgggggctgcgcgtgagggaggagcatgggtctcttcccatgtccccgtcccctgtttttctacgcgctacctgccgcgggatcgcaagtagggcggtgagagctctgagccctagcccgttctccccgagggctcccaccggaaaagtgggaacgccagcgacttgagtcagcgtgctgggaagccggcagagaggcggggagagcctcggcttccgagaagtccgcggcggcggcgtcgggggccgggcggatcgacccccagccctgggtggcgcagggctgcgctcaccttccagacccttccgtcctctagtcccgggtcgggcgccctcgtcacctccgccctcccctgacctgttgcggtgggaaagggcgcaagtgcggacgacgcaggggagcgcctcctcccggggctcggctgcggaaccgcggaggcaaaggtgcagctgcggccgcaacgcgcgcaggcggcggccgagtgcgcaggggccgcgcgcgcccgtcgctcgctagctggctggcaagctcagcacgccggctgcccgggacgccccgaggccacgccctccgcgcgaggccccgcccccacccccacctcccgagctgcggtaccgggttccgccccggcccgcgccctctagctggcgccacccaagcggcaagggacgtcgcggccctcccgggattggtgggaggatcgtgggggagcggcagctcaggacggaatacggcaatgaccgccccggtcgcgagggtgaccctgccccgggctgctgtgggggcgcaagaaccctttcactttacggcgagattaagctcagggtcaagttctgagcaaaaagtgtcaaggagcctttttgcaacctcctataatattga

SEQ ID NO: 32364 - DNA, 2300 bp, Homo sapien
catattggtcaggctggtccagaaccgctgacctcaagtgatccgctcgcctcagcctcccaaagtgttgggattacaggcgtgagccaccacacctggccccaatgaggttccttaatttgcactctctctaacatactttctcaatctcccaaaaaattagttaatggtctagagccttgaaataaaggaactttgggcccacaaattacagagttgaacatagaactccttccatcagcttttcaaaaaatattgaaaacaagtttaccctttctaagctcaattttttcacccctcttttcaactttcaaggcaatatgaaacttcaactaaacaatcacctggctaaagtgacttgtaggccaggcacggtggcttccacctgtaatctcagcacttgaggaggcaaaagtgggaggactgcttgagccaggagttcaagacccacctgggtaacatagggagccccccacccccacccccaccccaagccatctctaccaaaagattttttaaattagccgggcatggtggcatatgcttgtaatcccagctatttgggaggctgaggagggaggatcccatgagcccaggagttggaggttgcagtgagctatgatcgtgccaccgcactccagcctaagtgacagagtgagaacctgtctcaaaaataaataaagtgacttgtaaaggtgcctgataaatatatatgtattttaattgaatagtctcttccaaatttaatccaaaacctaattaagcaagttctcagtcaattaaaaaagtaactttcacctcaaccagctctgcaaaattcagttaaaccggagaggaaacagaagagacagctagttttgatatagtcttattaccctatagtagattagtgattctggtggcaaaaaatgcatgcctgttacgcatgtaggagaaagcaatgtttacaatggcctggacttttgtcataaattttcaatctctaaatgatctttgtattctaatttaacacactgtgattcttcaaaattatagttttgcaaagttgaagagttaagcaaatgccaaagccacaaattcaattgttacagtgaataaggcagattaatatttaacagttcattttcttgcaggtgaaaagcaaagaattcacagcaacatacctgcaagtctcacatctccagcctcaacatccttgtaagttatatttgaaaaaagaaaagtctccaatatctaaactcattttccccaaaagtcccactcttcaatctctatttgtctcaaagtgaccaaatctatcccaaattatttccttggttctttctctccataaaaatggcttaattccagtgagtttctctagttttacgtactacttatgtattttgttgctttctctcatctccccttggatcattttcctttagttctcaccactgcttttctccatatttatcttcaaatattcaagtacaatacttcccaacatccacaagagacaacaccttgaaattaaagcaagcaaaccatccagaattttccattctcctgtgaatctacttccggaatatccactcaagtaatccttcccactaaagatgaaaggcgagctaaggaaatacattagacagaggaagtaaacactgaaacagggccatgcctaggtattcttcggccccaaagaaaaaaaactagactctgggtccaaaggtctttttcgtgacttttatccccacccagaggccaacaccacgcaggtctgagagaggtaacccacggccacctaccttctacacacaccgcacgaccttgctctgaaataatcttgcacaagcaaaattctccacgcctctcagactcctacctaacgtttctgtgcttcagtttctgagctcttctcactttgcaactgtcccagggaacactgggtcttcgccttaatttacaagtttgcactgaaggttttaaatcagtctgatttccccgtggtgagtcacaccccgcaacgtgcaccaagggggagggtgtttaaaattatctccggctccacccttaaaacaaatcacttggctgcaaggcctttccccctaacagagactggttcaagggagattcggacacatctccacctccaaagccaagtgccttcccgggatgatctgcataacaatttgcgggtgctggtggtggagaagctccgggaagagaaaactagccggacggtatcgaaccgcccgcaggcccgtcgcagctccattaatgcaactaccattacactaaggtaacgtgtgattcacact

SEQ ID NO: 32365 - DNA, 2300 bp, Homo sapien
agatgccttcaggaggaatctctggccgtcttctttggtaatatccaaagagctttggtcagcgttgatatcaaagcggtgtgaagaaaacataaggccataagactaatctctggagagctgcacactgaaggggaacctaagttcttgagtccctggagtaccccaagtgtggtttcagagagggtgccattcatgagcaacactgctagccattagtggccagcaagaaggggagtgaaaggagtatcttgtagatggtgacttgggtaatatgaaattgctgtcatcaaggtttatcaaaaaaccaaaggttaaatattacatgtaggcaatgtgaggctgccccaaatggtgtgtttcccaggaacttgattcaactctgagaataaatgcatgagtactgagaaaactgtttgggtggaaaatatttatttattattttattttgttccctcagctgtgatctgcttatttgagcttgttagaaatatgtaacctaggctgagcgcggtggctcacgcctgtaatcccagcactttcggaggccgaggtgggtggatcacctgaggtcaggagttcgagacaagcctggccaacgtagtgaaaccttgtctctactaaaaatgtaaaaattagctgggcgtggtggcgggcgcctgtaatcccagctactcaggaggctgaggcaggaaaattacttgaacccaggaggtggaggttgcagtgagtcgagatcgtgccattgcactccagagcaagactctgtctcaaaacaaaaaacaaaacaaaaaaaaaccggcgcagtggctcacgcctgtaatcccaacactttgggaggcagaggcaggcggatcacgagatcaggaaatggagaccatcctgggtaacatggtgaaaccctgtctctactaaaaatacaaaaaaattagccgggcttggtggcaggcacctgtagtcccagctactcgggaggctgaggcaggagaatggtgtgaacctgggaggcggaccttgcagtgagcagagatcgccccactgcactccagcctgggcgacagagtgagactccatctccaaaaaaaaaaaaaaagaaatatgcagccaacatatatagccttctgcaactatatatttgtttacaaaagagaaaaatactgttgaaattgttttgacccaggttcttttaaaatcgctttatagtcacaaaatgattgtcctagaggataccagcctccataactgtggctactacccttaagactcagtaacattaactctcagctctgagactttttactacgtttttttttaaaggatgtgggtgcagtggacatcccttaactacatctttagtgtggcttgctaatcaccacagagactttagtgttggtacctgaaacatctggaaaataaatcaacaaattaatccaacaggactgggttttcatgtttacttcaaattgcttttttttttttttttttttacatccttttccattattgaaatatggtagatgctttggtcctatttattgaattttctttcaaccttcagacacttctcgagaaaaccaaaccaaccatgataatacattactattttgccttttgcagaagtcgtctagctgagcttgaaagtaacatcaaatttgggagtgctgtgctgaaacatatctaggtatcaggaaaagtgattttccaaaggcttgtaaaaagtcataggattctatgactgcttcctcaagagtgtaacaatagcttatcaagagaggctgtgcagcatagtggtgaagattatggactctcgagtgcagggtcatatctcagtcccaccacttaccagtttgcatgactgagaaaattgcccattttcttggggcctcatttttcttatctctgaagcaaggatggtgacattgtacttggcttaaaggcttggaattaatttaatatgggtgaagcacttagagccaggaatattgtgcatgctcagtaaattcatattacttacaaaattaattcctaacaccttccttgccattttgctggactgtggtatctaagattgttactaagtgtctcaaccacgtgtactgagggaacattatcatatttggaagaaagtcatctttatgtgaattcccaagtgacagtgtagggacccattaagttgttaagcgttttaaggcatgaagctggccagctttgaggtgtcagtgacttgtaagggcactaacaagtctgtcagttgggagcatagttcccagctgcaagttctcaccttgacaaagttataa

SEQ ID NO: 32366 - DNA, 2300 bp, Homo sapien
cttaaaggttaattgcattgtggaatctgaaatgagctttttaaaaaaactaaacctttgatacattaaaatcagttggtctgttttgcactttttttcagtggatctttcatccatgcatgattttggtttttgtttgagagagagtcttactctgtcacccaggctggggtgcagtggcacaatctcagctcactgcaacttccacctcccaagtatctgggatcagagatgcgtgccactatgctcagctaattttttgtgtttttggtagaaatggggtctcaccatgttgtccaggctctggtatcaaactcctgagcttaagcgatctgcctgccttagcctcccaaagtgctgggattacaggcgtgagccactgcacctggcctacccatgtatgattctgttataccattggtcatttcaaaactaaggcagatcttctcatataactttcatcactgtcactctgatctcatcaggaaagtctttaagtattggcgaagctggcaagattatgtggcagatgcaaaaagtcttccaaaatgcttgaaagctcaaatttcatcattggcaataagtactgtcaattgttttcctcaaagaaacaggctcaactttgttcatttttaatgtctgccagatacccaagtcagaataactacagtttgtgaattgttctttcaagtaaaaatggtagtccatgaaaaaaaagctagctcagcttgcaactcaattacacaagtgcttttcttctagacagccattgtacttaagtgtgcagtggactgcttcctgggtacttcccattttatcacaaagaacatcaaaaagacccatgctcaagggtcaagatttaatgaacgtaataattctgactgcttgcttcattaacgacaatcataaaggaaacgcttaaaaaaaaataacgtgtggtagtgaagaatgcagtgactactagtttcatttgctgtcactgctttggttagtgcgaaggcgccagcagtttccccataattgcttttgcaccatcagtgcaaatgtcagcacagtgaaaagacaatgtctttgtgttattctaaaaatagttctgacctctgagagggtcttggggactcccaggaatctagtaaacacactttgagaacccttgatagaggtgccttgggcctccctcccagcattgtcgttttagtgccaggcattaacatgtttgtatttcacgacgatttagtaatacaatctggactatctctttatgagacgggcaatgttgtcatgattctaggtagaagaacggagagtccacagtgcaggcagttattcagtattcatctaagagtcttcagctcctccggtgtgctggtccctatgagatgctgaagcacaacctccctccatccttgctcatccaagtattttcctgcttttgaggcacggcttaaacgctttccatggtcctctgagtaggaagtgatttcgtttgtgcttcgtataggacttactatattgcatgctcaagttttttgtttgcttcttgtcaatcccttcattgcttaagaccaaaatgaggtactatttttcctgtaatctacgtgtagtccaaaaaaggcgggctgttttgtaaatatttgtctctatgtaaggaaatcaaaactgaaagcggagtaacaccaagtatgcccgtttcttgagctcaagcactggaaggatcaaaagtagcgaacgtggtttactgccgcggtcttgttcctgctcactgccgcctctgggggccccatattcaacaaatattcaaattggagctggagttctgagcggctgggtactgtgtattccagcggtgggtgtctgtacgtagttagaacctggcaagagagcactctcgaggagcccgcaggcggggctcggccggggaccagcagggcttgtcggcgcccaggctctgccccctacccgaccctgcctgccgcttgccgcctgcctttggctagggccgccgagcgccctgcccatttaagtaggcgggccgtaccaccgcaactttcttgacagggggtatcccggcggactcggacaacttcaagtgagcccagaggcaatttcttttcctttctaactgtggcccgcgttgtgctgttgctgggcaggcgttgggcgccggcggtcttcgagcgtgggggcccgctggctttcccttctcagaaactgcgccgggggcgctcgcttgccccggattcggacgcggcgctccccgggctcgtctgaagtgcagatcgccgcagaggccccagtgc

SEQ ID NO: 32367 - DNA, 2300 bp, Homo sapien
tgagctgagattgtgccactgcactccagcctgggcgacaagagcaaaactccgtctcaaaaaaataaaataaaataaataaataaataaaatacatattgtgttttatgtttaataaagggaatacagggaagctttcccttttcccttggaaggttcactgaaaaatcaactgtcaaatggcagactaataggaaaaaagacatacaaaatttattttaatgtgcataacacagggagatttcaggagaatgattacccaatgactcaatggggtagagacgtttatatactcttctttatgggggaaagggagattggggaaatgtggcaacttaaggtatagtaaaggacttttaggggaaaatggggaacatacaatggcctgggaaaaagtgtgttgagcccatacagcagacaatagtttgtgacaaaagtctgtccaagagtgttgacagacttcagtctttcttcctccaatatgagttaagtaaatgaaaaatcaggtaaggcaaatatgttcctctttggcaggtctagtttctaggcagataagggaaattcagagaacgacatcatttggtgctttgggagagacaaagaattgagaggcaggaggggtaatggggaaggtaagagacaccttgaagctgcttcctcagttcagcgcggcaaagcaccatattttggggtatcgatttctgagtcccaacaatttttacatcacgttccagacacattttatgacttttcttcactgcatacttctttaaaactcatcttactctatttttctaaaggtatttgcattaaatgtgcaaaatactaatgctctaaagaggaatattttgaaatattaagaattatttatatttcaatgtaaaaaatgtgattttttttctagaaataaaatttcaaattcaaatagttgctttggggtttttatagaagatgcatatatatatacagatatatatatgttcatttctattaaaatcaatgtgctaatgttcatatgtgttaatattaataaaggtcctaggattaaatttattctgaaatagactcctaggattgtgaaagtttgaggttagtctggcaaaagacacatttaggggaatatctttctttaaaaaaaattttgtttttttgctgtctcttgatctcccgcctcacacattccactttattgacattatagaaaaattaattcatttcaacagcacttttacttgcattgctttttttttttttttttttttttttagacggagtcttgctctgtcgccaggctggagtgcaatggcacaatctcagctcactgcaacctccgactcccgggttcaagcaattctcctgcctcagccttgcgaatagctgggattggtggcacgcacaaccacgcccagctaatttttgtatttttagtacagacggagtttcaccatgttggccaggatggtctcgactcctgacctcgtgatgcgcccgcctcagcctcccaaagtgctgggattacaggcgtgagccaccgcgcatggccacttgcactgctttttagcagcgagctctcaggtcaatcaactgcttccttaggtttacaaactgtgggtgtgtatttataaacacagttgttttgtatatcctttgtagagcacgtggtgaaagtgacacaggaataaatgcaaacctttttttccccttcttttttcaaagacataaatcccaggaacactcacaaccgcagaaggggatttgatggacatacaaagaaactaaattttgtaccgccgcagaagtgaagcatggataagctcaaaggtatttaggcagtgttttatttcaagatttgttatggggacctccgccacgccctggtccgccttcaccaggccgggcaacactgcccagtccctgagacccggccgcccactagggagccgcgggggcgaggccgtgggggtggcctcggggaggaggtcccgagaaccacacttcccagagtgccgtgcgcagccccgcccagcccgccccgcccccagaggccgcggctcgcgggggctgaggcgagaggacgccaagcgcccgccggggctccgcggggccgcgcaggagagcgcgcgtccgccgggtgctcgcgcggggttggtgaggttccgctgagggcggccggggctctgggagcgtggtaacgtggctgcaaccttagcgacatcaggaagaacagggtcgaggatcgaggtaacgggacgctcgtctcccctcagtcccctcgtctcccctcagtcccctcttccttt

SEQ ID NO: 32368 - DNA, 2300 bp, Homo sapien
tgctttttatcctgtgtattcactctactttcctctttcttcacatgccttgtaatttttggttgaaaactggacatttccaacaaagtaatgtggcacctctggaaatcagacgtcccctccaacacacacaggtttgttattattgctgtttgttgttgttctgttgctgtttgtttatttagtgactttcttgaactaattctataaaatctgtattgtttgtcatgtgtggccactaaagtctatatttggttagcttagtcaacagatcataattgaacaaaaattttttttcaatgtcttgaagtcctctagcctttgccaggggactctgagaatgtgtattgggacatgctttcaatgctctggcaggcagtttacaactctgcctgtagttttcactctctacttgtgcagagattcaagttagccagaggtgggaaattacagcctcctcaggtcttccctactcatcatgcataatgcaccatatatgtacttggccttccagatttctggaatatatcagagcttctttttaaatttttaaaaattattttattttatttttatagatttagggagtaaaagtgtgtgatttcttacatgcatgtattgtgtaatggtgaagtctgggcttttgtgtacccatcacctgaatagtgaacattgtacccaacaggttgtgtcagatctttttaaagaccccctatggacatcccatttcctacctttttctttcagcttctttggccagcttcttgtttgccccaactcttatcatcacgttaggcagctgtgatattaaacaattttgcttgttgttctcaacaattgccccagggaaaaggctgttcacagtcagtgaacccttagatcagataaagacaacctttgcaaatagggctttcagaaagctgccagataagtcctataatgacagttctctgggctttgggcttttgagagttccaaatccattctggccatcttcagagactgctagactgctggttttcatggctgtcatgatagcaaggttgttaattttcaagacttctagggagctggggagagaaaaatggatttatggcaagttaaaatgccacaaatctcaccgttttaacaatatttagtcattttttaaaataaatactttttagattgtcgtaaacctttgatgaatttccagagttctgaaaatattgattttgaccatttttgccaatcttctcgctgtttttttggaggagcagatttttatggagaagatcttcactccaccatgtggaagtgggtaatatgattccttttttgaccagtaattactgaatgtctcttaagtacagggctatacctgaggaaagagtcacacagatttatctaaaaacttattgctactgtatacattggctgttggcagaggaaagagaaaaaaaagtaaagctataataaataaatttgtatactaattcagacatagatcagaaagcaaaaaaatagaaaaaagaatatatgtgtatactattatcattttgattaatggattcagggaaatttctggaagagaaatttttgaaaacattagccatttaaaaacaagggcatgcttttcttttttgaacagttatggattgttatctgtgagtcttacataagacttcctgcttaagggctatttcagtctatgagaggaaataatgggagaacacaattaatatgaatttttaccattaaaccacctttgatttaattatctcagagaacctataaccctttaaacaattcagcttcagagcaccctggagagacacagaaggttgtcagggacacgtgatccaggatatgtgtttcctggatgattttgtttcagctcatttattcctaacacagaagcaagcagagtaaacaaaaagataactcatgctgtaatgaggaccttgtgaactggaacaactgaagctactgaagagcctaacaactggacaaataaatgaaagaagactataaagagcaacaaatggaaaaagtactttctaagtacaaagtggtgtttggaagacagtgctgccagtgtttttctggtaattcctctttagatgctgtcattttcagaagaagctgatgtaaatgcctctacaacctaaagcccaggtgagctatgttgccttggtttgattatctaacgattccttaatctaacattgcaataagactgtgaagtagaagacagaaacttttttgtctatggtattagaagacagaagccctgggtgctgcttttaggggcagcatgt

SEQ ID NO: 32369 - DNA, 2300 bp, Homo sapien
cctcactccacctcttgccagctgttactttatgcttacaaataagttacctaacttgcctatacatcagtttccacatctgtacaatgcagattttaatagcacctacttcaaatgtatgttgtgaagattaaacaagttgatatgtaaagcccttaaatcagtccatgatatatagtgattaacacattcgcattcttactataattagtatttgatttatataaccattcactacttgcaaaactatttcataaacatattctcttatttgatccttatagccactttgtgtgttggcatatgagggaaggttgaggttgttatgtgctctgaaggtctatgttgggtaatgtgtgcttttttaaaaaatatctattttctagttaaggaaactgtagcatagagaaaataaataggattgctagaaatcacacacacgtaacatacaatttaccattttaactattttgtaatgtacagatcagtagcattaagcacattcacattgttgtataaccatcaccaccattcacctgcggagctttcatcatcctaactgaaactccatactcattaaacaataattccccattccttttctcctcatcccctagtaaccaccttactgctttctgtctctctctgtgtatttgactactctaggtacctcatataaatggagtcatacaatatttatacttttgcatctggcttatttcacttagcataatgtcattaaggttcatctatctagtagtatgtgtcagaatttccttcctttctaaggctgagtaatattccattgcatgtatatatcatattttgtttatctgttgatgaacactggggttgttcccacttcttggctattggaagttgctataggctgcatgtgttccttcaaaattcatattatgaaatcctatctcccagtgtgatggttttaggaagtgagacctttgggaggtgattaggtcatgagagctctgccatgggaataattgcccttatacaagagaacacggagggtttccttcctccttctgccacttgaggtgacagtgaaatgacagccatctatcaaccaggaagccagctcttaccagacaaagaatatgccagcgccttgatcttggacttcttgtgagaaataagtttctggaatttataaaccacctggtcaatggtaatttgttacagcagcagacaaagacagaagccaccccactttaaagttgagattcccgactcctggtctaatgctctttccagtattatcacaaagggaactgatggttctgtatcctaaaatctcccccaaactcaagagattttcagggaaatggtcatcatgtgtaaaataattagccagttgaaatattgatgctgagcttttgtgaataaatgaatcaaatagctaagctgggttcattcagactttatctaagtttctttaagcttatctctacattctcctttttcatattgaaaaaaggtaacaatttccagaaagataccaacagatcattagctgatgcagtatctccagaattctttttcttttttttttagaccaggccttgttctgttgcttaggctggagcgcagtggcacaatcacagctcactgcaccacgaactcatggactgaagcaatcctcctgcctcagcctcctgggtagctgggactacagacacatgccaccatatccagctaatttttttctatagtttttttttttttttttgagacagggtcttactatgttgcccagactggtctcgaactcctgggctcaagcaatcctctgcctcagcctcccaaagtgctgggattacagatgtgagccactgcacctggcccctagaattgtttctagaggtgaaacttcaaggtgaaatatagtacataactgcttttcagataaacaagtccagagagcacactctcttgtgctcttggcatcacttggcatcacttcatatttgaggtgtttcaaacccattagaacacgtgaacaaggcctgcttccaaagctggcttccatctggtagtcccattaacaactgggcacaccccttccctagagctctgtgtagacagtacctcctccctaggactacacaaggactgaaccagaaggaagaggacagagcaaagccatgaacatcatcctagaaatccttctgcttctgatcaccatcatctactcctacttggagtcgttggtgaagtttttcattcctcagaggagaaaatctgtggctggggagattgttctcattactggagctggg

SEQ ID NO: 32370 - DNA, 2300 bp, Homo sapien
attttcctcactgatattaaattcatattataagttcacatgcttacttggatagacttttggattctcaattttattgtaatgatgagattcaattttgcttggttttgttttgtttttcagacagggtctcatttaggctgaagtgcagtggtgtgatcatggctcactgtaaccttgaactgggctcaagcaaccctccacctcagcctcctgagtaggactacagtgtgtgtgccatcatgcccagctaatttttttttttttttttttttttgagagccaggattttgctgtttgcccaggctggtctcaaattggccttgagcaattctcccacctccacctcacctcccaaagtgccaagattataagcatgagtcattgcatccagccaagattcaatttttaagttttattctgccccctcaaacttccccatatttcccccaattcagctgcctttgttgaaaatgtatttaaaattaatgaaaaatattcagtgtggccacttgaagggttaatttgaaggtaaaattgaagattctaatttttttcctttttttattttttttattttttttgagacaaggattcgctctgtcacccaggctggatgcagtggcacaatcacagctcgctgcagccttgacctcctgggctcaacctattctcccacatcagcctccccagtccctgggaccatacaggcatgtgtccccacacctggctaatttctaaattttttgtagagacagggtctccctatgttgcacaggctgggctcaagggctccttgaactcaattgaactcctgggctcaagtcattctcccaacttcagcctctcaaagtgctgggattacaggcatgagtcaccatgcctggcctaacagttctattttattattattattatttttttagtggagacggagtttcatcatattggtcaggctggtctcgaactcttgacagctgatccacggccgccaggttctattttaaacacacttaatttaagtcatcccacagggaagcagaacagaaagccaacgttagacagaaatttgggagctgtccaaagatctcaagcccccaagaatctatcaaacagtctttaaaatctatttttaatacacaatttttgttagaaaacaaaagtaagagtgtatattttagaggtcaatgtttaaatttatcagtattaaacaagagaaccctaattggagtctgaagagagaagagaagggacagatatgtttttcaggttgggaaatggatctgaggaatgaaagtagtgaggataagcttcactaaaactgaaagcagatgttgaagataaaacttgccagtttcctcaatttctttttcagtatgtggatactaaaataacatatttgagtcaagttttaaagtcatactgtctttcagtagttaaaaacagacatcctattttcaaaagttataattgaattttttaaccttgccccccctacaaggccgcacagagctgaccttaacgtgggctccagcgccctctcctgacaaaacttactagtgccattaattcctacatattgccaaactcctctccagaaatgctgcactgatttgcactctggaggaaaagtgtgaaaagaggctaagatgattctaggctgaatataaacctggctaaggaagggcctaaagattggtcctgacatatgaacctctttgaggctaagctggtactaaagtagaccccaaagatgaagttggttttaatatagaaacttattacttctaattagaagagagaacatgttcctcgttaaatacctgtttacatttcagacaccaaataaaatgtcattttcttaaacctcacaacaatacttttggggagatgttattagtccctcttcagtagatgagagagatctgaggtttagagaaattaaattacaagttatataccctttggcccagtaatccccctttatgaatctacctgagggagataattatccaaaagtgaaaatatgtgtgcccgaggatgcttattgctgatttgctgttaaaaatccagaatactagagggaggagccaagatggccgaataggaacagctccggtctacagctcccagcgtgagcgacgcagaagacggtgatttctgcatttccatctgaggtaccgggttcatctcactagggagtgccagacagtgggcgcaggccagtgtgtgtgcgcaccgtgcgcgagccgaagcagggcgaggcattgcctcacctgggaagcgcaaggggtcaggga

SEQ ID NO: 32371 - DNA, 2300 bp, Homo sapien
taaccaatgaaaccttgatcaactgtaggttaaaactacccagttttttttaattaatagaatggaataagaaatagcatagccagaccgtgtgccatggctcacgcctgtaatcccagcacttgggaagaccaaggtgggtggaacaggagatcgagattgagaccatcctagccaacatggggaaaccctgtctactaaaaatacaaaaattagctgggtgtggtggtgcgtgcctgtagtcccagctacttgggaggctgaggcaggagaatcgcttgaacctgggaggtggaggttgaggttgctgtgagccaagatttcgccactgcactccagcctggagacagagggagactcctttaaaaaaaaaaaaaatagcatagctagagcctcaatatatgaaactcaacatagttgaaacacttcttatagtagatcaccatgtcagatgtaatttattcctgtaggtgttggaccaaaaaattgacaaacactgaacatatgtgtagccccagttacacttttactcactgtgtagattttaaagttgatctaacagatttattcatttacagtataggtataaatatatcctgactctacttttctctatttcctaggaggcttttgaaaatcaaatgaaataatatatgtggaagaacactttgtaaactttctatacaagtgttttgtaaatttggatttggaggctatccaaaaaaaagttgtagatattctgaattcaaagaattctataatggggttcacttttgtgaggctgccactatcccttcatcccctataacaacgtatggctgcttaagtaagagggacaatcgagtttgaactatttgtgaactttgatttttttgtgtgatctttctggctcttaaatatgaaagttgactattgtcacacaacaaagtcccttcccaagcactggagtgtcttgcgcaaaacccaaatccaatgtctgtcaaaaatgagttggaaaaaaatgcatgcaataccattattaagctcttactggacacaagccctagttaggtcttttcttccagtaaccaatctctagaattttttcaagtcactagttagcatatactgaatacccatttatataggctacaaaaccaaatgttacataggtaatctttaggctaaatgatttgctatttattcacttgaataaagataaaattcctaaagtacaacatatattttttattttcaaactctaataggtcaagtgaaaaatgattattcaaatatactcttctttcttgtggaaacaatccctttaatacgataacaattttttctggcgcttgattgaagctgtccttgaacagacaaaatttcccctgtcttccagaaatcgtgcttagttcaaactaaaatgtgatgtagcgcaatttctcagctggaagcagaacgattggtcttttcaggatcctttaagataggaatctacatttgcatcctctatctagtttttgttttttaggacaaagtctggccttttcgtccaggctggagtgcagtggcgcgatcttcactcactgtagcctccacctcctggactcaagcaattcccgtgcctcagtctctcgagtagctggaactacaggcacacgccactacgcctggctaattaaaaaaaaaaaaaaagagaccgggggtctccctatgttgttcaggctgatctcgaactcctggggtcaagcgatcctcccgccagggcttctcaaagtgccaggatcacaggcgagagccgccgcgcccagcggcaccccctatctagtgataagcaaccttcaactatgaaagaagcatctggcctgtggacactgtcggttatccttggaacttatccaatttaggaaaacaagtgagcaactaaccctccaaggccggctcacgacaccgggagaaagtggtgtaaaagacaatcgcggccacacaccgcgtgggggctgcgcaaagcagaactaggaagctttgctccggtctggacttcgtccctcccagatctctgagctagcaagcactgcagcccgagccaattgcgaaagaccaacaaagcccagcccagcggaaggaacggtttcggagttgtttttctttgatacgggagttcctccttgctctcgcccctactctttctggtgttagatcgagctaccctctaaaagcagtttagagtggtaaaaaaaaaaaaaaacacaccaaacgctcgcagccacaaaagggatgaaatttcttctggacatcctcctgcttctcccgttactgat

SEQ ID NO: 32372 - DNA, 2300 bp, Homo sapien
ttgagttttgatttcagggaagcattttaacgggatctggggtcagcctagggacaaggccttaagctactggaagctatgctagagtataatcaaatctctcagtgccgagaaaagaacttttatatgaggaaggtaaatccttttaaattaccaggcccagagagacattaaaatgagacagcaattacatcctactccccactttgttatgcattcatctctttaaactgcttactatagccacaagtagctaaaaattaacctaataatggtacactggacactgtaactcgcaccctatagcttaacgtatagccaaccactaaccaatactatttctacaaaccagtaattctttacaactttgtatcagtcaactccctgtcccctttttgcctttaaaaacctgattgtaacaaaggtggacaggagttcacatttaaggttacttgggtctgggtcttctgggcagctgtcctcactttggctaaagtaaatgctttaagttctatctcgtgcctcagcgtctaggttgacagtgtagtttgaacagtcaatacctgtcgagagttctgcagttttcagaacaatggttgttaaaattcgattaatctggcttttaagatggtcaaagttttgtaacgtcggtgtattggaaccacaccacagaaacagcggatcatgtaagtaaaagtcaaatagttgccacatcaataagctaatataaatgaagtaagcctgattacaagctgctttggacagtctgggtttccaactttgtttgtcggtttgtttaatttttgcctctcaagtttattatccagtattatgtgtgttgccctctgttcctcctccagcatgtgtgcctattttcacagcttttctcctccacgagtttccaagggccacaactggtcctagcaaagccttgtgaatgaaatccagcaattggagcagacaacttggttaagaaaacaaaaacaaaaaaccaagaaacccttcaagatacgagggctgagtctctggactatctcctcttgctgtaaccgcccaaggggttcacctttcccgcttcctagacagagctgattcatcaagacaggggaattgcaatagagaaagagtaattcatgcagagccagctgtgtgagaccggagttctattattactcaaatcagtctccctgagcattcagggagcagaggttttttctttttttttttgatacgtagtttcactcttgtcgcccagggtggagtgcagtggtgcgacgttggctcactgcaacctccacctcccgggttcaagcgattctcctgcttcatcctcctgagcagctgggactacaggcgcgtttaccaccatgcccagctaatttttgtatttttagtagagacgaggtttcaccacgttggccaggctggtcttgaactcctgactgcaagtgatcccgcctcggcctcccaaatcagtcataattttgcaaaggcggtttcattcccataacgaagtattattcaaaaatatggctaagacctgcgtccttccgcaacaacttactccctaaaaaaaccagagcagggccaggcgcgttggctgaggcctgtaacctcagcactgtgggaggcccaaacagttggattatttgagcttgagagttggagaccagcctgggcaacatggcaaaaatctgtcgctacaaaacatacaaaaattagccaggtatggcggtgtgtgcctgtagtcccagctacgtcgggggctgagacaagagactcgcttaagcccaggaggttgaggcggcaatgagctgaaatcgcgcccctgcactgcagcctgggcgacagagccagactcttgtctcaaaaaacaaaaaccaaaaacccagggcagcaagtctctctcaaaccccttggcttctttcccacttattcccgttccagttcctcgtctgtttcacctttcctttcctctgacactttcttggtagttccctgcgtccccaagtaagcctgcgcagactgggaagtctgggaagtcggagaaggaaggcgctaccaagccggcaacgcacgacctttgctttgcggcgcggccgtaaagcgccattacgcagagagaaagttacgaggttcgtggccgcggtttccccaggcagctggcgctggaggcttcggcgtcacgtgctggtctggatttttctcgatgcactggggaaagcggtggactcttatcgtgggagggctcttgatctgtgatttatagataggcacagctactcccgttcgggaaccca

SEQ ID NO: 32373 - DNA, 2300 bp, Homo sapien
ttttagtcgggtaactttttttccagagccctttaaatgaaatttttttctacattctcgttgaattgatgtaatcacctgaaatcaatcttacaaagccatcttaaataaatggggaatgctagttagaataagaagttaatattttgggtccccaagaaaattttctttagccaactaaggccaaatcctcagaaatgcttttcttacttattctgcaatagtctcactgctcccaagccccttgggagacttggaaaaatggtctgtgtcttccacacttctcagagcagatgtgcacagaggatgtgcacaccagggagaagcatggtcaaacactgcccacccctttatccttcctccgaggagattgctcaacccctagaccttggctaaggaaaaacatcctattgtctgaggcaaaaagacatcaagtcctttcatgctgtcctgggaaaggcggtttggaacaagttatcctgattctagagacgtgagtgttcccagctgcaccgtgacttgtttttggctcctaggcaaagtgcccagtttcctctgctcccaaatttctccaactgcaaagtagagataatccttgttacctttttcttgcagtgttctgaaaataaatagggcaaataattctaaagtgttttgagagatttggctgagggcatatttgcctagaaatgtaggtgggggtttttggtttattttggttttattttgtttttgtcagtgtttttgcttttggccagacgttggcatgcatttagaaaatctaaattaaattaaattaaattataattattcatctgatgataatggaacatttacaggatgcaaagcactgtgctaggcaccaggagaatgcagaaagggcacatccccttccttcaaggagtttacagctttctcagaagcaggtatgatatatatatgtgtctatatcacataatagagggattatagataagttacacaagtgtggctgtcagccatggtagctgatttggaatcccatcctgtaagttacagttggataccctagaaaaaacacccttactaagctttggtttcctcttatgtaaatgataatagctaacatttattgagtgtctgctacgtggcaggggtgttctatgcagtttatcatgttaactaacttaaaactcagaacaattgcagagatagatattatcatcatttccatatgtatatccctgtcttatagataaaagcactgatgctttagagaggttatataacttgtcccgggtcatagttaggaagtggtgaagataggatgcaaatccaagctggctggcctcaaattctgccaatccaaccactgtatgacactacccctcaaatgggaacacagtaaaacttaccatgcgtagtgaggatcaactgataataacgcataaaaagctgttagcacagtgtctgacacataataaatgtgtgataaatgtagaagtagcagtagaagagattagacacatacaaacaaccagaatcccgggccaaaaataagtgcacacctccattctttttatgggaaacctccttcttagataccaaccattataaccatggagttacagtggagagctgtgttgaggggagaactgcaacatttctgaatcagcatacaagtgatctataatataaggagcaatcatttttatatatgtccatttccaaatctcattcaaagaaggttaaggtatctgaagtacccttctattaaaattcagactgtatttgctagaacaatttccaattgagcaacgtaaaaatgcatctgctgccatttctcttcttccctcctttaatccctactccccaatttcctttagaaagaaacaacagcatggagtttcttttcaaggtcttaaaataaaaatctccaaaaaagggatgctgcttataaaacctttcagagttgtttgaaaaagaaaaaaaatgcataaagagccaagtgcttatattctggccaagttatgaggctctgagaacaagagcttgaggggaagactgttaaccccatccacgccaccagaattagctctttcccttttggtttgcaagcactgcctgtaaagccctcgcatgagaggccagcctgctagggaaatccaggaatctgcaacaaaaacgatgacagtctgaaatactctctggtgccaacctccaaattctcgtctgtcacttcagacccccactagttgacagagcagcagaatttcaactccagtagacttgaatatgcctctgggcaaagaagcagagct

SEQ ID NO: 32374 - DNA, 2300 bp, Homo sapien
tggttttaaggaatctacccactttgtctaagtttttaatttattaacataaagatgttcctagtatttccttattatcccttatagaatatttatagaatgtctataaaatctgtagaattgtcatttctctcattcctgatattgctcatttgtgtcttctcctttatttccctcattagtctggaaagaatctcctaaattttattgaacttctcaaagaatcagctttggtttcactgactgtctctattgtttttctgttttctatttaattaatttcagttctgatctttattatttccttttctctacatactttgaacttaatttttccttctttggtggaaaatgaggtcattgtttcaaaacttcttctcttcatatatggttatttagtgctataatttcatcctaaataactgctttagtgacatcccacagattttgatatgctatgctttcattttcagtcatcccatatattttgaatttcccttttggtttcttctttcacccattgactatttatgagtgttccacttagccttaaaatacttgcggttttccagaattcttttgttattgatttctgattgccttccattgtggtcagtaaacataatttgtacgacttgaattcttttaaatttattgagattcattttggggctcagaatacgttctatcttggtaaatggtgcaggtacacttgaaaagaatgtttattcttctgttgttggatgaagtcgtctgtaaatgtcaattagatcaagttggatgatacttctgtttaaaggttgtatatccattatatttttctttcaattattaatagatggctattgaaatctctaaccataattcatgttaattcaaattaaggaaaagaaaggcaggtttagttcaccaacctccactgatgaatgtgtgtgtgggtaagggtgtcactcccataagtgactcgagccttgttaaaagttcttaggccctttaatctgcccaagtaaacatgctatatgaataaaaacaaagcattcactatgaaaacagcttcaaggcaaatttccttcccattcaattcacttccttttaaccttactttttccctacatataaagctttatttgtatataaataccatatatttttgtatatatagtttctggagataccactgttgcatagtgatatagcattagtggtcttatgtgtttcaccttctttaatattgtaacacaaaaattggcatattcctgaaaattctaaacaagtatatagagaaagacggtcaagtttttgaatgcatgaattgaagaaatagtttagggattacctgcattatagtacatctagggttcaagagaatggtgcactcatgttgcaaaacttgttagacataaagtctagttttctactttgcattctgcagctaacacagataattgagagataatggacagctaaatctgttgtctttatgcacctttggacatcttgctacttttgacattttcaatgtctgtttttgaaatgtagtttgaatactcaattgatagatttttaagcttttatgtcactgcttatttcagttaaatcagagagatttcaggggagttactgtttatagattgttaaagatccctcaggcaacgtcaaggctgctgcatgtggacagtttcttgaattatagcacagaaactttaatacctacctcaagaatgataggggtcttaaataggcagtcatatttactaaagaaacctagagttttcttagattgccaaccttggtaagacaagaaatgtcagggtgacagagtttaagtggctcttttcaggtatcttacactgattctctatatttaagatgtgaaacagcctcataggagctgtttaattaagtgaaagtaagtctagtccttttggaaccgaacggttcagtgagcaaatacatatcaccaagtgaaggaagtggggaagttattatgtgcttcatagactcgatgacactttataaccccatatcagggatcctaaacagtgattggttgagaaaattatcaaactgagtttaaatttcggcaagtacaaaattgtcatgcaaaagtccaggacagtgggccactttcagtcttcaaagagaaagataagaaattctggattttcaaaatccttttgaagccttttaaggtaagatgaaatatcctttttactcagaaccaactgattcatttagaaagaactttgaatttcaaagatgaagccagtttgattttaagaagcgagtaccccttaatg

SEQ ID NO: 32375 - DNA, 2300 bp, Homo sapien
tttcctgctgctttcctccgctcactcctgcatagactctctaggtcttgtggcagttgtggactttgtccttagtcaccttggagttagtggatataacttgtcataaggggtggtaactaatcaaaaactacctcaacgtttcctctgctccctatacatgtgcatcctgatctgacaccaaaaggtagagagtatttctccttatgaatctgagatctccttgtgattgattgaccaacagaatatggaaaaatgatattctaggaactcttggcccccagccttcaggttgtgagaaggccaagccaaggagaggccatgtaaagaactaaagtgctcagaattacagctccagctgagctctcaggtaacaactatgaaagtggcatctgaaatgttctgccccaactgagtcttcagatgactacaatgctagctgtgagagataagaaaatggtagttgttttaaaatgcaaagtattgaagtggtttttgatatagcaatagataacaaaaatgcctagttttattgtaaatgttatccacagttttcaattttgttatctaattgctcctctgtttttatgtagggatttgaagagagtctaaaataatgtcttgtaatgcaatctgcccaaatctgcccagaatccaattctgtcataagattataaggttcttctagcatagatctcagttaagacccatgaaaccatcagagagtgtaattcagaaccagagcaaatcacagggaatttatagcttccccatatggactttggctttctaatcaaccctaaatgaaaatagacatctctttcctcattgtctgcaccaccctcccccgcatattatagttcacactaaatatgttgataatccatatatctgacattagttgcctgaataaattgggcactctaattttctagatccatgttaggagcatcagctcaattttttttttaacaattaaagcatttttttaaaagttacagtgagttatgcagatactgtaatcaagttaatagtttggctaattttcaagccaatccactcagtcattcaaagagtactgagtgattattaagaactgttctaggtatccaggcactgattatagatcagtagacaagcaaacatccctactcttaaggaaattaaggtccagcagctgatattctctaaattcttgttcagtggccatcctgccgtcacttgaacacgctcctgggaaattgccaaacccatttccagctccctacaacttttagtacgcttcctcgaaaatgttttggtaaatatcattttatccatttcattacattttcagtggtggcacagagtcccttcaagattagtttccttggatgctacccagctagtattccccttaatccaattctgatttcaaagaatcattaaaatgtggcaaacagggaatgattaagtgttaagtgttagatctaaatttcttgaataacacaatagctacttaaggggggtactttagtggacgctttattagattagtaggagtttgggaactttgtgtgtatatgggggtggggagatgagaggaaaaggaggtgagtagtagaggttgttaaaagaggaaaaaggaagaaataaaagcccatattctcaaaaccaacaatttaaggaactctagtattttagtagctttctccatgtacaacctggaaatgtacattaacaggaaactttctacccacccctgcctccgcctttcccatccttgggtctgctgggatctgtcggtgggtagaagacattgtcattgttcataagactgcctgaatgtgaatgacatatatttagaaatcaaaataaagttttgggaagatcttcaatttaatggaaactagtctagtcatttgggaaccacaagagctttttagggaaaatgtgcctctgccagctggaggaagtgtgggtgtaccggggtcccggtgacaccttgtgatgtcagtcacccccagcctgaggttgattggctatgaagagctgcagcagagtttaaattcctgcaccatcagagaagtgtccagaatatcaacacaagagtggcttcattgggcatagatttcctctttgagaacatcaacctgatttttgagactttttgaaaaaattctttgtgaactacggagggtaagtcattttcatcatttaattttttaaaatgacttttgctggttgtttggaaaatattaaatatgtatacatgtttgaggcattataccatgtagagagagatgggagagctgcgcttt

SEQ ID NO: 32376 - DNA, 2300 bp, Homo sapien
cctagaagaaaacctaggcattaccattcaggacataggcatgggcaaggacttcatgtctaaaacaccaaaagcaaggcaacaaaagacaaaattgacaaatgggatctaattaaactaaagagcttctgcacagcaaaagaaactaccatcagagtgaacaggcaacctacaaaatgggagaaaattttcgcaacctactcatctgacaaagggctaatatccagaatctacaatgaactcaaacaaatttacaagaaaaaaacaaacaaccccatcaaaaagtgggcaaaggacttgaacagacccttctcaaaagaagacatttatgcagccaaaaaacacatgaaaaaatgctcaccatcactggccatcagagaaatgcaaatcaaaaccactatgagataccatctcacaccagttagaatggcaatcattaaaaagtcaggaaacaacaggtgctggagaggatgtggagaaataggaacacttttacgctgttggtgggactgtaaactagttcaaccattgtggaagtcagtgtggcaattcctcagggatctagaactagaaataccatttgacccagcaatcccattactgggtatatacccaaaggactataaatcatgctgctataaagacacatgcacacgtatgtttattgcggcattattcacaatagcaaagacttggaaccaacccaaatgtccaacaatgatagattggattaagaaaatgtggcacatatacaccatggaatactatgcagccataaaaaatgatgagttcatgtcctttgtggggacatgtatgaaattggaaaccatcattctcagtaaactatcacaagaacaaaaaaccaaacaccacatattctcactcataggtgggaattgaacaatgagatcacatggacacaggaaggggaacatcacactctggggactgttgtggggtggggggagtggggagggatagcattgggagatatacctaatgctagatgatgagttagtgggtgcagcacaccagcatggcacatgtatacgtatgtaactaacctgcacaatgtgcacatgtaccctaaaacttaaagtataataataaaaaaaattaagagaaaaaaagaaaaaaaatgatattcattaatttttgatttctcaagcagacttcgcaactggaggaagaataaaatgactagactaggagaatatgcaaactattaagctagatttccctttgtaaattaaaaaattagtactttagtttatcaatccattctttgtggtgttggtttcatgaatcatttcaaaaacaatggatcactcctgctagctctagtcattttgttattctcataggaaaaaaattaaatatgaaaatgaatagaaaagatatatatagaagcccaagaaaaaaatgagctgacctcacatgcacgacaggaagggccacataaatggacaatatacagagatttaatttacaaaacaaaatataaaatctgcctctcagtggtatgattctcaaaagttctaacttttatactcagcatcatgttttagcaactatatcttacaaagtctgaccgacttaatcatatcaactttaatttatgagtcaatgaagtatatttcaggaggaaacatcaaatgatattaaaatattgatggttcatctgctcctttcccttattatttagtttttctttctttttttagctaaactaatgtaaaattatatctaatgacagcaagctttcctttctttcgacatagtgaaaacttgtataattatgaaatttttaaaaggttaaagcctttgttatttattttaattcaaatccagtatattattatacatattcggagcccaaactattcatcttcatctaaaccttcaattaaattccacaatgcaaacctcttggctctagaatcacgtttcttgtttattcaactgagcctgtgtcttgaaaaagtgttgaagtttgggggttttctggtgagaatccacgttctgacatcaccttggtcgtgacagtgattggctgttggaaggcaaagaagagtttatagccagcaagagcaagtgaatgagtgagtgagagggcagaggaaatactcaatctgtgccactcactgccttgagcctgcttcctcactccaggactgccagagggtaagatttaatagaacaacttcattatcataaaattagacactccatagtttacatctctgaacttggctttgaatttttcatttaaatgatgttattgcattgtacatggttta

SEQ ID NO: 32377 - DNA, 2300 bp, Homo sapien
ttccagaaagcatcagctgtagcgtggagagggactggtggtgggcagggccctagaactcccaagattttatgccctttgtcttccactaccagggtggatagggaaggactatcaggtgggggttggtctaggcatgtctgagctcagattctccttgggctagtcatgctgcggctgtagtgggggatggtggattatggctgcctttgctgagtcatgcaggttgtcagggaagtcggggaaagcctgcagtcacaggcctcacccagctcccatgcaaactgaagggccagcctcacgcccaccgtgtccccaccaacatccccaagtctgtttccagggagagagttagatgggcttgaaaacctgcccaaggctatccaactcccagatgtgaaagaaaagggctttagttcttccccagcctgtgaagtttgcactccagattcatgccctccccggagttctggccaggaggctttctgctccgttcaaattgttatgaagttcagctagagaattccttctccctgtggagttttaccccctgctcctctggccactcttctgatggatctctgtgatgccagacaacaataggctgcttggggactcagtgaactcctagggcttttttgctgcttcctctacccctgtatttcactggctctctaacttgactcagctcctggtaaaatcggaaacctctcccacaaacagaacttcagcttctcccgtggaggtgtgtgtttgggagaggagggtttccctttcccacttccacagttggggcactcacagtatttgaggtgtctcccaggtcctgcaggagcagtccacgtccttcagagggtctgtggctcctgttgggattgttggtttgttcttgcagtcaatctagagctaaaattcacaacgcaagcctccacatgcttctctgtccagagctgcaatctagtccttcctcccaacccatccgccatgatcctccgtttttgttttgttttgttttgttttgttttgttttgttttatgacggaatctcgctgtatcacctaggctggagtgcagtggtgcaatcttggctcactgcaaccaccacctcccaagttcaggcgattctcctgtctcagcctcctgagtagctggaattataggcgcccaccactacgcctggctaatttttgtatttttagtagaggccaagttttgccatgttggccaggctgttctcaaactcctgacttcaggtgatccaccagcctcagcctcccaaagtgctaggattacaggtgtgagctactatgcctggctcaatttttcctaactttttattttgaaaaatgtcaggccttcagaaagggaagactagagcgcctattagacctttcacgtagattcactcattgttaatattttgccatatttatgttttttgggggtttttttgagacggagtctcactcttgttgccaggctggagtgcagtggtgcagtcttggctcactgcaagctccgcctcctgggttcaagcaattctcctacttcagcctcccaagtagctaggattacaggcatgtgccaccacgcccggctaatttttgtatttttagtagagatggggtttcaccatgttggccaggctggtcttgaactcctgacctcgtgatctgcctgcctcggcctcacaaagtgctgggattacaggcatgagccactgtgcctagtgccatatttatgttcttatttctgtgtgcctctttatatatatacttacctattagactgagcccccattgcccacatggccatctgcttattgttagctttcctcctctcctgcctccctgccccactctctagcgtaggcttgctgaggtcacttaccaagttaactagaggcactcagacccatgtctcagtgtctgcttttgagaaagcctaacctcaggtgctatttcgtaattatccagttttaaagctgaaatccaagaattttttcttttttttccccaagagaagatgccattttcatcacaacatgtttacatactcaaggtaggaacttcaacactttgctccttctgaccatacccatttacataaacaaatgcagtgctcccctggcctgccggcagctatccacaccagaaagaggaaaaggtagactggtaagactcaggctttcaagttatttcaaaaccaatagcaaagtaagacctgaggtacatatagtttgaatttagtcttttgaatgccttttaagagagttttgaaatcagattaagacaagcaag

SEQ ID NO: 32378 - DNA, 2300 bp, Homo sapien
atgaaatactgttttgtttgtgttttatgttttggtttttgtctatttggagggttgagataaattgacagtttacacttaaatcttattatatatcatttgtatatataatatacaactgttaaaggtgtgtttcactgtaggtagttcttatcacaaagtataggttaaataactcttacataatttcttattgatgctttaatatatagtcataatgtcaatgacctttacaggtattataatatttttatattaagtggaacctctcaaactattacaattattttggtagccagtttgggcaaaacaagagagcaggcaatcgcactggaaaggcttattctagtataggtttgttacttgtttcattaagaaattgagtgtcttaaattgtccatcttataaaatttgtctaaatccaaactcacaatattttcctcaaaaccattttcttctgcattttttccaatatgaagaaaaaatcaactttactcttccagttgctcaggtcaaaaccttggtgtcatcctgattcttgattgttttctcacaggccacatctggtacctcagcaaatcctattaccatttttccccaaacttcttcagaatatgaccacgtctcatcatcccttctgccgcactcaggttcaagcctccatcatctctggctgggattattacaagagcttcctagccattctctctgcctttttcctacttcagtcactcctcaatcatgcctgtgcttaaaacctccaaggacttttcttctcactcatagcaatgtcaaaagcattgcaatgacctacaggtcctataccatctgccatctaatacccttctgacctcatttgttgctattccccttgctcaggcctccaaccaaagtggcctcttctctgttcctggaacaagtcacaaggcttttatttctggggcactatttttcttatttcttcttcctggaatggtcttcccatagacagtcatatggctgcaggcttatctgagtctgttcatgctgctactacagaataccacagactgggtaatttataaaaaacagaaatttatttcacacagttctggaggctgggaattccgcaatgaagaggccagcatgttcattgcctgacgagggctgtctatctcttcttccaatttggcaccttgctactgcatctccagaggggacaaatgctgtgtcttcacactgcagacaagcagaagggcaaaaagggactagctagtttcttcttgcccttttataaggtcattaatcccattcatactggggtctgccttcatgacttaatcaccttctaaagagcccatctctcaatactgtcaccttgggtttaagttctaacatgggaattttggagggacacgtacattgaaaccataacaaggtctttactcaaaagttgccttctcattgaggccttcccaggacttcctatctaaaatttcaacccagtgtccccacccccaatgcttgttactccccaacaatactttttctccttagacttagtatatgtcactatctaatctatttaactcatttatcttgtttattatctgtctcccttattggattctaagctccaggaagacagggatttttttctgtcttgttttgttcactgcagtttcgccaatgcctgtcacacagtaggcacctaaaacatttttgttaaatgttgctgaatttcacttagataaaattgacatcataaactttctacataaaaggatagcaaaaatgttttccatttctaaacttgttaggtattcagtcagtcctaattagcagttctgaaatcaattttgattatctgacaacatgatgtccaaactgaggtatttatattttctgtttatcccactttctggaacatttgatagtagctttctaccacaaacacatttttagattaaaattacttcaccccctatggttatctgtgggcgcttgtaacaaattgtttgctagcgctgagtgagccagtgctgattggccattgggaactctaacaaactttaaatttcagcaaaatgcccagagacttctaatcctgcaacaagaagccaggtattctgaaggtgaaagataccaggtaatttggctttcatgttcttgacagcaaatagctttatatcatagttgtttacgtttttaagatgcttgccacccaagtatggttttattacttttgaaaatcttctctactgagcaaaactgtgtaatatttggtgctttgttttataaaataggaaatgcgttaccat

SEQ ID NO: 32379 - DNA, 2300 bp, Homo sapien
gacatacatcctcagcttacaaagatgacgggattaagagattaaagacaggcataggaaatcacaagagtattgactggggaagtgataaatgtccataaactcttcacaatttatgttcgggagattgcagtaaagacaggcataagaaattataaaagtattaatttgggggaactaataaatgtccatgaaatcttcacaatttatgttcttctgccatggcttcagccagtccctccattcggggtcactgacttcccgcaacactaaaccaggaagaagtcaataacaagaattattattttacacccagctttacaatttctctcttttgtgctctttgcctttatttctcagactggcagacacttagggaaatagaaaagaacctacgtgaaataatgttgaattatcgggggtgggttcccccgatagtttagttttgggaggttgtatgtgtccaggaatttatccatttcttctagattttctagttcatttgcatagaggtgtttatagtatagaataaatcttgttattgaatagatcaataacaagttctgaaattgaggcagtaattaatagcctaccaaccataaaaagcacaggaccagatggattcacagctgaattctaccagtggtataaagagctggtaccattcctcctgaaatgattccaaacaattgaaaaggaaggactcctccctaactcattttatgaagccagcatcatcctgataccaaaacctaccagagacacaataaaaaaaagaaaacttaaggccaatatccctgatgaatattgatgtgaaaatcctcaatacaatactggcaaaccaaatccagcagcacattaaaaaacttatccaccacaatcaagtcagctgcatccctaggatacaaagctggttcaatatatgcaaatcaataaatgtaatccatcacataaacagaagcaaagacaaaaaccacatgattttctcaatagatgcagaaaaggcctttgataaaattcaacatctcttcaggttaaaaactttcaataaactaggtattgatggaacatatctcaaaataataagaactatctatgacaaacccacagccaatatcatatttaattggcaaaagctggaagcattccctttgaaaactggtacaagacacagatgccctctctcaccactcctattcaacatagtattggaagttctggccagggcaatcaggcaagataaataaagagtattcaaataggaagagaggaagtgaaactgtctctgtttgcagatgacatgatcctatatttagaaaaccccaccatctgagcccaaaaactccttaagctgataagcaacttcagcaaagtctcaggatacaaaatcaatgtgcaaaaatcaaaagcattcctcacaccaacaataaacaagcagagagccaaatcatgaacaaactcctattcacaatcactaccaagaaaataaaatacctaagaatacagctaagatgggatgtgaaggacctcttcaaggagaaacatgaaccactgctcaataaaataagagtgaacacaaacaaatggaaaaacattccatcctcatggataggaagaatgaatattgtgaaaatgaccatgctgcccaaagtaatttatagatttgatgctattcccatcaaactaccactgacattcttcacagaattagaaaagaattactttaaatttcatttggaatcaaagaaggtcatgtatagccaagacaatcctaaccaaaaagaacaaagctggagacatcatgctacctgacttcaaactatactacaataatgcagtaaccaaaacagtgtggtactggcaccaaaacagacaaagaccaatagaatggagcagagacatcagaaataatgccacacatctacaaccatctgatcttcaacaaacctgacaaaaacaagcaacagggaaaagatctcctattcaataaatgatgctgggaaaactggctaggcatatgcagaaaactgaaactggaccccttccttacaccttatacaaaaattaactcaagatggattaaagatgctctcaagtcactccagcacagcgttggtgctgcctgggtatcagaaagcaagctcacattgctctccagtacgtgtaagccttttcttttcaagatgcctgaggaagtgcaccatggagaggaggaggtggagacttttgcctttcaggcagaaattgcccaactcatatccctcatcatcaataccttctattccaacgaggagattttc

SEQ ID NO: 32380 - DNA, 2300 bp, Homo sapien
caacaacagagcaaaacaagaacgctttggttctctgggtctctgtccctgattgcatagcgggtcattgttgggaaatatttcctcacctggcattccaagaaatggagagctccacagctgtatatagtcctgtcattaaatacaggagtgttctatcccgctggaattaagaaaattggtagaaccagattgtggtctgaaatcttttttcagaaatgctgccatcgtgtggcactgcggagctatgaccagaagagtcctgtaaagggtcgtatggttcatctcaagatggctgggctccagcataatctattcctataattaattctagcttcatattgaatcattcccgtgggcacagagtaaactacagtaaatcctgtggaaattttgttgtttttagaattttcagacttccctccactaaattgacaacatgacacgcttatgcgggtatgtttaaaggaaaaaaatagtttttagaagcagaaaaaagaagtctattttgcaactttataatctgtgtgctttctattttatagagatagtcgtcatcttacttattaaaatgggtgcttattacctacaaaccaatcatatcaattcatctggaatacatccaatttaagggagacatatttccccctaccaaatgttcatgaaacctatgaattagctatacactatcactgcaagacattatttaatctatatttatattaaaagtaatatttggcaaaaggaagctgacactttaggactaataaaaaccacaattacttttgcagcaacctaataataaataggaccatttatttttcatctcaattacacacaagtcttaacaataaaggtgtaaggtaaataaatagtgcaatctgcatttcacaactgagaaagcaaatgaagataagtaatctcaaggcaatattaaatattttaaaaggacccagagctctgctatccctgaattctgctctaatattcggactttccctgtaattttctttcattcagacaccttttaaatacctagtaaagtgttttttaatacagaaatttttaaaaatgtttttctttttaagtggcctactttacataccttgggagaaaaactagaaaaaaagatgattccaaaatcgaatctgttcctttagaaatgtgcaaaatttccttattgatgcatacaatttaaagatcttacgtctactctcattttaataacctgttcttttaaaggacattacaattcgtgactgcctgcccctcttaaaaatttcataatagttaacacacatatagtccttaagatacgcagagcatttgcatctaatatgtgctaagcattgctagtttaacatactaattcatttaaacccctcaaaaaccccatgacctaggtaatagtattgcatttcatggatgagggaacaaggataggtaggctgggcgatttgcccaaggttgcacaggtcagcagtgacacagcggaattcagaaccacggtctggctcctgaagcagccctctcaagcagtcatcctgctctcagtcagaaactgctttacttctgcaacatctagaataaattaccattcttctatttcatatagaattttatattttaatgtcactagtgccatttgtctaagtaacaagctactgcatactcgaaatcacaaagctaagcttgagtagtaaaggacagaggcaagttttctgaactccttgcaggcttgaacaatagccttctggctcttcaataagtacaatcatacaggcaagagtggttgcagatattacctttatgttacttaaaccgaaagaaacaaaaatccattctatttaattttacattaatgtttttccctactttctccctttttcatgggatccctaagtgctcttcctggatgctgaatgcccatcccgtaaatgaaaaagctagttaatgatattgtacataagtaatgttttaactgtagattgtgtgtgtgcgtttttgtttttttttgttttaaccacaaaaccagagggggaagtgtgggagcaggtgggctgggcagtggcagaaaacctcatgacacaatctctccgcctccctgtgttggtggaggatgtctgcagcagcatttaaattctgggagggcttggttgtcagcagcagcaggaggaggcagagcacagcatcgtcgggaccagactcgtctcaggccagttgcagccttctcagccaaacgccgaccaaggtacagcttcagtttgctactgggttgtgcattcagctgaatttcatgg

SEQ ID NO: 32381 - DNA, 2300 bp, Homo sapien
attcagggcacaggaaatgtcttcagaatgaactgatgaatagcatgagctagggctgtgctccagacccaccagtcttgcctttgagaagctcacagttaagagaagaacatgaatatctaaattaataaactgcaggatcaggtaataggtagccataattacctaaatattagcagcatgttatatgtgcctagagaacaaatgaataattcattaaggtggatggatggcatgggatgccatgctagaggagtacattaagagctgttaaagctaaattgtgtccccccaaaaatttctgtgttgaagtcctaacccccattacctcagaacatgaccatacttggagacagggtctttacagaagtaatgaagtgaaaacaaggtcatgagggtaggccctaatccaatatgatgtataagaatagacaattaggacacagacgcatacagagggaagagggaagacggcgtgaggacacaaaagcggggccatctgcaagccaaggagagaggcctcagaagaaaccaactctgccaacacctcgtgagaaaatacaatttttcttttctttttccttccttccttctttttttctttcttctctctctctctttctttctttatgagacagagtctcactctgtcacttggagtgcagtggcccgatcttggctcactacatcctctgcctcccgggctcaagcgatcctcccacctcagcgtccctaatagctgggaccaaaggcacacaccgcaaagcctggctaatttttgtattttttgtagagacaaggtgagcaaataaatttctgttaagccacccagtctctggtactttgttatggcagccctaacaaacaaatacaggagcagattatgagaatttactaaaccaaaccacagaaattaaattttatcctttcagctgccagaagcccacagaggtgtctaagcatcaacgtgacaaataagcagctttggttctgcaatataacctggaaatagtgaggacaccgacgtggagaatagagatgggagttgacagggatcaattgttctaatgcggaataatgcaagacataagatcaagccagcaggagtgagaaacagagatcatatcagggtgatatctgtggggcaaaagtaacaagaagataaggtgtaggcggtggagggtaaaccgcgaggcttccatgaagaagagtggcctgggaagtgaggaggacagcgaagccccaaacctcaccttgggatacgggaagtgaagcaggttccagagaaggggacaagataatgacttagggtaggataaatttcagacaattgcagagcatcacattagatgtgttcagaagagtggaaataaagttctgtgcctaggccctcatgcaggattctgttgctagaagtcagtgctggccgcagggagaccggagatcacagtggaggcaccagcgatccgagagtcctatgacgaatccctgggatccccacaatgtgtggagacagaagccaaccaaagagcgagaaagcatctccaaaccagcagaatcaggggcaggaggcccgccaaatgcacagcaagtcagccttggtagtttgcaaatggaaagatttctttgacccgctggagacttcagctcaggctggatgtcgctaattcacaccatctcaccaaaaggttctttccctgccctttggtgaatcgaggcagaagtggctggtggataactgggacccaagagttatctcagcgtcgggcaggcatcgacagctccaggagccctttccctgcaggcgggctggcgggtgagcgattccctcccttcccaggccttcccgggaatggaacgtgggcgcccgcgcccgggctccggttccacttggaacgcggactcgggagccgccgggcgagcgcgcagaccgcgggggcggctccctcgcacctccccgctcagcgcgccgcggcggatgggcgaggcggggcgaggccagagggaggcgggccaaaggggcgggcgagaggacgcgggaccgcggggaggtcgggggcggggagcaggcggcggcgggcgccgggaagaaaggaacatggctcctgaggcgcacagcgccgagcgcggcgccgcgcacccgcgcgccggacgccagtgaccgcgatggtgaactccagtcgcgtgcagcctcagcagcccggggacgccaagcggccgcccgcgccccgcgcgccggacccgggccggctgatggctggctgcgcggccgtgggcgccagcctcgccgccccgggcgg

SEQ ID NO: 32382 - DNA, 2300 bp, Homo sapien
tggagtacaatgacgtgatctcggctcactgcaacctccacctcctgggttcaagtgattctcctgcctcagcctcccgagtagctgggattgcaggcacccaccaccgtgtctggctaatttttgtatttttagtagagacggggttttgccatgttggccaggctggtctagaactcctgacctcaagtgatccacccgcctcggcttcccgaagtgctgggattacaggcatgagccaccacacccggccaaattctcctttctccagttccttcacttatcattctacttgctatctttaggagaaaatcaaactatttgctgtcttcttgggtctcagcacagtcaacactgccataattttttccaccttccttctctatctgaatattcactaccctcagacatccactttgtttgaaacgtgcttatgtatgtaccacgtcttcatattcttaaaggatgaccctaccaaagtgatgtcttctccttctaaacttggaattttccagtgtatttatctgactcttaacaaggaagaaaatgatatatcttgaggatatatcttttacttttctaaatggattaaggctttttttttctttcggtcatgttttctttttatcctgaagtgctttatcccagcctcgatttctacttagatgtttcttgggctgattagattttagcagtgagaatacttctaccggtattccacaaattagcgacttattaattgtgtagaatttgactaggtagcaaatgtgaccacttgaagatacagtactgatcatcaaacagtactcagaacacgccatgtatttcgtttcacactgtgttaagagcagtaagtgtaacggagatgtttcacaagaatctgttagttatttcaaggaacgttaaatgttgaatgtcattttccagaaaatataaatgggttagagaataagtgaaaggaatttagaggaatctatgccatttttcttgtaggacttgaccagtgattaacatccattatatattacacatcaaatcaacaatcttttttttttttctttaagtagagacagtgtctccctatgttgcccaggctggtctcaaactcctggcctcaggcaatcctgctttggtctcccagagtgctgggattacaggcctgagccaccatgcatgacctgttttgtttgtttgttttctttaagagttggtttgtgcttgtgttctatttgtaatttcatcaaccttcattgagtatattcagtgcctaccctaaattaatagaacctgacttaaaatggaatagtaaatcagtctgtttttgtgtttacagtgggatcatgaaacctggtctcaacgccatcctgggacccacaggtggaggcaaatcttcgtgagtataagagagtataagtaagcgttttctgtgcacttttaatgtgcttttaaaagccacttttttttgtgtgcgagcaggtatttattgagcatttgcaacgcatgtcaggtctggttctaggtgctgtggataactgtagttgcgtggttttttcccaaagaccaggtagtcttattaggttagctttactaataggatttgataaggtgattgacatgtagcagttgaccatgttatcagctaatagggaggaaaaagaatgggagaatattaaaagtagggaaaggaagcagaagatgtaagtaaaggcatgagtcttagataaaagagcacattgcctgtgttagtacctccaaggtcagacagctggaagggccatttgggagatctgtacttgatcagccaatggtgtcttgctttatgttttggggctttattgtaatgtacaatgaaaagagaaaggtgagaatttttaaaagcataattttagttaaaccatagaatttcttgaccagttaattttctaactaaagtagaatttggattcaaagtagccatgagatatatagcatgtgttggagggaaaaaaaccccacaacatatatattctcttataggttattagacccacaacatatatgtcctcttataggttattagatgtcttagctgcaaggaaagatccaagtggattatctggagatgttctgataaatggagcaccgcgacctgccaatttcaaatgtaattcaggttacgtggtacaagtaagtattagtgggtttgcattttctgtttcctctgtttctatatgggtaagtgctttggctgatagttcaatgtgcttccagttgattatgtgacatggtcctagaactgacgttctttacagcagcttttc

SEQ ID NO: 32383 - DNA, 2300 bp, Homo sapien
aagcaattctttggcctctgcctcccaaagtgttgggattacaggagtgagctgtcactccttgcccagcaattttctatgtataggttttttttttttttttttttttttgagatggagtctcacgttgtcacccaggctagagtgcagtgacatgatcttggctcactgcagcctctgcctccctggctccagcaattctcctgcctcagcctcctgggtagctgggattacaggcatgagccaccatgcccggctaatttttgtatttttagtagagaagggtttcaccatgttggccaggctgctcttgaagtcctgatatcaggtgatccacctgcctcggcctcccaaagtactaggattacaggcgtgagccaccgtgcctggcctctatgtatagggttttgatttgtttttactttgcataattacagaatgctatattcaactaagtatccatttttaaaaatgtgcttcatatcagtttcgtgtgtgttttctccatttttgttcagtctcctcctgtagtgccttcagatcttgctggaaatgttttcattttttctggtatcataaaattttattcttttcacttatctgggtgagctaaaaagaaaattaaaataaaatttatttttcggagatttttcagtttttgcaaacagtcgttaacggccaggtctgaaaactttatcttaatttttttttttttcttgagacagagtctcactctgtggcccaggctggagtgcagtggtgggatctcgggtcatttgcaacctctgcctcctgtgttcaagcgcttcttgttccttagcctcgcgagtagctgggattacagcctcgccaccacacccagctaacttttgtatttttagtagaggcagggtttcaccatgttggccaggctggtctcgaactcctggcctcaagtgatctgcctgcgtcagcctcccaaagtgctgggattacaggcatgagccaccgtgctggccttaattttgtcttaaaatgaagtatgactaacatgtatttctatatgggcctttaagggtcttgaaactgacagaaattaattcaaaagaataattttacccaaatgtttgggcgcatcatgaatatataccttaaaattcttttaaaaagcatgcggtatggtatatttaaaattctttttaaaaaattatgtatagtcaattttcttatctaggcttcctagctaaaactttcctgcattgggtgaaccattaatagttattcctagtgttgatttaaacaacttaaatgatactatgatttttgtttgtaaatgcaaaccagaaaatatctgcatgcaggtactaatttcctagggtagatgcagcaggtagatgttgggatggctacactcacaaagcctgatggcccgtttcctgaacatgcgcaatcactttctagcctttccacaccatcggaatattgcacagaagtatgtcagtcacaggagtgtaaagaataacatttaaactatggtaatattttcattcagtaagtttctcccctttccttccttgggttagattcagtgcctgatttttttaggccctggggcgcaagcatccactttctcagaatcccattcaccagaaaccacccatttaacttgctctgggtgcgagcagcgcttgtgactgggcaacctgtgcgtcagcgtccccggtgcttcggcgctccggccagtgacggcgaccaaacccagctaggtcagacgaggtactgatcagcccaatgagcgcctggtgattctcgtagttaatcactctggttcattccgttcgatcccggaggcgggagtgtttggcttgtccctgcgtgtcacggcagggtgaccctagccccgagggagggcggtggtaccagtcctgctggcggctcagcgcggcaggacacgtgtgcgctttcagccgggtcgcagggcgcttatcgcggcccggcagtcggggccacgcctcacccccgcccgcgaaccccgacctggggaaacccggggcgctggggaggggccactgcgttcagctctggcggtccacagcccgaagcgcggcttaggaagttcgtgtcagcgctgcctgagctcgtcccctggatgtccgggtctccccaggcggccacccgccggctcccatcgtgacctccagccgcagcgcctcccacgccggccgccgcgcgaggggagcgctcgggcgcgccgggtgtggttgggggaaggggttgtgccgcgcgcgggctgcgtgctgtgcccactcaaaaggttccgg

SEQ ID NO: 32384 - DNA, 2300 bp, Homo sapien
agctgagcttgcaccactgcactccagcctgggtgacagagcgagactgtctcaaaaaaaagaagaatgagatcctatcatttgcaacaatacagatggaactgaaggtaattatgttaagtgaaacaagccaagcacagagacacaaacgtaacatgttcttacttatttgtgggagctaaaaattaaaacaattgaactcatagagatagagagtggaagaatggttaccagaggctgggaaaagtattggggaggtggggggaagtgggatggttcatgggtacaaaaaataattagaaaaaataattaagacctagtatttgctagcacgacaatgtgactgtagtcaaaaataatttaattgtccacttaaaaataacaaaaacacattagtcacatgtggtggcacacacctgtaatcccagctacttgggaggctgaggcaggaggattgcttgaaccctggaggtggaggttgcagtgagctgagatcatactgctgcactccagcctgggcattagagtgagaccccatctcaaaaaaaataaataaataaataaataaaatgaaaaaagtataattggattgcttataatacaaaggataaatgtttgaggtggtggataccccatttaccctgatgagattaccacacattgtgtgcctgtatgaaaatatctcatgtaccccataaatatatacacctactatgtacctacaagaaataaaaatttaaaattaaacagaaaaaaaaaatccctgacggagttattgcttaatgattacagagtatctgtttggggtgacaaaaaagtcttagaaacagtgacggtgacacaacattgtgaatgtaattaatgctactgacttgaactcttaaaatgtttcaaatggctaattttatgttatacatattttaccatattaaaataaatttataaaaatagataaatggaatttcttaacaacttcaagattttttaaacgttcatttcatttcaataaatatttacaaaatgcctaatttgtcctaggtactgcacaacacagtgaataatcaggatagtgacttaaatataaacagaacttaacagcaagacaaattcagtaatcggtattttgtgaatctcatgaaatttatcatgacaactctgtaaggaaggtattattgttatcactattttattgttggggaaggcttggcttaagaagcttttcaaggccagtaaacagtggaattagaagcacttagtaaatgtcatattttttcttttgacatctatcatgttttcagaatatgaaatgcctatttaactccagcctgggtgacaaagtgagatcttgcctaagaaaaaaaaaaaaaaaagccaggtttggtggttcatgcctgtgatcccaacactttgggaggctgaggtgggaggattgctggaggccaggagttcgagaccaccctggccaatataacaagaccccgtctctatttaaaatacacacacacacacacacacacacacacacacagagagagagagagagagagagaaatgcctatttagcacagtcttgacttcctattttacttttggtttaggaaagaataacatgaaaagtatagcatgctccaagtatacagcttctcggtcctctttagatttctggtgggcctttgcattgaaacctaactctttgttttggtttaattcgcttccttttcaaattatgtcatagtcctgcttggttgtttttttgtgtgtgctagaaggcagggcctgtgagaggagaccctcagttacatcagggttaaaaaagcacaggaagtttacgcacagagcaaagccatttgctagaattggtttttatccttccatttcgaaaataaagttgctgtttgtgttggagatgctgtcatcagaattccgcggcacaaagagaaagatacaaaaatatctctctgacatgtaactttcccccttcttctagccccttgctaggaatgccagaagaggatcccacgctgactggaaccattaggtcttttgtttgaatcccagtgatcgagaaagaaatgtggttcataatcagctagtagtggagaaaaaaggaacccaaggagataggagagctgttaatttcactcgggacatttcctcgaggctagtttactcggaaagcctcaatgttccctggtagctgcaggatctactttgggggctgccaagtttcctctctcattctttctcctgccccaagagcaggcaggaaggaaagttcctggactgatactcgtctgttt

SEQ ID NO: 32385 - DNA, 2300 bp, Homo sapien
tatctctaacgctattttgtgttttgcatatagtattatagtatgtgtatatcactttttgtatagagtaagcaattgaataatttgttaataaaaataataccacattgactgatactgctatagacatagcttgagttttatgtctcctttttgctcattttctaagacttaggagaaagaataaatctaaaatgaccattaaaacattctccatttcagcttgctgtgtaacttaggaagtataaaactatacttctctttatctgcatgtaagtttgctgttaaaatgtgaatttctaaatgtgtatttggaattatttccgtagtttatttctgcaaactatgtaaatttgttatatgtgtgagtatgtgtacatatgtatattttagagtaatataaaattaaagggaacaatcttgcatagctctttcaccagttttaaattattgatacgttatttttaaggactcttgacaaactaggggcaattttcttatagtggagacccagtgattatcagcagatgaggaaataggttaaaaattgctatatggcaatttgtatataaagtaataggatgtgagaaaaatactgaatcttaagaatgacatggaattctgtggcagaaacaaaagaaaaagttgatgtagtatataccttcaactgtgttttgagttgacttttttttttttctttaagctttgggtaaaaatgtatgaggagggagagggcccaatataaatatttacatcttcttacctttttggaaatggaagaagataaatcttgagtttttctgcctatattaatcaggaattgccctttgaaaaaagtgctaaataaatattttgattttttttttcaagggaagttaggtgaaagaaggaaaaacatcacaggaaagactgttaacattctgtttgttgtctgagaggtgaggaaccaaagggaggcaactaaagcgggaaaccatcttgctttttctaatcagttcttggaacagaaatgtggaagctacctttaggaacatggagaatttccaaaccaacaggcaaaggaaaactaacgcacaaaaatgacattctgaagatgcaggtttcagccaggcgcggtggctcaagcctgtaatcctagcactttgggaggccaaggcaggtggatcacctgaggtcaagagttagagaccagcctggccaacatggtgaaacctcatcttgaccaaaaaatgcaaaaattagccaggcgtggtggtgggtgcctgtaatcccagctactggggaggctgaggaaggagaattgcttgaacctgggaggcggaggttgcagtgagtcgagatcgcgccattgcactccagcctggacagcagagcaaaaactccatctcagataaataaataaacaaatatgcaggtttcatttttgttttgaatgctttacattactattcctatcttttactttaaaaactaagatgaggagtgatgttgtcaagttcaaaggcatgagggtgattgatggattgaggtagatagccaagtttgtctgtttttgttttttatagttacagagtctcactttgttgtccaggctgaagtgcagtggtgcaatcatagctcactgagattgccaggttcgacaaagaggaatttataggatggggatatagggtagacttgactctgctttatccgggaaagcttttaaaactctgagccagttaactttgagtaagcataaaacatactgtattggtgtttgtatttttcatgccacaatattaaaatggaattttaaatgtagattattataatctataaaagataagtatgcatgtattaggatactggaaaatatgcaaatcatagtaaaaaaaaagggactgctctagtttttcagttataactgaatttgccatgtgggtataggcatagtgtaaattacattaatgtagtaaaacatcaattgtggttcggtttgtctttcatttatgtgtagtatagaaatcacctttctaatatgtgttgccaaactatttgccaccatctatttggtgaaatattcattgtcattgtgattttccacaagtataagttcttaagtactttatagattcagaagtaaatgctgtcctgttctccatcagctgttcgtttgttacagattttgtatttctttttttttttttttgagatggagtctcactctgtcacacaggctggagtacagtggtgcggtctcggctccctgcaacctctgcctcccgggttcaaacgattcttctgcctcagcctcctga

SEQ ID NO: 32386 - DNA, 2300 bp, Homo sapien
aacctgtaactttataatgcctttaagaactttccttcacagtctattatgtcaccagccactctcctctcttctttcctcgtctctaaggattgcagtcaaggaatttgcctgggtgatcagtagtaatgactaaggttgcaagaaaaaattattagcgagaactcactactcaaatattgtaactaaggtattttatcagacacacacacacgcacgtgctgctcttcttcctgccacagctgcctaaccagaacaccacaaaccatggctgtttttctttttctttctgagacagggtcttgctctgtcgcccaggctggagtgcagtggtgcgatctcggctcactgcagcctcgaccactcaggatcaagagatcctcccacctcagcctccggggctgggaccacaggcacatgccaccacgcccgggtaatttttgtatgttttgtagagccgaggtttcgatgtgttgcccaggctggtctcgaactcctgggctcaagcccgctttggccttccaaagtgctgtgatcacaggcgtgagccattgctaccggtctcattgctctttttcatcgtcattgtaatctgtcactttagtcgctcattctgaaaccgaaggacagcctcattcctccgccctgacggaaagaaccgatgaggccttgctgcacgttagcagtgggaggctcagaaaagcccgtggagcttttgagactgcaaattccctggctatttccacctggagcctctttgtcacatccggtgaattccctcatctacagaaagcggctgctgaaaaagacatcaccagctacaacgccttgagtactacagcgctccctgcgcaaagtaaaacccaagtcttcggatcaaaaccagccggggctgtgcatccttcacgatgccggacctcctgaaaagctcacctgggtacagctcaggatcctggcctcggctcgctggccctgacaggcgggtggtcagggtgacacacggtgggaagaacacacgcccgcctgcctgcgaagcctcgcaaatagctgggctccctcggcaccttctgccgccaggtctccgcctcccaacctccctctgggcgtaccgagcccgttgtcgccacgtttccctcgcccgggaggcaacgcggcacccaccccgcagcatcctcgcttccggggcctcgggcaagggtctccagtcccagcccacccaccctgcccgcctcgcgccgcgctggccctccagcctgcggccacattcaaggccgagcgcagtctgggctggaaacccgccgcccggggcgcaggcagcccagctgggccccgcctcaccccgacgagctgctcacgacctccaaagggaagaaagcgacgctctgagaactccgagaggccgccggccaagcgccgactcggggggcgggggaacggaaaccgacgtctccccttcgacctcccgggaaacccttctccgtttactctccattccgcgaccgccaataaagaacagcatacatggttagcagaaataaatgaattgcactctctaggctcttacctctggatggctacgtccctgaaaaatgttttaattagctaacggaggacgggggaggagctttcttggtcggtaaataagagtgccttctccgtcgtctcggatctccgaagcaagcagtcaaagcggccactgccttgcctgctggaaattctcgaaaatttttctcccgcagttgaccagatggagagggagaagtctgttcccgctgactgacagcagatccggccagtccgcactcggcgagacggctggccggccgcccgggccctcgatcgcagccagtcacagatgccgatgggaacgagcctccccgcggctgctatttgacttcgcaggcttccagctgcgcggcggagcgacgtcaccctgtgccagtggtggctcgcggcggcgccccgccctcccgaggttagctccccagccaaagagggggcgcgcttgcgcggtgggtggggccgcgagacttggtacctagccagcgggcggagcgcggagggggtttcgcttcgggctaagggactgtagttgtgacagccaggaaaccgagaacggaatgccaatactgcttaggcttagagtttgaaaggcatctgatttcactgccatgtctttgaacagcagtgcacagtgcagtcttcttcgtggctgaacaggtatcttgtgatctttagggaatgtctattaattcattaaacaagtatttctgtgtttattgaaggacgtcttgtatgct

SEQ ID NO: 32387 - DNA, 2300 bp, Homo sapien
cattattgatgagcagatttttaaaaacttaatagtaacttagctaccaaaatactccatcaaatgaaagccatcaccaacagatatgtagtagaatgctcatagtagcactatctataatggctctaaatggcaaactgccctaatgtccatcagaagaatgaattcataaattacagtatatccacagaatggaaaacaaaatgaatgatctacaactgcatacaacaatatggaagaatctcacaagtgtaatgttgagtccaagtagccagaaacaaaagaacacatactttatggctttatatataacaagtataaagataggcaaaactacctatgctgttgaaagtcagcatagaaactccccttggaagaaggcagtgcctggaaggcaggttgatggggttcccaggtattaataatgttttgttccttgatctgggtgctggatacaaaggtgtctgcagactgtgaaaattcattgagctgtctacacttaggatatgtgcactttttaagacacatgtttcaataaaattattatttttttaaattccacgccaggtacagtggctcatgcctgtaatcccagcactttgggaggctgaggtgggtggattgcttgagttcaggagttcaagaccagcctgggcaacatggggaagccccatctctacaaaaaatataaacattagctgtgtatggttgagcgtgcctgtagtcacagctacttgggaggctgaagtgggaggatcacttgagcctgggaagcagaggtttcagtgagctcagatagcgccactgcactccagcctgggcaggagtaaaaccctgtctcaaaaaaaaaaaaaaaaaaaaaaaaaaaagaaagaaagacaaaagaaaaaaaaatccaggaagtctatgaaaagacatcaactcaacataatattactcaaggttattactataatttgtgagccgtcaatatgagagtcactctctaacctggttattaaatgcactggattcaaaacagttgtccctggcctagaataactaaaatgccaaatcaagttaattatttatctttaaaatctctaatctctctgctcttctctcccttcagtgatattgtcatagtttaatcaaagtcatcttccaccttaaatttcatctgtcatcatctcctaatcagtttcccaatagcttattttaactgttctttgcacactaaccaaagtgatgtaaagtctaaacccagaccctttcacttctttttttcgaatgcctcaatagaagcccattaaatttaaaatgtaatgccaactccaagcccctgtctgcctcatctctctcacatcatgctgttctttccctccctcaatatgctggagacactttggctttctttctgttcttccaaaacgccgggctgtctcaccgagagacctttgtctgctgtcccctctgcccaaaacaattcatcattttattggttccatggctgaatgactgatggtttaaatgccatcttataaagttctcatataacaatcttatctgaagttatcctccagtgtccacaccatgcctatttctttccttgacatgattaattactattctatgtgcttgcttacttgttggttttctccctcttctttgttagactgaaaattctatgagggcagctatcgtgtctagctgtgttaggggcgtatccccagtgcctagcaaatgtatagcatacaagacgtccttcaataaacacagaaatacttgtttaatgaattaatagacattccctaaagatcacaagatacctgttcagccacgaagaagactgcactgtgcactgctgttcaaagacatggcagtgaaatcagatgcctttcaaactctaagcctaagcagtattggcattccgttctcggtttcctggctgtcacaactacagtcccttagcccgaagcgaaaccccctccgcgctccgcccgctggctaggtaccaagtctcgcggccccacccaccgcgcaagcgcgccccctctttggctggggagctaacctcgggagggcggggcgccgccgcgagccaccactggcacagggtgacgtcgctccgccgcgcagctggaagcctgcgaagtcaaatagcagccgcggggaggctcgttcccatcggcatctgtgactggctgcgatcgagggcccgggcggccggccagccgtctcgccgagtgcggactggccggatctgctgtcagtcagcgggaacagacttctccctctccatctggtcaactgcgggagaa

SEQ ID NO: 32388 - DNA, 2300 bp, Homo sapien
gaaccagaaatactaatactatccactgactcactactcatcaatccaattgtccgacatacccttattagcatctaccaagttccaggtactcttgaggtagaaaaataaagaacatttgttcttctctttaaagaacttgaaacatggtcatgaagagtggtgaattgaaattacataaataggttctgtaatagtttcttttaaaaaaaaatcaataatgctgatgatggctaacattatcaaagttaccaaatctaaaaaccagtgctcagcgggacatggtggcctataatcacagcactttggaaggctgaggtaggcagatcatctgaggtcaggagttcaagaccagcctgggcaacatgatgaaaccccatctcttcaaaaaatacaaaagttagctgggcgtagtggcacgtgcctgtagtcccgctacttgggaggctaaggcgggaggattgcttgaacctgggaggcggaggttgctgtgagttgagatcacgccattgcactccagcctgggcatcaagagcggaaactctatctcaaacaaacaaacaaataaataaataaaaatcagtgctcaatccttaccttgctccacaagaaattgacagagttgatccttcctttattcgttacttgctctgtctataactcctcctcctggttttcctcctatgatcagtcctctagcctctgctatactgtcaccacattcaccccctgggtgttctcattcagccatctggctttaagcatcacctctacactgatggctcccaattttctgactacacccaagcttctctctacaactccaaaacagtttatcctattgccttcttgattaacaagcatcttacagttatcattaccaatctgtattccagacacacatagcttaaacctgcaccttcctcagggtttcccagtccagtagagtttaccttggagtaacccctaaagccaaccctggagtaatccctaatcccttttcttctttccccccaatttctaatccatcatcaaatctgtggactcttactttcaaaacatgtcttgaatctaataacttctcctctcttcccttctaggatatcacctgacctgaactctgaagtagtctctgctaactggctttctgcttccatttttgtcctattatttttcacacagcagccagatgaatctttaaaaactgaagtcagatcatggctcttctctattcaaaaccttccaactgcttcttttcatcctctgccctcaggtgtgatcacgactcattccctcatttcccatgtcccctcagctctctgcacaaatatcacttcatcagagagatcttccctaatatcatctcaaataccagtgccttccgcctccaccctctggttcctgttgtatttttcgttgccccttgatattacactatgtgtttatctgtttatgttctctttccctcaggagaatgtaaacgcatcaagaggatcttgtctttcactaattgtattttcaggcggggcccagaggctcacgcctgtaatccctgcactttggaaagctgaggggtggatcacttgaggtcaggagttcgagaccagcctggccaacatggtgaaaccccatctttactaaaaatacaaaaattaagtcgggcgtcgtggcgcatgcctgtaatcccacctactcgggaggccgaggcaagagaatcagcttgaacccgtgaggtggaggttgcagtgagccgagatggtgccactgcactccagcctgagcagcagagcgacactccatctcaaacaaacaaacaaacaaacaaacaaaaaacaaacatattttcaatgccaaaaaaggtctggaatgaggtgggcactcagatgctttattaaccactctaggtattattctaacactttatgtgcctattaaattatcccgacatattagatttgctgaattgcagtccatatttcgtagatatgatagctgaagcacggaatcattaggtaacttgcccaaagtggcattcacgactcataaatggcttaggatgtaaactcagttttattccctgggacgccctctctgctcttcagcacttgaagttcaggcagcgagagttgacatggggccagggctgcgcccctggggcgggttgaagacagggtgagtctcttgatattcaggaaatcatcgcgcacccagtcaccagcgttcgggagcctgtcgcagcgggaccgacggaatccggagcaggcgacagggcgcagaagcgggatgtacttctgttgggg

SEQ ID NO: 32389 - DNA, 2300 bp, Homo sapien
acaatgtgattctacagataaaaattattatagaagcaacaaagtaatttttacagttttcaataatccactttacagcctagaacattatttcatttcatttcttgcttggcataggtatgacacagcttcctgaatgttttcttcccattcttgtcctcaccatacaatatattccaaagggatggattctttctggagccataaggaatagacttgaaaactacttgtgtagttgaaatgtttgtttaaaaactatatgcccccaattatttttgtttgttttaaatgcatatcttaaattagaaaaccctcaattgtttggattatattattctcaatataaagaataaatagaaataaatagaataaatagaaataaagagaaagctagagttgtttgtaatcatagaatgttttgggaagacagtatttttaggaaaatgctcaaataaattcaacctcatacttaaatgttggttttactcttgaaccagttaatttatctattcattcaataaagacttattaagtacctaattctttctttttccagctttattatggtataattgacaaaaattgtatatgtttatgctatacaatattatgttttaatacctgtgtacattgtgaaatgattaccacaatcaagctagttaacatatgtatcacctcacatacatatctttttttgtgattagaatctttaagatctactctcttagtaattttcatatatgaaacacattattaactatagtcaccatgctgtacaatacatcaccaaggtgcccagtttttaaggaaatgctaatgattttttttttttaaatttgtgtagagattgggtcttgctatattggccaggctggtctcaaactcctggcctcaagtaattctcctgccacagccttccaaagtgctggtattacaggtgtgagctactgtgcctgaccccagtgatttttcatgtttaatgtgttaactcaacatacactattagaaaaaataaaggatctctcctatttatgtagagcttgtgtttcacagagtgctcccgtattaactcttgtatgacacttaatcagtaagcttttagttaccttgttaaacctgaaattaatttgattcttcctttgctaagcaggacgggaaagtgttcacatttggagacaatcgctctggacagctgggatacagccccactcctgagaagagaggtccacaacttgtggaaagaattgatggcctagtttcgcagatagattgtggaaggtaataggcttcttcttcttctttttcttagcatgtgtagaaagtgttatattttattacttagaaatgactcatatggaatgttatcaaaccttaaaattcctgcctgaaaatttacttatttcaaatatagtttaatttttcagtttttaatctttattctagatattttatttatttaataagaaataattggaagtctactgtgtatagaacactgtaccaggtgctggagaatgggaagtagattgataaaaatagcagagctttcctgcttaagttgataagacaaaattaaagtaaattaatctcatgcatgcagaagatgatgtatatttacatatatattttcggagttctgcgtaacctaattatgaggacactttgagtgtttaaatatctacccaatgcattaaaaaagaaaaaaaatagaaatgcctgcatttagaacacaaatgatagaaaccatagtaaagacctatcaataacattctgtttttaagattagtagtaagttaatattgactgaccgtctgtttagccacatcctttgatgccctctaacactgacattgtgataagggagctgcgtacttagtaaaagtaaattgggctttttgtgtttgttattttgtcttaagggacatcatctttctcaaaagccatgagtgccttagtcttcattatggtgtattctctttcctgtagttatcacaccctggcatatgtgcacaccactggtcaggtggtatcttttggtcatggaccaagtgacacaagcaagccaactcatccggaggccctgacagagaactttgacattagctgcctgatttctgctgaaggtgtgaatcccactaattcatgattttgtgttcatcaatgccactggaagagaactagtattcagcttcctttcaaaggatcctacagaactgtagttcccctagtacttttatttttatttttatttatttatttttttttgagatggagtttcgctcttgttgcccaggctggag

SEQ ID NO: 32390 - DNA, 2300 bp, Homo sapien
ttatctgtcatttggattatagttatcctagtgagtgggaaatgatatttccttgtgattttgacttgtatttccttgatggctaatgatgttgagcagttcatatgcttattgcccatttctgtatcttattttgagaaatgtttatttaggtcttttgtccattttaaaattagtttattagtctttttattattgagtcataagagttctttacatacagttacaagtcccttatcggatatacgatttgctagtattttcccatgtgttgttttttcactttcaccatggtgtctttatgcacaaatgttttttattttgatgataaattcatctactttttcctcttaaaagttaaatttttaactgtctttgatgtatagaaatgcagtaatttttatacattaagcttgttttttaacaatcttgttaaatttacctactaaaactaatctcttgacttctttggattttctctgtatagaatcatataacttgaaataataacagttttgttcctatttatttttctttacttatttcattggctaggacaaccagtataatgttttataaccttattctgatctcaaagggaaaaccttaacatccagttttatgttttgctgtgggatttttgtagatacgtttttaaaaggttaaggaaacttcattctatttctagtttgctgagggctttgttcttttagatcatgaatggatactgaattttattaaatgctttttctgcatacgatggcaaaatacacagatgggttttcagctgttttaactttatctacttgaagtaacacagcctgctcatgtgttatagatttcaaagattccatttgctgatattttgcttatcatatttgcatctatattcatgagtgagactggtttgttattttactttctcataatgcccctgtgaggtttctggaccaggtaatgctaatctcatgaaattatttggggaatattctttctctattttatgtaaaagattgtataatactagcattttccttaaatgataggtagaactaatctataaaccttttgggtctggaaatttctttgtcggaagttttttaaattatgggtttaatttatttaacagccacaggattattgagattttctatttttttcttgtattgctgggtatttccccaggatttgtctctttatctaagttttcaaatgtcctatttttatctttttaatctcatcacaatctgtagttttgccccatttttcattcttgatactggtttttttttttgttttttttaaagtcttaccaggaaattgttttttcttttttaaagacgcagtcttttcatttgttgatcttgctcctgtatatttgtttttcatttccttaatttatgttcttaagtttcttatttcccaccttctatcatttggattcatttttgtgatggaggcatttagatcatttagatcactgatgcttcctctaggaagccttcttgaacctcttaagtctttccccaatcagaaactgtatcctaaattcctggtaacttgttgtttttacctactagaccacagattgtcaatctacacccaagggcagtctcctgtttttgcaaatacagttttatgggaatagatccacattcatttgtgtaagacaggacattttaatctaaagatttgtcctgtgcttgacaaaaatagtgtgtgccaagttagtatttattaattaaggagcaaagtgctgaatttgttaaaagtaccttggatttttatggtgcttttattctcaaaatctagaaactatttccagtaaatctatgccctaaaaattagtttactaatccacactgtcagcgtcttatctttgacatttcttcatgaaaattaaggaaattatagctcagaaaatggaaactttatagaactctatttcatcactgacaaatgttttcagtttagagagctttcttcttcttatctgtataacagccatacatatatatctatatatcatagattaaatcacttattgatagaaaatgaaattcacaggtcatattctctttaaggtaaacaaagctaactgtcgactaccagaaaatactttcaacataaatgaactctccaacttattaaacttttatatagatagaggaagacagctctttcgggataaccacctggtaagaataacatttttacttctgaaaatgttcatattttaaaggaagacacattactgtagtatctgtaaaggtactctttgataaatcaggatttgaaaa

SEQ ID NO: 32391 - DNA, 2300 bp, Homo sapien
acacagatgggttttcagctgttttaactttatctacttgaagtaacacagcctgctcatgtgttatagatttcaaagattccatttgctgatattttgcttatcatatttgcatctatattcatgagtgagactggtttgttattttactttctcataatgcccctgtgaggtttctggaccaggtaatgctaatctcatgaaattatttggggaatattctttctctattttatgtaaaagattgtataatactagcattttccttaaatgataggtagaactaatctataaaccttttgggtctggaaatttctttgtcggaagttttttaaattatgggtttaatttatttaacagccacaggattattgagattttctatttttttcttgtattgctgggtatttccccaggatttgtctctttatctaagttttcaaatgtcctatttttatctttttaatctcatcacaatctgtagttttgccccatttttcattcttgatactggtttttttttttgttttttttaaagtcttaccaggaaattgttttttcttttttaaagacgcagtcttttcatttgttgatcttgctcctgtatatttgtttttcatttccttaatttatgttcttaagtttcttatttcccaccttctatcatttggattcatttttgtgatggaggcatttagatcatttagatcactgatgcttcctctaggaagccttcttgaacctcttaagtctttccccaatcagaaactgtatcctaaattcctggtaacttgttgtttttacctactagaccacagattgtcaatctacacccaagggcagtctcctgtttttgcaaatacagttttatgggaatagatccacattcatttgtgtaagacaggacattttaatctaaagatttgtcctgtgcttgacaaaaatagtgtgtgccaagttagtatttattaattaaggagcaaagtgctgaatttgttaaaagtaccttggatttttatggtgcttttattctcaaaatctagaaactatttccagtaaatctatgccctaaaaattagtttactaatccacactgtcagcgtcttatctttgacatttcttcatgaaaattaaggaaattatagctcagaaaatggaaactttatagaactctatttcatcactgacaaatgttttcagtttagagagctttcttcttcttatctgtataacagccatacatatatatctatatatcatagattaaatcacttattgatagaaaatgaaattcacaggtcatattctctttaaggtaaacaaagctaactgtcgactaccagaaaatactttcaacataaatgaactctccaacttattaaacttttatatagatagaggaagacagctctttcgggataaccacctggtaagaataacatttttacttctgaaaatgttcatattttaaaggaagacacattactgtagtatctgtaaaggtactctttgataaatcaggatttgaaaattttttaattgcaatgataaatttgctaaatttgatgatcactgaaaacttaaatatattttaatcataaaacaaatgcagtttttgaaattttgtttctaagtaattcggattcttacagatttctgaggccaggtgcagtggctcacacctgtaatcccagcactttgggaggccaaggtgagcagattgcttgagccccggagtttgagaccagcttgggcaacatggtgaaacgctgtctctatcgaaaaaatacaaatacgtggtagcacgtatctgtactcccagctactcaagaggctgaggtgggaggatcacttgagcccagagaaggaggttttagtgagccaagtttatgcccctgcactccagcctgggcaatagaacaagactctgccttaaaaaaacaaagaaccacaaaaaccagattccaaaaaaaaggcgataaggtaaaggaagtaagttttttttcattgtttttaattatcaaaactattatctctgtttattttttagatacctgcagaaacccccagtcctgttattttcagtgattttccatttatctttaattcgctatccaaaattaaattattgcaagctgattcacatataaagatgcaggtatgtatgtcctattttttagtatgaaaaatttcaaacatatataaaatagagatagtggtataatgaatcccatcaccaagattcagcaattgtcaacattttgccacacttttatctatcactttttttctttgttgtt

SEQ ID NO: 32392 - DNA, 2300 bp, Homo sapien
taacttgcagttttggctctgttatacctacagggtaactggccattttgttatcaacagagtagggccagtttgggctggctctgaggttataatatacggccagctgagttttgacagggatgccaaggcaattccatggggataggcaagctggaacgactggaaatccataaggaaaaaaaagaacctttattcttacctcatactgatgcaggaatttttgctccttagctcagctaaaatccaggttcttgtctcatgaccaggaacaattaggcatgtgaatacattgcaaggtgaagagtggcatttattaaaagctcttagcaaaaaaacaaggagggtcctgccaacaggctcccagctcacagactgaataacaggccaacacacacaagctgaagacttcttgctcatccctgctgcataaggctgaattccctctggctgcaccccactctcctggtgcagtgggcccccaagtcccttgtgggcatgcccagacaagaccctgggcaggcttcctcagctgcacaaaagcttgtgaggcaggtcagagattctccagggaccctcccttatctgcctccagcatctatcgatactataaagaataattcattttaaatataatgaagaccaacaattataaaacttccagaaggtaacaaatgaggaaatcttataatcttgaatttagcaaaaatgtcttaagtaggacaaaaaaggtatgaactatgtaaaagaaaaaaatggataaattacatcaaaattgaaaacttcagtgcttcaaaagacacttaaaatgaagaggcaagccacagacaggtagaaaacatttcaaaacgtatagctaataaagaacatggtatgaaacatataaagaactcaataatatataaagaactcttagataaaaagtcaagctagctaataaataaatggtcaaaagatttgaatacacacttcacaaagaagagatcctcctgccttgggctaaaaaagggctggggttacaggcaggagcccaggcccagccttgtcagttgattttcggtgacccttcagagggcaaaggggaagttttctcctgttccctacaaccgacaggcccatcaattggtgaatggataaataaactgtggcttacccatatgatagactaccattcaacaataacacaaatgaattactaattaaacacaatagtatgaatctcaaagcattgtgctaagttaaaaaagccagacatcacttagatatggttccgtttgtatgcattctaaaaaaggcctaaagcacatcactgttgccaggcacccgggaatacgggaatacgtagcggagcgggcacgaggggggtgggggtgggggtaggggtgggggggagggtagctgcctgcatagctctgcccagttttatgccggtttcagcccggcgcacaacgcatttttttttttgatacatagtctcgctctgtcgcccaggctggagtgcagtggcgcaatctcggctcactgcaaactccgcctcccgggttcccgccattctcccacctcagcctcccgagtagctgggactacaggcgcccgccaccacgcccagctaattttgtttttgtatttttagtagagacggggtttcaccgtgttagccagaatggtctcgatctcctgacgtcgtgatccgcccgcctcggccccccaaagtgctgggattacaggcgtgaatcaccgcgcccggccgcggcgcacaacgcttaacaaactttggcttccgttatccctccctctggaaatgcgtgtgtcagggtgcctcctagtggaactgcagcgtttcctcgaaagccattccgtccaggagttaaggtggccgctgcccgcccgggacactttctcagtccagcccatcggcctttaccccagccaacgacctgttgcctttggccgcctgccaagtcactctcattacagtttccttttccttttcgattccgccccctaaaaacaacaacaaacattatgtttcgttttccactggagctgcaggccccgcccccaaacagcacgtggggggcgtggcgtcccggcaggggctcagtagctgaggctgcggttccccgacgccacgcagctgcgcgcagctggttcccgctctgcagcgcaacgcctgaggcagtgggcgcgctcagtcccgggaccaggcgttctctcctctcgcctctgggcctgggaccccgcaaagcggcgatggagcggaggtcgcggaggaagtcgcggcgcaacgggcgctcgac

SEQ ID NO: 32393 - DNA, 2300 bp, Homo sapien
tatattttttcatgcaaatgtattcttttaaaaaaaatgagatcatactggttctttgtttttttctttttttttttgagacagggtcttgccctgtcgttgcccatgctttaatgcagttctgtgatcttggctcattgtaacctctgcctcctaggctcaagcagtcctcccacctcagcctgagtagctggggcttcagacacatggcactacacccagctaatttttgtatttttttgtagagccagagttttaccatgttggccaggctggtctcgaactcctgagctcaggcaatctaccagccttggcctccccaagtgctgggatttcaggtgtaagccaccatgcccagctggatcatattgtttatacattgttttctacctaatatttgcccattttacattttattctatcttttttggtaatttttttttttttgagacaaggtctcactccatcacccaggctggagttacagcatcttggttcttgggctcaagcatcatcaaactcttgggctcaagcaaaactcccaccttagccttccacgtagctgggactacaggcacgtgccaccacctcctgctaattttttagcttttgtaaagacagcagctttgctatgttgcccaggctggtcttgaactcctggcctcaagcagtcctcccacctcagcctcctggtgttgggattataggtgtgagctaccgcacccagccggtaacataatttaatggctgcatgaccttccattagaaggtcttccatgagaagatacttaaacatttcattaataactttatattgaagtactaagaaattattggtcagaagccctctcttttggttcccacttttcagtccatttaacgggaagaaatggatgtattttttagaaatgggaaaaatgtttatcttttttctgtcttccttccttccttcctgtggtcagtcctttcttccttccttccttccttcgaaaaacctttatcttttttctatggcccgcccttcttccctcccttctttcctccctccctccctccctccttcccttccttctttcttttctttttttctttctttctttttctgaggcaggatcttgctctgtcacccaggctggagtacagtggcatgttcacaactcactgcagccttgatctctcaagctcaagcgattatcctgtctcagcctccctctgtggctattttttttaaactgggaaatattaatttttttaatctattacagataagacagcatctgagttaaagtcttatggtatatacagttaaagcagccttgatattttttggtattttagaaaaaatcatgtttactacattgcatttggatttagacaatttattatagttacacacttgagaaaaaaggtaattttgttgaaatggggcaagctctagaagaaactttgcatctagggagataatctaacaaaatacttaatttatctttcttctacagaagaactacagaaatgatgcctgtttatttggacttaaataaagcaagaaacatcttcaaggagttaacccaaaaggactggattactaacatggtatcttcagattgttatgtggagaaagaaaatacaccagaatatttcttaaaagaactcaaaatttcagaagaaatgttttgtgttaagggattctccgagaccttgtagcatattcagattaagttaaactcagataacatttaggagtttgcccttttagggtgaaatagttggcatagtagtcacacaggttacagatattctaaatagtgtgtctgtacacaaacacacatacacatatatgcatacacattcgtagagggaagtttttcaactcagggctttaggaagatgattaaggatttgttgagattggtacactagaataagaacattttatatgcaaagcataaatgtagaaatgagaacattttttctgatatgaatatccctctcaccagggactgcctggattctttttttttttttttttccattctacttttctgtagattctagaatgttcttgttccttatgggatgattgtttcctgtttcagcactgttactgctatctttaggttttctttttgcaggtgctccaaacatgcttcctttatttttatttttatttttttggaaacggagtctcgctttgttgcccaggctggagtccagtggtgcgatctcggcttactgcatgcttcgtttattaatttagtttttcttaatgtagtttttattatttccctattttattttac

SEQ ID NO: 32394 - DNA, 2300 bp, Homo sapien
gaaaggtcagtcatgtgaatagtgaaaagggactaacttttaaaagaccagttccagtcccatgatcctatcctatcatctacatttagcttagtatactacaggcagaaatgaattgtatttcttcattactaagggctatttagggacatattgctttgatatgttgcaacttaatacacacatggtgatagtcatacattcatatgttccttaaatattggttgttgatttctggtgttataaatttgaggatgttttcaatactttgctgttactctctattcttcccctaaataaagtaaactgaactgcctcaaaccctctatgtggaggcaaactgaaactaatttatttataactggttagaaaacccagttgatagagatctgtcagccaagctagctgaggcttaagcatgggtgccttcccctacccaacaagcgccaagggttgggcccactcagcgcttgcagaagtcaagcgctgtttctccttaagcagaaacttatctttcctacagctcaccccttcccttgagcccaaagtatcaactgacttcaactgaaaaattaattcctgctactgccctagtcggaaatagtgtgaaggtgacataggaactttacagtagtttcccttgagggtatgtcccgataactgccctattctctagtccgttagtaactctaataacggaaagttatgactgtgaaagattgctttgtgagggaaggaaggtgaggcaaccagagactttcattatctcttaaatatctatccagtagaagtgtttcctttttggtatcctataaactacattaaccttagaaaatcttctgagcattagtgaacaaagaacatcaaaaaataaactgttttttttaaaaaaaacaggatggcccaaaaaacaaacaaaaaattaggatgaacatataaacatttgtcagtttatttttacattggagtggaagagaaatttgaaaatataaacatatttttggattctgtacttccagctccaggaactcaaagtgtgaaatgataatgcccagtgatgcaaaaaaaaagttcaggttgatattcagcagaacggagggaaaaaatggatgactaatgagaatctttgagtcttcggacatggaaaaactagatgaactaaaaataaaaatagacaacattaatggagcattaatttgtgccaggcacttttctaaatgttcttcgaatgcacaatcacatttatgccctacctacaaggtaggtacaattattagtcttatacagataaggaaaatgagcagttaagtcatttgccaaagtcatccagctactaattgtggacagggaaccaagctgtcaggccccagagcccaagttcccatctactacactgtaagaaagagatctaacatggtcactttcttggagagtgggaagcaaacctgggatacaaattcactgaatggatcacccactcattgaatggatctttaacaggcagatcacatctgcctgttacacagctatttaggccccttgcggcctccaagctcatttatagaagtaaattagctgtgctttattacgcaaatacttcacaatgactgggtctcaggcaggaagaatttatatattttggagggtcagaggcctaggcccttccttccaggttctcactttttttaatgagagagaaaaaagccaaacaaggttacagaaactaatggtatagtaaagatgtacatgaaacaaatgagcgctttcaatacatccatgacaatacattcggtacaatacataacagtgtgtttgaaacttcacttggaggtaaccacgtaggtccaagcctaactccctacaactctgaggcctggccactggcttcctagcatccttggacaggccccggtgaaaacccagacaccttgacttaaacactggtttagtttgtagtctggtaaggcggcggggcactcaccagaggcctctgccctggggctgtcctccggactatagatgacgcccgtgggaaaagcagtcggagcagaagcaccctcggaaccaaagcgcccgccccgcctactcctcggcagcgtttcctggaggaccagggggcggggcctgcccggctggcctggacgaacgggaagccgggagctcggccacgggtggcgaggctgcggtgaggcctggtctccggctgccagaccatgctgagtggagcacgctgcaggctcgcctcagcgctgcggggaacgcgcgcgccgccgtccgcggtcgcccgtaggtgcctgcac

SEQ ID NO: 32395 - DNA, 2300 bp, Homo sapien
tgaaaatacaaaaattagccgggcgttgtggtgggcgcctgtagtcccagttactcaggaggctgcgacaggagacttgcgtgaatccgggaggcgcagcttgcagggagccgagtttgcgccactgcactccagcctgggcgacagagcgagactccgtctcaaaaacaaaaaacaaaaaaacaacaacaaaaaaagaaaaacacttgagccatgggccagacatatcaacccaaacactgattgattacaaacctcatatgtgacacctaacaataggatctctcactttctcctttgcaagtaccggactccttcgtcttcctaccagactcctctttgggcatttaaccagttcttttgccaacagcatctctaaattgggattgcatctttgtaatagactaaacttttgtgaaactgccacatatctggaatataagtgaattgtgttactcttgtccccagtgtttcttttttcctttttctttcttttttttttttttttgagacaacgtttcattctgttgcccaggctggagtaagtacagtggcttgatttcagcttactgcaacctccgccttccaggttccagtgattctcctgcctcagcctcctgagtagctgggactacaggcgcacaccaccctactcggctaattttggtatttttttttgtagagacaaggtttcaccatgttggccaggctggtctcgaactgctgacctcaagtgatccaccggcttcggcctcccaaagtgccgagattacaggcatgggccaccgcgcctggccatccccagtgtttctaaacgtgtcaagtgtgatccaaatttcaaaggtttggattttttcttagatgacctgataacttagattctgcttttttagctttcttgtctcagtgtactggacaatttgcattatttcacggagggctcaacactgtcagtcagccaacaacgtctcatccccaggatacaccactccttgaaactttcttttctacttggtcagtctgttaggttctcaggacgagcgattgcagacctgaggtgatttgaatgtccttggtaagaatctatcctcaaagggccttcctgcttcaaatgccaggttatagaaattcttccactgggagagttattcctttggattaaagcagtaccgtgccagtgttctgcattttacatttaaggggggcagacacatgaagtcacctttctgaggttttctgcaaaagattagctgtggatcagatcaggtctagggcaagtatgaaagcactagtgaccttggggagggggaggaagctctgggattcggcgctagggaaaagtggaagaggacaaacttttaaaaaatccgttactgggtataggccacagagtgtctttcagattacaagattttaagatctggtgctcagactcttcttgctatgctccccccgggtccaccctccagcctcccccaggcccgcctttcttccgcagccccgtgccggtcttcgatccccacctctccagaagagcgccggcggctgccgcgtacctccttccccgcctctcccaccgcgcagcgccgcgggccggcgccgcgcttcctacagtcctacgaaggggagtaaagcagaagactagcgcactctccctcaattgtcaccctccagctttttcccccgtgcccaaggctttcggtcacctcttcataaataataaaaaccagagtccagaacctgaataggcaaccgctgatcggtccagctcgcttccccgccagtgaaaagcaatcttatttcagcgtcaacgctctatgtcttgcagtccgatttcggctgacacacccgtgccgctgtccccgcgccgggccctcgagtcctgtcacctcgggcagcctgcgcctggctctggggcctgggcctctcccctcctcctgcccgcggaccttgccgccccgcctccagcccgtgccacggcggccgccattggcgcgggcccatcccagaacggcgcccattggcccggtgcgaagccattcacccagcgcattccgccgcccgcaggcttgcggggaaacttccttattattgtgacgccgaaaacggagaaaccccgggtccggcgagaggggctgtgacagtcggagtcccaagctgcggttcggctgctgccgaggtgcgcagggcgggggccggggttccagggaggggggtacggcggagctgcagccgcgctgggccgcgttccgcctggcactgcagtcagcgcgcggctcccggaggggcggctgcggctc

SEQ ID NO: 32396 - DNA, 2300 bp, Homo sapien
tactacagtgcttacattactgtatttgcttgtgaaagcacgcccaaaaggacaaattttactgttatgtaaatgatacctcaataagccagactttttaaaaaacagtctggtttaacactaagttttaagatctgttgagacaggaaaataaaaatcttgaaagatgaacatgccctaaatattttaagcaagttaagttagtcaaatgaatttaaccaaaatgtgggattttttttttaaagtctgtcacaacatccatactataggggtcaaaaggcctgttttctgcccctgcatctgccaattaagtgatacatgcagtaagatgatttcactgtatttgcttctaagtttactatctgtaaaatgagaaacatcattcctaatctcaaggcagctgtagccatcaaaagagatgatatatgggagtgagaaagaaggcagagaagatggtgagccagtaagaagatggtgagcagggtaaagaagacggttgggggaaggtggtgaagaccgtgggggaaggtggggaagaagacagatcgtggggaagaagatggtgggcagggtggggaagaagagggtggggctgcgtgggtgggtggggaggaagagggtggggctgggtgggtgggtggggaagaagaaggcggggctgggggtgggtgggaagagggtggggctagggggtggggaagaagagggtgaagagggtgaggaagaagagggtgaggagcgtgaggaagaagagggtgaagagggtgaggaagaagagggtgaggagcgtgaggaagaagagggtgaagagggtgaggaagaagagggtgaggagcgtgaggaagaagagggtgaagagggtgaggaagaagagggtgaggagcgtgaggaagaagagggtgaagagggtgaggaagaagagggtgaggagcgtgaggaaaaagttcggtggggggaaggtgaggaagaaggcagtgggtgaggaagaagggggtgaggagggtgaggaaggtggggaagaagagggtaaggagggtggggaagaagagggtgaggaaggtggggaaaaggacagtgcggcggggggaaggtgaggaaggaggcagtgagtggggaagaaggcggggaagaagatgggcagaaggtggggcataagtcagtgcgggggaggggcaggagggagggagaagatgtggtgtggaaaggtgtgaaaacagatagtggggaaggcagggaagcagacggtgttgggggaaggcagggaagacgaatgtgagcggggtgggatagatggcacatgctttaaccaagataagagggggccttggccctgggccccatgctttagaaagacttgctttttttcagccctcctcaagctttagtccttcccacaggccaaagattctgtaggatcttctagaacacacaccaggacaccgggagctctgagatttcctacccaaatggctccaaaactgcttccaggggagtcctgctgagagacgaccttgccaccaagatatatgccgctaggtgtgtgggatggccaagggggtgttgggtggacacataggtacagagcttggatatgcaagctgccctatccacacacatgcaccccaggtccccaaaggggtggaatggagccagcttgcccgttcctccactgcatggagaggaatgcggaggaatctaagaggtgatcaaacgccagctatggagagagatgcagaggaaagcgaagacatatgcactggcatttgtagaagggcctggatgggggtgaggagcacacggaaaatggtctgaggccatctatgcagttcctgaagaagcacctcgggcagctactgacactcccagcccagctctacaggggtgggtacatgggtgggctgggaacagggtgtctgtccaacaggcgggtgttgagggcccagaagatgtcagggtagcaacaggaggaatctggtgcagtatgagcacacggccgtcagctgatagtgggaagccagtcaagtgccgcgaaagcaggaggcggggccgcggccaacgtcattcccgcggccgcacgtcaccgccacttgccgcatccgcaagatctctctggaccagctcgggtgcagggcctctgcgggagccctcctagacctctgcggcttctcctctaacatggccgactcggaaaaccaggggcctgcggagcctagccaggcggcggcagcggcggaggcagcggcagaggaggtaatggcggaaggcggtgcgcagggtggagactgtgacagcgcggctgg

SEQ ID NO: 32397 - DNA, 2300 bp, Homo sapien
ctaattttttcttgctcatccttgtccctttgacaataaggttaattgatagacccaccacctcttgcactctcgcttttggagcaagttgcattaactattttgagtctctatattgtccaagaaaagtagaaataataaatttactttccctttttctatcaccttatgtcctctaccattttctccttcctcccttcccttattttctccttttcgtaccctgtgtcctccctgattttcctttcgtttcttctttattttatcccattctctgttacttgactcagtgctcccttcctctcctctccttctagtggatgcatgcagcctttttttcaatttttatttaaattgcaaaatttttactcagattttttttcctcttccctaattgctaagatttaaggacgttctttattatgaaactttatcacattcgaaatgtttgtttacagtgggattttaggggggattgtgtttaaatcaaatatatgtattttaaaaataatgacatgctcaaccttcctcatcatggagtaagaaaattctacatgattaaagaatccatgtaagtctaattttaaattcctagtaactagagaaaagacttatttatataaaatgaagtatttatgaactgtgataaagcatcaaatcttgatgaaggattgtagatttttgctttttctttttgtttttaaaacttattccaattgctaaattggtagtttttcagtctttataaatacaggattaaaaatatatatacagttatatgaaatgtttattttctatgtgtgtgcatatagttcaatattatgcaataaatttggtgttttaacttaaaactatttcttattgtacttgcagaatggatagcttgcttttagtagaagcattaggtcgtatactcagataatctaatagaaggtcagatttgattcctgcataagaaagtagagccaagtgctgcagaaatggagaagaaagcaggggcaaggagcagatggcattaaggaagaatgaagtttttgaaggttgggatggacgaaaaggtgtttctcatggagagggatgctttagcaaaggctcaaacattggggcatatttaggcaagagccaagaacagtttgaagggaacatcagaggaaataggcaaataatagtaaataatggtaagtaagacttgggagaaagaaggtagatttggggctgaggaactagcctaacactggaactttagtagtagccaagtaggatttgtttcaatgttcagaacttgagggtgataagacctgagccgggtcttaagaaggaaaatgtggatggtctaaatctggaggtattgaggtgggaaggactgaagcagaaagacaggagctgagacagcagtgacagtggcagcagcagaactagagaagagtatctgaggagaggtagggggagtgagtggaggtggtaggagcctgcagggagaaggaggcactaaaggtggatcagagactggttcatttagtgattggtgattgttaggccatttaagcacaccaaaagtttgtgagacacagcaaaaaaaaaaaaaaaagaaaggattttaagtaaattggtaaagcaagtaaaatgtattgttttgccagattaaaaaggtggtttaaaggtggtaaagagaataggagctttccattaataagctccattcaacaaacatttaataatctacataagtgctacatttgaggagttaaaaacaaaccccactacatttaattttgcacagaaattgccaaattattttaactaactttgaggcctcagaattctcatccatgaaatgagattggatcagatgatttctaaggttactttgagctctaaaattttataattccattactgagagagtgcctgaacatagagatacccaatacatatttctaaagatttgttgcatgaatgatatcttatgctgcttctaaaacactatgatttttctaagatagtttccttttccccttcattaccaatgctttagaagacttaaatcttctgcataggcatttctggatttgcctacccacctaccaaccttccctcccctgaaaactttcagatgcttcttcattgttttagtcatttaccactttaatgaaattatctggcaactttattgtggtgggtggggatcaatgacggtgtaatgaggcaattagcaaattctgatagttccatctactccatgtgaaagtctcttgatgttttatatggtactcttattaataatcccagagagcaggggt

SEQ ID NO: 32398 - DNA, 2300 bp, Homo sapien
cctcctccttctccttctttcttctccttcttttcttctcctcctcctccttttctcctctcctcctccttttttcttctccttcttctcctcctccttctcttccttctcattcttccccttcttcttttccttcgtttcctccccccctccacctcctctcaaatttagttttccacggaatcccccatcctttggaaattttttttttgcttagtatctgttcatttcttccagaatcatagtttggaattaatggacacatagtagttaatcagatgatagagattaaagtgaagggaggcatacactggaatagcaaaatatgtttgcagtgaaacccaatgaatagaatacttcatgttagggtgaagtattggaggaaaaacaaatactttcattaaaatcaaagctactcttcagaatttcattattttcttttaatgagaaatgtatgtgttggtcgtcttgtcgtctttgactcttaaaatgtaaccaagcaaattttaaactacatctctaaagtgcctaagtgtgatgcctacgttacctttaacttaacttcgttagtggcagaggttccatgagttatgagtactctgctctgtgaatgtctccatttttgaggtgcctttgtggagtattgatagggaccattcctgggctccacttacagacttctgttggggaataggatctcacaaagcagaacaggagtttgtgataaggaagaggacaaagagagcaggtccttgtgttcttcaaaaacggtgaacattatcctactgattttggaccaagggagttctccagtgggaagtgacacagaacctaccacagtgccttccaatccaggtttttggtaatgagtgatgaatgaatcccatgagagcagagccccgtggagcgggtggcaaatgttgctctctgactacagttctctccttagggatgctaacacagactgcctcagatgcaggcagggctgcttgtccacactgatcaggcatggatttgcattaacatctgtagtgccctttacttgtgcagtgagatactgggatatacaacagaataggtgctggaagaggcatccactacagtgtgggcagactctttggatctgtattaataacagcctctcccgtggattagctagtccaggctttggtgctttatttcctcccaaaataatggagtgtgtactccttagttatgtgtagcaccaagaaaattaatccagatgtcatcttttttgtttccccctccagcgtggctggatacttggcagggcacagaatcacatggtcttcagatcttctaaaagctgattttcctgggcctaatcccatgagagttggagacagtctatgataattactgattcagctcctgctggtgttgaacttactgagaaacttaaacaagaattaaaatacacacccacacaccctcagatggagccaaacactaaaccagattagtctttcgtggtcaccttttcttcaggattaggaggatcagaaagcaagagcagattctgaaacactgtaaccccattccctactgggtcataagaggctggtgctcttgaggacgaaggtcggcagcaggtgccaactaggtactggcttctggtcccagcagagctggcctgccacagcccaagcgtcttgttttggttaaaaaatgagtctcttggcctttcatgcctgggcgttctccggaactcagatgtttgtgaaccaggttcagggactctcaagttcaagtcactggcagattggagaaaagacctagaagttctaagtgtctgaggtaatgagaggagggacgcaaagcctcattcaatgagactgcaaagtcacctgaatgggaaagcttgccctattgctggcctcggcaatggcaccttcaggttgtcccctgtacgggttgatgagggagtggaggaccccaggtcccttcttaatgtcagccttggccacaggtttcgatgaaatttagtatgttgattaggagctgccaaaatcagagcaactcccctcccaaggggacgtttagttttcagttgttaaaaatacaccctgagacagaaattttgggacacttaagtgactttgaaatccatccaaaggttactctgttccttcactccacacagctcaggcatttccatgttggtctcagctgccatctcaatggtttattctttttacatgttggagcagatctggacctcccaaaatgttttgaggagaagtgggcttagaggggttttccctgctctgtgagagaag

SEQ ID NO: 32399 - DNA, 2300 bp, Homo sapien
ctgatttttcccaattgcttatatattatctatgtattaattccttctagaatctacccagtatctacaacacttatgatggttgtcttatttgaaaatctatttgctatttttcctcgtgattttcaaaggctactgagagtaattttgttacatttatctcaaaaaatattgagtgctcactatgtgcaaggcacacttccacacttttaagttctctcaggactttgggatataattgataaggcctagacacctgatttcattaaaggtcgttaagttcttatttgtaactctgttagctgtccctaactctgttaggtgtttatgctcttctaatagtaattttttgtagttctcttttcaaactgaattactagactgcttaacagccatttattggccatatgcaagcattggccaagctctggggacagcagtaaacaggccccaattcctgccttcactgagttggtcagatacttctaccctgttttccttatccaggggaggggaaggaagagagggagcggaaaactgatgtgcacagccagtgtcccaggtgtgccttatgaggtacctgacacacattatctcaatttttatcaaaactacgtcgatgggaattgttattactcttactaaaacaaaaagaaacgtattcatttaaaaagtcaattttactttgtaaacttttaaatgtttttaacaatttaaagagactcaaggtctgaagtcacagctgagacaatctggaaaagccacctagcttttgccaattttattttcatagcaatactttgatatcagttatatgatagtccttttttgttttgctttgtttggttgcttgtttattcacattatttctcttcagaaacacccttattaaacatatcaaaatttaccatgaaccatttgcacacttgtactttgcccgccagcgggaactgctgcggcctcctgagatgtttttgctgcactggcatggaaaccatttggtttacctgtaataattggtgctatgcataccattttttatgtggctgtattccgaaccaatttttaaattttttaggatagtaagttattctctgtggtctgactaccttttggcagtacatcacttgttttgaaatctttcacactctgatattatctcttccttaggcttacatagccttaaattggctctaagaaatgctgatttggctttattatttttctatttgcattatcaatacagaccgagaatatcatacttttcttagaatcttgtatgccaaaaaatacagatgtggcccttggaagttctttggaaaagcttgagttttcttatttcaatcatgagaatataatatctttcagtcttcttaaaatttccctaaaattttgtgcattaagcagccataaaatattttctaatctcaattcttaaatagaaatgttgtattatttcagaaaatgttcagactgattttttttttttttaaagccatctgagatacccaagtagtagaatcctttcaagcactggttactggtgatgaattttgttttgtactgtcacagagctggaaatttttggatccttttagttcatctgatttaggttataaattatgatggttgttccttcttacccccaacctgacaactattaacatgatgtacactcattttaaaatagttttgcagtctgttttctctattgagtggctacattgtgttattaaatgtgtatatttatatcgaatacagatgttcaataatatatctgtaatgtacatatgtgttgctaaatgtagatacagaagaaactatatggagtctgataattaaatgattattaaatgatacttgtaatgaaagtctgccccaaaaagtgaccagatttttattggggttgctgtgtatctccaggaagaagaggaggggtcagaagacgatagcaatgtgaagccagacttcatggtcactctgaaaaccgatttcagtgcacgatgctttctggaccaattcgaagatgacgctgatggatttatttccccaatggatgataaaataccatcaaaatgcagccaggacacagggctttcaaatctccatgctgcctcaatgtatgtcattttggtggtggtggtgaaatgttttggtaaaaatagctcacttaaatattatcttagcctttgtatctaaataaattagctgataaaatacaagtgactacctggggtgtatctggataaaacggtgattttttaaaaaatttctttttttatatgcttcagcccatgtta

SEQ ID NO: 32400 - DNA, 2300 bp, Homo sapien
attcctccttccttctgtgtgatgtgccgtcctccctcacccctccagcccacacatatctgcccccaaatcaaaatttctgttgctgattcatgacggatacactagtggctcttttcactaatattttttcataatgcatttaacattgtcttccagcctttgttgtagtatacttcccctcaaattgcaattgtatttgccttgtctcctattcccctctctagcaattttgaggtgtgccagtgttttattcatttgtcttcatacggtgtcaaatagtagtagagaaagaatgatggcttccatttgtgtctctcctgcccccagacaccatgctgaaggcccttcataccttctgacagatcttcaaaagaactttgcaaaattggtatcacttatgccattttaaatgttaggtaatggaggctcagagaagggaagcaactcagccagggcaccaggctagtaaatgtcagagccacgcttcaaacccaggtctgcctgtaagcaaaaccctttgtcctttccatagcatgagggcttaaatgacttgatgtatgttcctcgtgaaggaaataccatactttaaaaatgaaatcatatttctagtattttttgatgtctgtaaaggtaataagcattataaatctttttgagaaaatgcttatttgctgtatgcatattcttactctcttttgcttccccccgcccacgacccctcccccgcaacccaggcacactcatgattggtaactgagtggctttgtaatttaaaaagctgagaactagatttgggcatttaaccctggtccacttaggctttagcttaagggaaaaatactttttgtgacataaatgcctaatctggctttttccccagtaaacaaactgcatttttaaactatcttaaatctccagatatacttggcatttctttttttttttttttttttttttttttttgagacggagtctcgctctgtcgcccaggctggagtgcagtggcgcgacctcggctcactgcaagctccgcctcccgggttcacgccattctcctgcctcagcctcccgagtagccgggaccacaggcgcccgccaccacgcccggctaattttttgtatttttagtagaggcggggtttcaccgcgttagccaggatggtctcgatctcctgacctcatgatccgcccgcctctgcctcccaaagtgctgggattacaggcgtgagccaccgcgcccggccacttggcatttctataagactttagtagctcatcaggacccgattgatggtatttcattttatcccaaatgtgaagaaaatatgtctccatgcatcatttcatggaaatataatagtaaaaagccctggctattccctgatgatttcaaagtgggttggttgggtggctattaaaagtagctgcaagtcttaagtagtgctttcagcacagaaacgtttctcatacattaatgaaatcacttatgatttccagatgttcttagttttttcatttaatgatagtatatttgccaaaatacatttctagctattcctaaagaaaatcttgtgtacccatctgtgctacttaaggaatacatttgtgagcaaactgtttcataaacacttttgtttataattgtgtgagacagggaagagtgacaatggttgaatttacaaattacccagagagcaaggcttaaaaaaaaattaattcgagtgcagtttgtttaaacataaaattattaatttgaatatcagccttttggggaggatctctccatccctcagatgtcctagcctggtgtgggtgccaccaataagcaaaaccaagtgtagccaagtatttaatattcagagtagatgaatagtaggaaaacaagtgacagttgcgtatttgtaagacatgaattatgcatcactgacttgccagctcttgactttttacttaaaaaaaaaaattgctccctgtgtaattttggctcatttccagagtccgtattctttactgctagctgagatgagacgccaatcccctgtgctgtttgaatttgcgcaacaatgctttaatacccagagctcctccataaatagtctgttctcccaatactcagtgagaaaacaaccacaggaaatctgggaatgtgcagctagccccgcttaattgatctaagcagccagggccggcaggggagctttcacgtacacagcctctattcctggcttgcaggactgtttacctaaggggcaaagaagtccacctgcgaaagacaccatgttgctactacagcctta

SEQ ID NO: 32401 - DNA, 2300 bp, Homo sapien
ctgtaatcccagctactcaggaggctaagacaggagaatcacttgaacctgggaggtggagattgcagtgagccgagatcacgccactgcactccagcctgggtgacagagcaagattccatcccccccccaaaaaaaaaaattcacacagaatagagtcagcactgtggttccacaattcctctatatagcagcgagttccagaatagacaggagaaattccgattccaggttctgttctgccactacctttccatgtaaatttgaacaggttattttctagtaccaagtttactcatcaataaaatagatattatgatgtataattgtgattttctacctcaagcagctatttaaagtgttaagcttaagccagtaatcccagcactttgggaggccgaggtgggcggatcacctgaggtcaggagttcgagaccagcctggccaatatggtaaaaccccatctctactaaaaccacaaaaattagccagtcatggtggcgggcgcctgtaattccagctactcgggaggctgaggaaggagaatcgcttgaacccaggaggcggaggttgcagtgagccaagattgtgccacagcactccagcctgggtgacagagcaagactccatctcaaaaataaataaataaataataaagtgttaagcaagagttaaagtgattttttaaaataaaaatggtatggaaatatatggaactaagttatgttactagaaaatcaaattagaatttgtaaatctagaatcaaaaaagtatagacaatttcagttgaaataagtttggggttaaatcaactccttttgttttaaaaggctgattttagttactgatagtttatcattatgtatgatgatagttttaggatggcaaatctattttcataaacacagattatttagtcagacaatgaaaatgtttttattagcaggtatagcaaagaaaagcagatgtcttataataaataggaccttgtgttctaaattcagaattatgagtgatctatataaaattggggaaaaattacaggggaaggggatacctcatgcctacaagccctcactgtttctgaatgtcatgttccttctactactagaagtgatggtctggactatgttgtaattttttacaactcatgatgtgaaaaaaatatcatgtaaatatatttctgctatttttcttaaaatgtataaaatctatggattaggatttatgttcctaaaaataacaccctggtattctacaccaaagaagaaattataaggggaaggtgataattaacaaatatttagaagactttatggaaaaactgattttgtgttacctataaaaaaaaataaaaataaaaagcaacccccccaaaatgctgttgatgttcatggagaaaaataactgtgtaaacacattcagttttataagaataaaatgcagaaatagtaagttgaaacaattttcattagagtggattctgatcccttaagaacttgggcagagacttagggcacgtatcctccccagaagtggagctacgtgcgctgggtgatgtcaccagcgactagtaaccaccgcagtgtaaacaaacatcagcaggaaatacatgtgggtagggcaagggtctagaggcatgctttccttctagaaaagtctcactcctttcaaggctagtgtttttgtttcgttttgttttgttttaaggaagaaaggggacgcaacataactcttgccttctgctacagaaacctttagtttcgtgggcagtgtctttccttgacaaatggaatccttgctggcagtctctgtaatgttgagaagtacaggactcttggctcttgctgcagttattggttgcttgccccagactgaaaatcttgtctgtggaactgctcagaggaaagtttcaagttaccagaactaggcaagcccactgaggagcaggagcaggaggagagaaggaggaggaggaagaggaggaggagggaccattgaggagcagaaggagtagggtgcgggggaggaggaggagcgcctttagtgctgcagcagctgctgctctgattggcccggtggttcagctgcttccctggaacaaaaggtcaaagtggactgcagtgtaaatgtagagaagcagccgataaaatagcattgcctgaagaagtttggaggctgagagcagcagtagactggccaactgcagagcaagttgtttctccagccgtgcggtgcagcctcatgcccccaacccagcttagccactgtaagaagacgttcactgtacagacgacca

SEQ ID NO: 32402 - DNA, 2300 bp, Homo sapien
aatttcatccagaatcaaagaagaccccatatagacaagacaatcctaagcaaaaagaacaaagcaggaggcatcatgctacctgacttcaaactatactacaaggctacagtaaccaaaacagcacagtactggtaccaaaacagacatacagaccaatggagcagaacggagacctcagaaataacaccacatgtctacaacaatctaatcttcgtcaaatctgacaaaaaacaagcaatgggaaaatgatctcccattcagtaaatggtcctgggaaaactggctagttatatgcaaaaaactgaaactggaccccttccttagaccttatacaaaaattatctcaagatggattaaagacttaaatgtaaaacccaaaactataaaaaccctagaagaaaacctaggcaataccattcagggcataggcatgggcagagacaaaaatgccaaaagcaatggcaacagaagccaaaattgacaaatgggatctaattaaactaaagagcttttgcacagcaaaagaaactatcatcagagtgaacaagcagcctacagaatgggagaaaatatttgcaaactatgcatctgacaaaggtctcatatccagaatccataaggaacttaaacaaatttacaggaaaaagacaaactaccccatcaaaaagtgggcaaaggatatgaacagacacttctcaaaagaagacatttatgtagccaacaaacctatgaagaaaagctcaccatcactgatcatcagagaaatgcaaatcaaaaccacaatgagatactatctcgagccagttagaatggcaattattgagaagtcaggaaacaacagatgctagagaggatgtggagaaataggaacgcttttacactgtccgtgggaatgtaattagttcaaccattgtggaagacagtatggagattcctcaaggatctagaaccagaaataccatttgacccagcagtcccattactgggtatatacccaaaggagtataaatcattctgctataaagacacatacacacatatgtttatcgcagcactgtttacaatagcaaagacatggaacccactcaaatgcccatcaatgatagactggataaagaaaatgtggtacatatacaccatggaatactatgcagccataataaggaacaagatcatgtcttttgcatggacatgtatgaagctagaagccgtcatcctcagcaaactaccacaggaacagaaaaccagacaccacatgttctcactcataagtgggagttgaacattgagaacacatggacacaaaggggaaacaacacacatcagggcctgttgggaggttgggggtgaggggagagaacttagaggatgggtcaataggtacagcaaaagaaaaaagaaaaacaaattgacagaaaaaatggtaacaaaaataaaaataggatagtttccttttggcttacctgaagtggctattttagctattagttcaaatatttgtaaattttaaaatctatcaaattttctagtgacagcatgtggaagagaaagttattgaaaagtcagttagctaatttttcagactgcaaatcacatatgtagaattatggttgtctagaagtatgttgtttatgtttatcatcagtatatttttataagacaactcatacataattagaagtagtaacggctacataaaatagagcattttcatttaaaacaattctgatggggtagcatggaaggaagaaaattttggtagaatttagctggtttctaaggaagagtagaagagaaaactgcctcagaaaaaatgaataatgtgcctgcagttttaaacctgagtctgaatacgtacattttgcttagagctgtgtggaatctgggaagcaagtctgtgttttcactttatgcactgttggttctattaatgaaagccaccaggtgactggcagttttcggagtcaaagaagcctgtgtgtaggatctagggagtcaggtttgaaaaaaagatgtcagcgacttaagacccgtgtcacgtgactccctctacttgccagcactgaggctgtggatcaaatttcaactccaggcagtccttccagccatgtgggttcagcggaaagagaagcaaaaccactcttcctaaaatgttagaagctgctcttcgcttaccttggggcctttgcattgggagctgtttttcacatcaaagaatatgtgctgaatggaattttagtattttgctgtcgttttaatattttcgtctggtcttcctcagttcttccagacgcttt

SEQ ID NO: 32403 - DNA, 2300 bp, Homo sapien
ctccgttggaaacaaataaagggagtatcagtcaaagcgcaattccccgattccacttgagaagccccgggcgtcgaggcacggcaggaaatttaccacgacgcctcccactggctcaagggtctcccaggtgctgtcgattttgcaaagggtccgtctctacagcgactgtgacgagtttcggagcatcagcaccggggagcgctgacccgacactcggctctaccgcagcccgccgcgcctcggcaccctgggcttgtccggctgggtgttgccgagcgaacgccccagctcctgcccggaacccacgtccgccggctcctaccgtgcctcatgatcctcgctcgggctagcactttccacgcgcgctgactctgggctccgacacctggaccgcctccgcaaggcggcgcggctgctgtttgtaaacacgccccacgtgcgctcgccctgccccattcgcagcccgctcccggcacgcgaggatcctccgctttccccccagcactgggggggtgagattttaaaatttccccctagggagaaaagagcctcgtcggcagagccgggccactgggaaaagcgccaggacaaggcgagcgtgtgcctccccctgccggccagggaggcactgcggccccgaaacggccaggcggtgagtggaacccacgcagcgcctagagacgcacccctgccgggcccccgcccctcccgcccgctcgccggagtcccctcccccgggccgcgtgcgctcacccgcgcaggccccgccccctcgccggcacaacgttctgcgggggcgcgcgcgtgctctctaatcccccgccttccggctccggcggcgacgctcgtccctctccgctcgtccctcgccgctgccgggccaccagtgccagcctgcctcaggagactccatttgcgcttagtgtggtctgggcgccgcgcaggcggtcccagggcgatgcccggggccggcggactggcgttccctgtgccaagcggccgcccgctggctggctggctgcagcagtgacatcctggtcgccggcgtccaggcggaatccgggctccctccgcgggaggaaagacgtcccgcgctctgaagctcgcccagcggggagaggccctcgctaacacggcttctccctgacctcttaatttcaggaggtaggctcttcaggtccctctctctgtcaccccagattatgcctgaaagcattatttgtcgtatttagctatcacattgataggaggcgttaattttctcaacatagttgcaggataaatgtggataatgccacagatcctgatgttgaattgaaagaaaatgtttttggtattttcctttaggtttcggagcctccgagtatctctacagcccccacaggaactgcttctgttggtccatcgaggatcgtctttcaccaggattattgtaacatcatcttcaccgagcctgccaccccatagcctctaccttgggtcctcatttccaccgatgcagtttttttgatgctttctttagtaatgtgacatcacatgtccactatcctcctttccagctgccaaatctagtaggtttaagtcgcttttaaagtagagttttctgcctgttccactttcaccttatttgcactgttcacttctgtccgggtcatcttctcttgcgtatgatttccacaagcactcacttgcgcaacctatagcagagtccgtgcctagagagacagcattccatacaatccactgcttgacaaagaccacatagtcagagggtgagttttcccattgtattttcctgtatgtcaagtttgcaagtcctctcttgacttaaactgtttactccctagcacatttcctaaaatacttccacctgagatttagtggctattctggcaaagaacattacctgcaaggatggcaagaattgagtatgcaatagtactgttttagaagccttaccagtacagtttctagcctctagtgtgattgcacttcatgaaagaccctgaaccctgaggaggaagaaagatagaagataagagttaattggcgctaggctttgttgtaggaagtttgtaagttttaaaatagcaagtagattcacgtagaccttgtcaggaaattggtcactatccatctaggccctagaagtgagaggaggaatcttacgaactcattttctagttgctttgtattcaaatcttagttgttaattatcttgttctagtaatcacctaaaatattagacacttaaaatgttggggaaacgtaagcgtgtggtgttgacaattaaggac

SEQ ID NO: 32404 - DNA, 2300 bp, Homo sapien
ccataaatttgctctggttgtagattctctttttcaacaaattcctgaaagctaccacaaaattctctggcagcagtttcatctccttttaattttgttcctttaccagcagcctttggaataccatggcgctgcttaaatcgagttagccagcctgacgatgcattaaaatcaccttccattcccaaagcatcaaaaaagaacttggcttgttttgcacaaatcgttccggacactggaatcccatctgttttctgttggttaaaccactctatcataactctatcaagctcctcgtatgttgatgacttcatagatttacgtttggatactccactggtaggatctgaactgtttgcatagtttataatcctttctttgttctttttaatatcacgaactgtggattcaccaattccgtacaccacggaaagttttttgaaagagatgccttcctcaagtttcttaataatgtcaagcttgtccttaattgtcaacaccacacgcttacgtttccccaacattttaagtgtctaatattttaggtgattactagaacaagataattaacaactaagatttgaatacaaagcaactagaaaatgagttcgtaagattcctcctctcacttctagggcctagatggatagtgaccaatttcctgacaaggtctacgtgaatctacttgctattttaaaacttacaaacttcctacaacaaagcctagcgccaattaactcttatcttctatctttcttcctcctcagggttcagggtctttcatgaagtgcaatcacactagaggctagaaactgtactggtaaggcttctaaaacagtactattgcatactcaattcttgccatccttgcaggtaatgttctttgccagaatagccactaaatctcaggtggaagtattttaggaaatgtgctagggagtaaacagtttaagtcaagagaggacttgcaaacttgacatacaggaaaatacaatgggaaaactcaccctctgactatgtggtctttgtcaagcagtggattgtatggaatgctgtctctctaggcacggactctgctataggttgcgcaagtgagtgcttgtggaaatcatacgcaagagaagatgacccggacagaagtgaacagtgcaaataaggtgaaagtggaacaggcagaaaactctactttaaaagcgacttaaacctactagatttggcagctggaaaggaggatagtggacatgtgatgtcacattactaaagaaagcatcaaaaaaactgcatcggtggaaatgaggacccaaggtagaggctatggggtggcaggctcggtgaagatgatgttacaataatcctggtgaaagacgatcctcgatggaccaacagaagcagttcctgtgggggctgtagagatactcggaggctccgaaacctaaaggaaaataccaaaaacattttctttcaattcaacatcaggatctgtggcattatccacatttatcctgcaactatgttgagaaaattaacgcctcctatcaatgtgatagctaaatacgacaaataatgctttcaggcataatctggggtgacagagagagggacctgaagagcctacctcctgaaattaagaggtcagggagaagccgtgttagcgagggcctctccccgctgggcgagcttcagagcgcgggacgtctttcctcccgcggagggagcccggattccgcctggacgccggcgaccaggatgtcactgctgcagccagccagccagcgggcggccgcttggcacagggaacgccagtccgccggccccgggcatcgccctgggaccgcctgcgcggcgcccagaccacactaagcgcaaatggagtctcctgaggcaggctggcactggtggcccggcagcggcgagggacgagcggagagggacgagcgtcgccgccggagccggaaggcgggggattagagagcacgcgcgcgcccccgcagaacgttgtgccggcgagggggcggggcctgcgcgggtgagcgcacgcggcccgggggaggggactccggcgagcgggcgggaggggcgggggcccggcaggggtgcgtctctaggcgctgcgtgggttccactcaccgcctggccgtttcggggccgcagtgcctccctggccggcagggggaggcacacgctcgccttgtcctggcgcttttcccagtggcccggctctgccgacgaggctcttttctccctagggggaaattttaaaatctcacccccccagtgctggggggaaagcggaggatcct

SEQ ID NO: 32405 - DNA, 2300 bp, Homo sapien
aagtggctagaacaggctgtccctgcattaaaataggtgagaataaggaatttcgcctctgataataatatttattttcatgactttagagtaaccacatgatttgtaaacagttaaatgaagcagaggcctgagagagttgttggcatttgtctcacattaaatacattaaaattgctagatttgctattgtggttatgtctatcaaaactttaagaaaatttgtttaatgtactgagtttaactgattttctttggtgctgggaccaaattcttcacttctacaacactcaagagattgtcacaaaatattacaaaaatattgtttgttttgtggctcattaaaccctatataactaacagcttttaaggacattaacagaaatatatcttcagatggataaataagatagggacctattcaagacagcagcatttttgtattgtgatacctcccctaagttactctcacaataaaaccttatttgagaattttccttcacttcaatctgtgacatagcattaggcatttagtataccttatttgtgaaacctaaggttcattcaacagatgaagctgcaaaacagttttcttggtagactcttggaacttgctcagttttttccttactttacctgcatgacacacattgggttgaaagttgtttggttttacccttcatttctcttagatatgatttggttctttttcatgcattatatttttgaaatatatggaggaaatattttattgaatcaagaaatagaaaatattccttaaaccagtagtaaaaaggtgagttagaactccatgtctggaagacaattcaacatttaaaatattaagatgctataccacttaacaagtgaatactaaaatttttaatttaaagattgattgttctgtttttatgaccatgagaaaaatgtgacagcttcagctgtcatatgtttatcttgaatgcttttctaattatgtatttctggattattgactttgaatgccacagaccaactactttacatagagtaaaatattgattaacctttgtgctttgggtcactggcaaaagttgaacatcctgataagtcaatgttaaccagaaacctttttgttcacgtctgaaattgaatatttataaaatgtgttagtatgtttcctgccttgataagttcacctatattgaatgtaatttgatctttgataattttttttaatcttgagaattctctgatactgttttgaataccagtgttcaccatgttataaagttaaacataaaaattgaaataaattgaactaaatatgcatgtgtaacatataccttagaggttggatttcagaaccaaattcataataggagcttgctgtcttaaagtagaaagcagaagaggaaaatagcatttgtttgtattctagcatattgaggtttcactgttcctagcttatactaatgtttttcctctcatttctgggaatgcctgtcattctgagaatccctatatatagcataccaagaacagagtatgatgttactttaaaatgtgtttacagaggatatatgcaagtgtgctgttaatataaattgtttgtccttttctgcatccactttgttactgttttgctgccaaaatgtgtgaaatgtgtgtcttctcttcctcctacatattgtgccaagtgtttaaaattttgtctactcctagtaacacataattaaccacatcccttgtctacttttatgaatcagtataaagaaaaacaatacattaggataaggtttgcatatatgtatatgtgtttttattgaaaactgggcacttgtagccttgtgtagacctctacctgcctgatttactaattatctgtaatgctgccatggagatgatgctgtttactctctcctgctttgttctaagtggtgtttgagaagtgaggcctgtgaatttccctttgtggtagaacagtgaactcagcagtatcttgcataagtgagccgactaccttattcccactctgtttttgtgtacatggtgaaatcagaagtcaaacatcccctttagtgtttgttattttacatatgtatctgagcattttgttttctgttagcaatgcttcctgatgttgtgcgtggccctttttggttgattctctccaaattcgggtcagctgctgccacctggcaaataacagaggatatgctgaatctcctgtccatccttgtaacgatatccttcttaatgaaattcttcaactggctgagcaattacaaatgtcatctgtccagacacatgggcttaag

SEQ ID NO: 32406 - DNA, 2300 bp, Homo sapien
agcggcctagtgtagggaagatgacccagctcccttcgtcttcaaccaaaatgaacatggctagccggagaacccagacagagccagagaatccttcttaacccaccttcaggaagcagctatcaattaactacacctggcataaaagaagaaacttatttaaaatccctgatctaggggcttagaaagtttgatcttttttttttttttttaatactttaagttctagagtacatgtgcacaacgtgcaggtttgttacatatgtatacatgtgccatgttggtgtgctgcactcattaacttctcatttacattaggtatatctgctaatactatctctcccccctcccccaaccccacaacaggccccggtgtgtgatgttccccttcctatgtccatgtgttctcattgttcaattcccatctatgagtgagaacatgcggtgtttgtttttttgttcttgtgatagtttgctaagaatgatggtttccagcttcatccatgtccctacaaaggacatgaactcatccttttttgtggctgcatagtattccatggtatacatgtgccacattttcctaatccagtctatcattgacggacatttgggttggttgcaagtctttgctattgtgaatagtgccgcaaagtttgatcttttggccagtagcatgggcattacctgggagcttgttagaaatgcctatcctgggccaggcatggctcacgcctgtaattccagcactttgggaggccgaggcgggcggatcacctgaggtcaggtgttccagaccagcctggccaacgtggagaaaccctgtctctactaaaaatacaaaaattagccgggcgtggtggtgggcgcctgtaatcccagctacttgggaggctgaggcaggagaatcgcttgaccccgggaagcggagcttgcagtgagccgagagcgcgccactgcactccagcctaggagacgaagcaaaaaacaaaaaacaacaacaacaaaaaactaaaaaagcgtttcctcagtccctaccccagacctattggatcacaatcagcattttaacaagaccccctaggtgagtcctgtgtactagatgagaggatatattttggattggtttgaatcccagctgagcaggttactactgtgtgacctcaagcaaagtgtttagatcatataagcctgtttcctcgtccacatggtaaggcacctcaatgggttgtagtaagaattaaagaggctgaggctgtatgtaaggcatttttcacagagccttccaacaaatacccagttaataatgaagctcttttcatcgtatcattttgcaccatctacagctgctaaccatactacacatccattcaggattctggagctgctcaacagggaagatttccaaagccctcaaagccctccaagcccatggggtagcgggaaggggatggggacaggaacactgtcagcagtgcctctccgaatacgcaggatactgtacattttgcaaaacatattacttatcggatgatcttgctttcagatctccactgcacgtggctttattggaaaccttctgctagagtctagactcagccatggagtctggtgacctgtgggagggagcaagggccagaatgcctgctaaatcgctctgggtccccagccctcttccttaatcccttcttaactttccatctgtctctggtctccaggggtgcagaaccacaacccaccagacccctcctagctcccggcccggcgctcagcagcctgggctgcaacactttcccccaggaccgggaaggcgggggagggggtttggagggggcggagctcggcctcctgctgccgccgctgctgctgccgccgccgccgcctgcaaagctgtcgcccctctctcggatgctcaggctgggcagcgctggacagatgggtacaccccgggcctgacggatgaacagtcgggcaagtgaactctcacctccaaactggctctgcgcccggcgggggcggcggcggcgtctgcagccccgcggtgggggcagccccctcggtctacgcccgactgctgcgcgccgcctctgctcttggcatagtaatttcagttcctgaacgcacggagctcgctccgggaccgggctgagaaggacctcagctcgcgggcccgccggagccatcggtgtggcgccgagagacggtgcttgggatatgcgacgggaagcccccgccacagcgcaggcagtggccccgccgcgccgcggagccgggcagagcaggtaggagacgccccctgcgca

SEQ ID NO: 32407 - DNA, 2300 bp, Homo sapien
ttttcagatgtgttgacttttttcagcattttagtttatgttttctgtgccatgcctttgtgtctggaattggttccttccagtgggttcttggtcttgctgacttcaagaatgaagccgcagaccctcgtggtgagtgttacagttctcaaagatggtgtgtccggagtttgttccttcagatgttcacgtgtccagagtttcttccttctggtgggttaatagtctcgctggcttcaggagtgaagctgcagaccttcgcagtgagtgttacagctcataaaggtggcgcttctggagttgttcgttccttccggtgggttcgtggtctctctggcttcaggagtgaagctgcagacctttgcagtgttacatctcttaaaggtggcacgtccagagttgtacattcctcccgtccagagttgttttgttcctccttcctcgttcctcccagtgggtttgtggtctcgctggcttcaggagtgaagctgcagacctttgcagtgagtgttacagctcttaaaggtggcacagacccaaagagtgagcagcagcaagatttattgcaaagagcaaaagaacaaaacttcgaaaaagtggaaggggacctgagtgggttgctcaggtggcctgcttttattcccttatttggccccaatcacatcctgctgattggtctattttacagagagctgattggtccattttacagagtgctgattggtccgtttttacacagagcactgattggtgcatttacaaagctttagctagacacagaacgctgatcggtgcatttgcaatcctttagctagacagaaaagttctccaagtcccctacccaattagctagacacagagcgctgattggtgtatttacaaacctttagctagcacagaccactgattggtgcatttacaatcctttagctagacagaaaagttctccaagtcccctacctgattagctagacacagagcactgattggtatgtttacaaacttttagctagacacagagcactgattggtgcatttacaatcctttagctagacagaaaagttctccaagccccctaccggattagctagacacagagcactgattggcactgactggtgtgtctacaaacctttagctagacacagagaactgattggtgtatttacaatcctttagctagacagaaaagttctccaagtccccacccaacccagaagcccagctggcttcacctctcactttttctgtccctttttcccttaccctatattctattgatccaatgaagtcatttctattcccctcttttttctttataagtttagaagtaatgtacttaattctattctttcagggttaactcaacattttttcacttatatatcatatttatattttctaatattacctagaaccagttagtctgtattctttcaaagcagagagatgttacattctggactaaatcatgctcctatcttccatgatcacatgtggaatatttgttacaaattgttttaagcacacaatacagcttttctaatagtcaatgcttatttaaatttgtgaacatgttttgctgcttattttgaataatttttttctcaatatttactcttatttgagatctttttttttttcctgaagtacattctatagttatttttcagttagtacatgtgatcaaaaactcagtatctgaaatacttatattttacactcactctcgaatgatggtttattagggtgcagaactctatactgacaatcatttcccttctaaagtttgaaaatataacttctaggacattgtgttactagtgagaacactcatagagatgttatctatttgtgatagatgcaagaggcagataagggagggttcccagagaatctctgacctgccccacaagtgtttacattagatgcttctgtgcaaatgagggaacctgcccagggctttgcctgggcatgcccacagcagaccgggggcccacctgcgtaccgggagagtggggtggagccaccgggaattcacgcctgatgcccggggaggagtctggcctcttcagctcctgtgtggtggcctgatattcagtctgtgagctgggagcctgttggcaggtccctctttttattttcgctgagagctttcttttactaaatgccaccatccttacctttcaaggtgtctgcgtgcctaatttttcctggttgttagacaagaacccggattttagttgaactctggagcaaaaatcctgcatcatttgtaggtaatgtttgttttctttgg

SEQ ID NO: 32408 - DNA, 2300 bp, Homo sapien
caggaggctgaggtgggggcatgacttgagcccaggaattcaaggatgcagtgagctatgatagcatcactgcagtccagcctgggcgacagagcaaggccctgactctaaaaactgaaaataaaaaactgaaaaaaaaatgtgttgtgaactttgatgagatgcattcatataaatcatcccaagtataaaatttcccccactgatctatgttgaagagatagtgtagctttctttcactttgcagacatagacggagcacatgtttcagctaggcaactcaatgtggtcatcctccacctgactgttcatcctgtgactcttactgctatagttgccaccagagaatgtgaaaaagctcagaggagaaagaagagaggaagaatgggcaatgtgtctgtgttgagtgtgtgtgtctatgcctgtggatgagagtgtgtgtctattcttttccaaggaattcaaagtggtttgtaaaataacactcaattgaatacagttcaagttacagaaaagagagtcagagtttgggtgtataccccaaggtggaactttaggaacaagtaggtaataagcatcaatttctttattcttttagtatgtgtgtcatttgatggatgaactatacaaatgtttctgagagattagtagcagccctcaagcacttttctctgtcctcagtgttcacagagaccaaatgatcacatgaagtaactctatcaaagactaatctgttctttccattttagggccacaaataggtctctttatacacatcacaggggcatatcaaagtcatattttaaaaatcagaatggattaaaattgacaaacatttttcatgatggtaaaagaaatcacagatccatcaatgattttgattcttaagaatattcttgattattttttaaaagactatgagtttttaaaactgttctctgaaatagaattatgtaggtacagaaacattcatttttaaaaagtcataaatattagggcaaaattaaaaatctggaaaagcaaacagtcgcattttttactattagctcaaatacacacgttcacattcacctacctacacatacctctgactcagtccacctttttgacaagcaatgatgcaaaaatgaatcaagagagagaactaccagcatttagagtattgattatcctaacccatcactcatgaacaagcaccaaactgacatttggggtttacctacctacatagagaacaccctcttttgtctttcctgctgcttctgccacaccctgtttggttttctcagcagcagccacaactccctccttggcctttgaaagtcctttcatgaatacatccatggctaatgaattcctttacaccacactggaaaacataaaatacactttgaatgagaactttcggggaaaaataaacaaaaaacactgaaaaatcatgagaaaccctccaaagtgtgagactcttttaagtgtacactcatttaaccattggacaaagcagacatttttagctctggcattaaaaatttagcatctcccatccatcttggctagtaaaagtctagccacctaaccacggattaggatgaatcctctgagttgttattactgcatttcagaagtggagttgcatgaaaagattaaccccttttttaaattcccggggtctaaagggtaacagtatgagttagaagcatggaagctggaggcttagggtcaggggtatccttaacatgaatcccagaagaaggctaacaggttgatggtggaaaggcgtaggcaacagaactaactgctcactcggggtgtggttcaaactcaggcaaacagcaggcccaagtgtgatggttctaatccatccaacatccacccccgccctcagctatctaccctgagcaggcgccgctcacactcgcgggccgtctccaaccccgcgccagccacccgagggggcgttctcagcctccaccctagcggaccccgcgccagcacttgttaacccgttaccacctgttgacttggcctccttgcacttccatttcattatttgccaaacgcagcttgcttactttacagagaaaaaccaagagagcgggcagacagattttatgtgagagaaaagttggatgctcacgctccatggagcatcctcgcgtttcccggggaaaagcggatcccggagaagcagcctaatctctcagcccttgtggagaagggaatatcagaagcaggacgaaagccaggtcaagtctctttccttaggctccccaaagggacaagtactcacctcccagaga

SEQ ID NO: 32409 - DNA, 2300 bp, Homo sapien
ccctttccggctcttcctagattaagagcaaacgaaaaccttgaagatatttgaactaaagcgacccctaacgttgtaacctgtgaccgtgattaaatttcagcgatgcgagggcaaagcgctctcggcggtgcggtgtgagccacctcccggcgctgcctgtctcctccagcagctccccaagggataggctctgcccttggtggtcgaccctcaggccctcggctctcccagggcgactctgacgaggggtagggggtggtccccgggaggacccagaggaaaggcggggacaagaagggaggggaaggggaaagaggaagaggcatcatccctagcccaaccgctcccgatctccacaagagtgctcgtgaccctaaacttaacgtgaggcgcaaaagcgcccccactttcccgccttgcgcggccaggcaggcggctggagttgatggctcaccccgcgccccctgccccatccccatccgagatagggacgaggagcacgctgcagggaaagcagcgagcgccgggagaggggcgggcagaagcgctgacaaatcagcggtgggggcggagagccgaggagaaggagaaggaggaggactaggaggaggaggacggcgacgaccagaaggggcccaagagagggggcgagcgaccgagcgccgcgacgcggaagtgaggtgcgtgcgggctgcagcgcagaccccggcccggcccctccgagagcgtcctgggcgctccctcacgccttgccttcaagccttctgcctttccaccctcgtgagcggagaactgggagtggccattcgacgacaggttagcgggtttgcctcccactcccccagcctcgcgtcgccggctcacagcggcctcctctggggacagtcccccccgggtgccgcctccgcccttcctgtgcgctccttttccttcttctttcctattaaatattatttgggaattgtttaaattttttttttaaaaaaagagagaggcggggaggagtcggagttgtggagaagcagagggactcaggtaagtacctgtggatctaaacgggcgtctttggaaatcctggagaacgccggatgggagacgaatggtcgtgggcaccgggagggggtggtgctgccatgaggacccgctgggccaggtctctgggaggtgagtacttgtccctttggggagcctaaggaaagagacttgacctggctttcgtcctgcttctgatattcccttctccacaagggctgagagattaggctgcttctccgggatccgcttttccccgggaaacgcgaggatgctccatggagcgtgagcatccaacttttctctcacataaaatctgtctgcccgctctcttggtttttctctgtaaagtaagcaagctgcgtttggcaaataatgaaatggaagtgcaaggaggccaagtcaacaggtggtaacgggttaacaagtgctggcgcggggtccgctagggtggaggctgagaacgccccctcgggtggctggcgcggggttggagacggcccgcgagtgtgagcggcgcctgctcagggtagatagctgagggcgggggtggatgttggatggattagaaccatcacacttgggcctgctgtttgcctgagtttgaaccacaccccgagtgagcagttagttctgttgcctacgcctttccaccatcaacctgttagccttcttctgggattcatgttaaggatacccctgaccctaagcctccagcttccatgcttctaactcatactgttaccctttagaccccgggaatttaaaaaaggggttaatcttttcatgcaactccacttctgaaatgcagtaataacaactcagaggattcatcctaatccgtggttaggtggctagacttttactagccaagatggatgggagatgctaaatttttaatgccagagctaaaaatgtctgctttgtccaatggttaaatgagtgtacacttaaaagagtctcacactttggagggtttctcatgatttttcagtgttttttgtttatttttccccgaaagttctcattcaaagtgtattttatgttttccagtgtggtgtaaaggaattcattagccatggatgtattcatgaaaggactttcaaaggccaaggagggagttgtggctgctgctgagaaaaccaaacagggtgtggcagaagcagcaggaaagacaaaagagggtgttctctatgtaggtaggtaaaccccaaatgtcagtttggtgcttgttcatgagtgatgggttaggataatcaatactc

SEQ ID NO: 32410 - DNA, 2300 bp, Homo sapien
tagtgtgggttacactaatgcatggctttttcaaaactgatttaaagggacacaacatctgagcatttccctaggtgtaaattacactgcaattttaaagaatcatctaatgatattgtggttatttttaaacagtccttaaattttgtggatgcatactgaatgtttacagctgaaaagatatatataaagcttgaatttggtaaaaaaaaaaaaaaaagagggaggattggtagtgataaagtgagtggacttatggatgagacatgatcagccatgcattgaaaaaatgtaaaagttggatgatcttcacatgagagtcctttattctgtctacttttgcatatgtttgaatatttcccataacaaaaagttgaaaatagagtgatcacatgagttaatctcctaatttacaaaaaagaaaactggaaacagaaggagaacaaaacttgttcaaggtctcaaagccagacagcaaactagctcccaagtccaaccttcttgctctggtcctaagcaaacaaaaaatattaatatgagctactgcattaaggaaagtctgcttttccaaagggcagaccaatagttcaaggaagagtttaaataataaatatttgtgatcttactttcatgcttttctattttccactgaacacatatgcattatcttctatatgtcttttatgtataatcatttgcttcctgttccttgtggttttaaagttgttttgtatgtttaaatttgattttactcaaatttcagaacccaaattagcgcaagaatcagacaaagcataactttctataaatataaaaacaattaaaaaaaaaacatacagcaaaaacgagttgttgtttcccccctcctcttccagtgcttaactaatcttccgaatccaggcacagaaagcaaaggctttctgctagtgggaggagcttgcttctccattctggtgtgatccaggaacagctgtcttccagctctgaaagaggtgaaaatgtgttaagcgatgcaaaaattgtcttgaagttcgcgtgtgtatgtctgtgtgcatgtgcgtgtggtgggtggggggagagaaaagggggtgtcaattctgagggcaacgagaatcagaagtcagaaaggtgagtggtgtgtagcatctccctttcagaaggggctgaagaagaaattggatatgatggtccggtaggctaaatcacgctggatttgtctcccagataaagggaggtctgcaaagtaagtcccatttctagagcgaaaagccttaggaccgcttgttttagacggctggggaatatttattccttgttccactgatgggaaaatcagcgtctggcaggcgctgattggtggaaaggaaaatggtgatagtggcgtggaaagaggatttgctgagccttctcctgcctcctcaacctgtgactcttccttagtagtctccctttcaccctcaggaccctttccggctcttcctagattaagagcaaacgaaaaccttgaagatatttgaactaaagcgacccctaacgttgtaacctgtgaccgtgattaaatttcagcgatgcgagggcaaagcgctctcggcggtgcggtgtgagccacctcccggcgctgcctgtctcctccagcagctccccaagggataggctctgcccttggtggtcgaccctcaggccctcggctctcccagggcgactctgacgaggggtagggggtggtccccgggaggacccagaggaaaggcggggacaagaagggaggggaaggggaaagaggaagaggcatcatccctagcccaaccgctcccgatctccacaagagtgctcgtgaccctaaacttaacgtgaggcgcaaaagcgcccccactttcccgccttgcgcggccaggcaggcggctggagttgatggctcaccccgcgccccctgccccatccccatccgagatagggacgaggagcacgctgcagggaaagcagcgagcgccgggagaggggcgggcagaagcgctgacaaatcagcggtgggggcggagagccgaggagaaggagaaggaggaggactaggaggaggaggacggcgacgaccagaaggggcccaagagagggggcgagcgaccgagcgccgcgacgcggaagtgaggtgcgtgcgggctgcagcgcagaccccggcccggcccctccgagagcgtcctgggcgctccctcacgccttgccttcaagccttctgcctttccaccctcgtgagcggagaactgggagtggccattcgacgacaggttagcgggtttgcctcc

SEQ ID NO: 32411 - DNA, 2300 bp, Homo sapien
gtccatcaataatgaaaagaaaaattaaaaaaactttattttaacttctagttcccttctttgtacttgagcagctttccctccttaagaatacagacctagaacatatgcaatatcactatcaatattatgtgtaattaaaagttcattggatgtttactgtgttcaaggcattttaaggagtgacaagagttaaacatatagttgtaattcaaaatgacaacgaaattagtttacagttttctttttttgtaggtagtaagaaatcatctccccctattgaggaataccaatatagaaaaggcaaaactttaaatatgaatgaactgtttcataataacataagttcttcttgatttccattgtcacatccaaatttgaaggctatttctaacacagctgggttctacctttttccttctcactctttaccacacccaatctgtgaggcttcagacacaaactgctaattcaggagacaattgtgccttctgtaacagtttctgctaaattgtctcagctctgccacttaaaatagctaggtgatctcagcatatcaccaaaactcttggagctcagtttctctgtctataaaagttacataaaatgtaattgatctgcttgttatgactaaataacatagtacattagtcctttgccaaaggactaacaaattaccaaataaaagtttggaatcatgttaaacgtttataagaagtgcaactgtccagaaataattctctcacattggtctgttgtaatgagacctaaaatatctcattttatttacctctttgacttaaagcactaggtctcaaggaggtcatggttatactataaatatgtcatgtgaaataatatattaaataattgttgtaatactctattgagatactagttgtaaagaggcacaatggaaaacttatactattaacagtagtaaaaagaaacaacaaaaagcaataaaaaacaaaacacccattcatgcaacgacatgaacgaacctcacaaatattatactgagtaaaagaagtcagacaaatataaaacaaagtttatactacgtgattagatctttatgacattctagaatatgcacatgaaggtacaaggtaactgtctggaatgatgaaaatgtcctgtgtcttcaaaatagtgtgggttacactaatgcatggctttttcaaaactgatttaaagggacacaacatctgagcatttccctaggtgtaaattacactgcaattttaaagaatcatctaatgatattgtggttatttttaaacagtccttaaattttgtggatgcatactgaatgtttacagctgaaaagatatatataaagcttgaatttggtaaaaaaaaaaaaaaaagagggaggattggtagtgataaagtgagtggacttatggatgagacatgatcagccatgcattgaaaaaatgtaaaagttggatgatcttcacatgagagtcctttattctgtctacttttgcatatgtttgaatatttcccataacaaaaagttgaaaatagagtgatcacatgagttaatctcctaatttacaaaaaagaaaactggaaacagaaggagaacaaaacttgttcaaggtctcaaagccagacagcaaactagctcccaagtccaaccttcttgctctggtcctaagcaaacaaaaaatattaatatgagctactgcattaaggaaagtctgcttttccaaagggcagaccaatagttcaaggaagagtttaaataataaatatttgtgatcttactttcatgcttttctattttccactgaacacatatgcattatcttctatatgtcttttatgtataatcatttgcttcctgttccttgtggttttaaagttgttttgtatgtttaaatttgattttactcaaatttcagaacccaaattagcgcaagaatcagacaaagcataactttctataaatataaaaacaattaaaaaaaaaacatacagcaaaaacgagttgttgtttcccccctcctcttccagtgcttaactaatcttccgaatccaggcacagaaagcaaaggctttctgctagtgggaggagcttgcttctccattctggtgtgatccaggaacagctgtcttccagctctgaaagaggtgaaaatgtgttaagcgatgcaaaaattgtcttgaagttcgcgtgtgtatgtctgtgtgcatgtgcgtgtggtgggtggggggagagaaaagggggtgtcaattctgagggcaacgagaatcagaagtcagaaaggtgagtggtgtgtagcatc

SEQ ID NO: 32412 - DNA, 2300 bp, Homo sapien
tgttcagtttttattatcattggataactatttgttatcagttatagatccaatgggtgacattttaccactaaagttcacttgccagaccaggtttgaacagtctttcaaactgtagaagaaaacaaaaaatcagtgaatgtcattattttggcagttttgtaaatcttcaagacagtccattcatctatttttactaaagctaggaaaattggtgtaaaattgaatataaataggaacatttttcctaaattttatgaaattactgctcttccataagccaaagctagtttcttctgtgttttccagataaagacactgtaaagcctttttctttctactgaaaaccatgtttgtattgtgacagttgtgcagtttcattgctcttttgctctttttagtaactaatcgtttcctggattgtctctgctggacctttttgctcctttactaaggcaaggtttgtggattgttctgtggtatatctgagaaacggatgctttttactccatatcagagtcgattggggttgctgatgattgtcttagtttaaataaatactctctagtaggtcaacaatacacttacggaaataaatggcaaagattgagggaagaaaaaaatattaatcccaagtagttagtagctcaaggaagaattaggccttatttcaaatcctggtgcactgtgtccaggaataaggactagagaaaatatctacaataaaacataaccaagcaggcattagatttccaattctctaattttgaaagacggaacttaataatctaataacaaaaaataaaatctaataatagtttaacaatcaatgactgaatatttagcaagagcataatgcctggcacagaagttgacagaaaaatgggttacacatggatttagcttccaaataacataacagacatttagcaaattgacagcaaagaatatttttgttttccttataatcctagcacataagagagtgctttgcacagaatgaggggttatgtaactactgaattcatgaatacataaataaatgaatgagtgaatgaatgaatgaactattataacttagtttgtatatctatttaaacagactgatatgaaattttatagataagaggttaattgaaatctgaggatcagagatttgctggagaaattaaatgataaatctcatgaaacatctctaccagaaaaaaacccatagaaaactcagataaatctggttctctgctacctacaactggcataattttgtcctacagtaaatgtataaaagcattctatatgatcccattttaatttatttttatgtgactccattttttcttcatctatcccttactagtaaaatattggttacccccaaccatcagacaatcgtgattggaaaataaaggaagtaaaattctgattatttattccattagtgggtatctctggtagaagttccaggagcaaaatttaaagtgacttcctggtatacctgtctaattcaattacttatgctttccttttctgttattacttataatcattgagattaagtaatgatacagctgaagtgtatttataaaaatagaaagatatacatgtatgtagatagatgttttataattcagagtatatgtactatatgaaaggatagagacactgtaaacaagcttttgattatgtgtatgcatgtggatatacacttgaacaaaatgcagctttctggatagagcacagcagataagtatcataaaaacttttctcagtgtctttatgtagtagaacaaaatgttaaaactgtattcagcctatatcaacaaaattttgcactctctatcgtgaacctgaaatttctctttgaaatcagtgaaacgtgaaaccagggtgtgctcaggaaaagaaagttacttcatattttttcatgggttttcctgataataattgcctgtgctttcccatttacccttagctttgtcagagacccttcagcacttccatagagccatcccactagaggtcacagatcacaaaaaccctacagaaacaggaaaccgaacttcctgagtacgctacaaaacacagaaacctgtttcctctacacatctcaaactggcaaaactcagtcttagcagattcagtgtggaagcagctatcaaaaaggccataaggattttgtccccaaatttcacatgagctaccttgcttcaaactactgagatgaagggggcaagattatttgtccttctttctagtttatggagtgggggcattgggcttaacaacagtaagcattcttg

SEQ ID NO: 32413 - DNA, 2300 bp, Homo sapien
caaaggattgtaggtcagcttatttcataaacaaaagctctaaggaaagtcctgagatttttaagtaagccaggccttctgaatgggacatgatatggacagtagaataagacagattgagttccattgacattatttattctttgtatgatcttaggttatctacacacactttcaaaatttaactttcttggtctgtaaaattgaggaaataataatagctgtcccatagggcacactatcaatcccaatatgctttgttagtccattcatttttccagtgcttaatcaaagaagctttaatggcctatatacttatattattgatatattcacgcacctgtcccaacttgctgtcctttccaatatcactttgtttttatcacactccttaatatcacttctttgttaggtcttgatcacatgcttaaatcatttttaatgtttgctaaactctgtatgagagattgaagaattacgagacaggaacatcaatgtgaaagggtaaaatatgtggagaatatataaggtgccagcatatgacaaaaccctaaagatgtacgatggtcacaagccatggaagaagataggacaactgaattgtcaaccttgccgcctcctccgtagcctcctaaatcttatcttccttttgtctaatttatgaaaaatgtttcctataattgtctcccaaaagcagagttgtccccatgctgtaatatacattgaccactcagattcatttaaaaaatacatcttgcttttattcccaatataaccacatttcagaagttagatcatagccagttagattacacagagcgtgcgcacgcgcacgcgcacacacaaacacaccttgaaaaaactgtagatcacttgatttctggaagtttttctcaatacctcagtgcacctgatcacaacatcttgtaatctgggcagaaggtaagggaggtgatgttaggcgtacaaacttaatattggggatgcattttctacctagaaatggtcctacattctaccagaatgggttaaaaacagatgcgcgcgcgcacacacacacacacacacacacagaattaaatgcactacatttgctgtattgcctgctaaaggcataaatatactggagtggagataaagaaggggatggatgggaaagagttcagtacttagtgtaaacctgaaaggaaatgaggcagtgcaaggggagagaggatcaggggaaaataaattatgtaggcaacagaaccatgcatcaaaagtcttttcgatttctaaactggcaaattttctccaggggaccatcagtcaaatgatgtcaaattgagctgattctcttgtaatgcctgtattgtgtagggccttccttgtaggaacacaagttccactctcggacacagtcgcagtgcttgcattatcttacagaattgattgctgcaaatggttcctgggaggtgtgacctgcttaaaggaaagaagctaggtttcttttcttgttactgaggaatgaagacacttgtcaggatgtgaattgtgtgggtgagaaggaaaagcggcgaaagaatctggtaattccttcccttacaggaggaagagaaaaaagataacatcggaaccttggagaggagaaatacagtgcatttatttccagcatccccgcagtcacttcacgtctcttcagacttcccctattctttagtcttgacctgcctatgcacttgaactccacataagcactaggatggactgggggaaaaggccaggtcagcacggtgggatactgcttcccctaaaatgaaaactcagcagcgggccagcagtgggtgtgcgcgcgtcgatgccagaggatgcgtgcgtggaatccggcggacgcagtgggccgggcaccgccctccaagccgccccgcccagcccaccacactcctccttgtataaaggccgcgcttgggcccgccctcctcacagccccggagcgcggcctgccggggaggtggatctcgcgctccccacacagtcacactccgcgcactcacacacttggaagcgcctccccacgtccctcccctgccctcctcttgctctgctcttctctccctcaccacaaatagtcgccgacctactgccaatccgcctctcctctctctctctctctgtctcaacatgactgactgggaagcggtggctcgggcagagcagctccgctggcgcaggcaggaggagcaggaggattattaaataacgcagctggactctgtgcaactgggagtggagaggagcccaacagccgagaaggggaggga

SEQ ID NO: 32414 - DNA, 2300 bp, Homo sapien
ctcacaccagttagaatggcaatcattaaaaagtcaggaaacaacaggtgctggagaggatgtggagaaataggaacactttgacactgttggtgggactgtaagctagttcaaccattgtggaagtcagtgtggcgattcctcagggatctagaactagaaataccatttgacccagccatcccattactgggtatatacccaaaggactataaatcatgctgctataaagagacatgacacgtatgtttattgcggcattattcacaatagcaaagacttggaaccaacccaaatgtccaacaatgatagactggattaagaaaatgtggcacatatacaccatggaatactatgcagccataaaaaatgatgagttcatgtcctttgtagggacacggatgaaattggaaatcatcattctcagtaaactatcacaagaacaaaaaacccaacaccgcatattctcactcataggtgggaattgaacaatgagaacacatggacacaggaaggggaacatcacactctggggactgttgtggggtggggaaagtggggagggatagcatggggagatatacctaacgctagatgatgagttagtgggtgcagcacaccagcatggcacatgtatacatatgtaactaacctgcacattgtgcacatgtaccctaaaacttaaagtataataataataaattaaaaaaaaaaaacaaaacaaactggccttatgaaccttagaccaatcttgagggtataaaagccttcgcagtgaagtggccataaaaaaaaaaaaaagagaaaattattatagaaaaagcagtagaaatcatggtgctgtttattatcatttgaaaagtatttttttattttgttctattaatatgtttcaatatgaatgatgcactgagatcttggataattagcacataacaacataaataataaaaatcatttattggacacaattaaattatgcctttcttacatacgttgtttctattaaaatgtgctgaaatttacttcttaatcttgagatgtaataaagtgttttaaggttacttttaaaaataaacatttaaaaaatgttgtgcttatatgatatcaatggaaaacaaatacttttgaggtttgaaattttaaatccgaaaataataatattaggcagcctttgtatttccagacctcttgtatttatacagggggatctagggcaaaaataattgctgaaatttaacatttatctgggtgggcctctgcgtacctcagcctctcttattcttttttttttttttcttttgagatggtgtctcgctcttgtcacccaggctggagtgtgatggcatgatctcagctcactgcaaagttttgctccctagctcaagcaattctcctacctcagcctcccaaatagctgggattacaggtgcccgccaccacgcccagctaatttttgtatttttagtagagatgaggtttcactacgttggccaggctggtcttggcctcctgacctcagatgatccgcccgccttggcctcccaaagtgctaggattacaggcttgagcgactgcgcctggcccaacctttcttattcttttgaaaatgcttctggagtccattgatacattctgtgagacctggtgggaagaaataggcctcaaggcacactgagtttttgagttgccctctacatttttcaagctgatcattattgagtccctattatctgacagatactctgctaagttatttatttaaattatctcattaaacattatcacaatcatattagatggggactgttattatttccatcttatacacaataaatttgaggcatagagaggttaaatttgagcagtgtcactgtaactcacttttaaaaactgtgtgataattaaatggcagtccttagttttaacccagttatggctggctgtaagttccatcccgtcatgaccattatgtttcctcaacttttctattttcctacttcctttgctctgctctcagtcactgggagacgaaagtgctgctggttagcacagaagaaactgctgctgctgcggcttctactgttgtctgccatctctgttaccatcgagaccggggctgtgtatgctcgaggtgcagggagctaatgtataaggagttaaatgaactcttgctgctgccaaatatgttgttatcactaactgcaccgctgctgtcattagtgctgctgccaacactgcaagccctgctgctgccagtgccaattctgctgatgccttgggctctccatgtcccaggg

SEQ ID NO: 32415 - DNA, 2300 bp, Homo sapien
ttggtcaatttagcaaatgttagtattttcaaacttcttagaaatgttctttatactctgccatgaaaattaaaacataaaactagaaatttgaaagatcatagcttttctccccaaaagcatgctatgtatttgtaaggtaagtaaaatgagtgaaataggatgaatattcagtgattttaaaaattgtgaaaaataaaaactatttttgacaattaaaaaaatagtagtgtactctccactttatacaaaatatatactttaaaataacattgattgtagagtcgggtgtaggagaacaaaaagcaaattccaaaaatagtttattttacatttgtttatgataagtttaaatggacttaagtcatttgtcctaagagtttaggaagtgaagaaatttcaagatagtaagaaatccagatgaaaatgaaactaatcaatccataagtaataacaattggtatttggcttatacgttatgtgaaaaacagcaacaacaaaaaatattcatgcctgtgcttaacatctcagtggggagaaataggcagaggaaaacatgtttaaaataagataatttatacgatattttaattgtgcctccatttcttaagggaactttttttcattcactatctgcttgagctttatgtttaccttttaggttcaatattagagtattaggtgcaattattttataggctccttaccgtagttatagaattcagtttagacatagactcacagttttttgttcagtttatcaacaaattttcattgtatgtcagtctctgagtctacaaaaaggaaagacaaaatgagaggaataaaggaaaaaaagaagaaagaaagagagagagaaagaaaggaaagaaagaaagaaagaaagaaagaaagaaagaaagaaagaaagaaagaaagaaagagagttgccctcaagaaagaagtatacaagttcctggtattcaaaaaattaagtcatacttaaagcctgaaatttctgtggttgtagggcatactataagagagagtttctaagaaaaccagttgttatggaatgaattgtatgtccccaaaattaatatgttaaagccctaaccaccaatgtgactgtatttggagataaggcctttaactaaggttaaatgaggttataagagtagggccctaattcaatatgattgttgtctttataagaagacaaagaaacagtaaaagccaagtgaggacagagagagaatgcaccatctgcaagccaagaagagaagctgtaggagaaaccaaacttgctgacatcttgatcttggacttctagctccaggactttgaaaaaataaatttctgttcttttagccacccaatctgtggtattttgttatggcagccctagaaaagtaatataccagtcaatatcccaaatacagtagaaagaacaaagccaagattagattttatatggggaaccttaggactttgtgtgttgtactaatatagggaagacaaccaagagagtaacacggtcttataatattagtgacagagcagaagttagctgctgcttcttacacattcatctatgtgcatggcgataaggcttgacagctttgcactgataagaaaacaggggcaatgctccttgaatggtttcactattaaaatggccaagaggttaagtgaattttaagaaatttttcatacagaagcatgttgtgaaaataacaatcctgtccagaaattaatttgtgggttaatatgcaggacatattagaataaagtttattgggagaaatgaagatcaactttgattcaggtttgaaatagtaagaatatggagtgtggcagtggcaatgggaagctaagaagagagaggctgaagattatataaaaattggaaatgaagagattaattactattataaacagtatgcttgtgccctctcaatattcacatgttgaaagactaaccttcaatgtgactatgcttagagacagggcttgtgaggatgtaataaaggttaaatgaggtcacaatcgtggggccctgaatcagtagggtgggtgcacttagaggaagagacaccaaagttttctgtctctaccatgtgaggacacagtgagaaggcagctatttgcaagccaggaagagagccatcaccaagaactgaatctgccagccccttcatcttggatttcccagcctccaaaactgtgagaaatatattatctgttgtttaagccatcagtttatagtattttgttatagcagcccaaacatattaagacaaagtggttgggtactttga

SEQ ID NO: 32416 - DNA, 2300 bp, Homo sapien
catacaatccctcattagtttactacttgagacattatctttttttttaaatttagcaaaactaaaaatctccattttaaagaaaaactaccttttcttgatttaaataggtatgctattttctttttgtcagtttaaaaataaaattataattaatcattacagcagaaaattgttttaaatacatatgtttgttgaataaaaagatgttgggtccaaatcaatttaattagagcttgtctattttaaagccattttcgttttacaaagtcattaatttcttttgcaagttcttttcataattaagctttttagcaattggtaagattttttaaaagtacaacttaaaatgactcaggttaaggagagccaattcaccatttttgctatgtatttaactagattatgatttatagagggtatataagatggattaacttaagagtaatatgattgctgttagtagcaaaatagcttgagctctttaagacaggatatttacaatgactagaagagaaaggggcataatttctttctacatatcttagatatgagtgtattttttcatagaagcactttaagattctctctatgtctaaagtcaatacagtaagattcttctttctcaagtagcttattttatttcttattgcaacttaaagggaaagtttttacatttaataaatagaataaataattatttcatcttcgtactctgcttcttaatctctcatcttttcttcctggcaaatttccaggagactcttcagaaatatcagtatgttgcttgctgcagtttggttgcatggctgttcacaggataaaaatggcacttgttctttaggctttcaatcatgtttttcacccattgccagtaggcaatgcagtcatttattgccatttcatgtccaaaaataacctgagaaagattatctttttctgtcaatgtaaaaacattaattaaaattcttttaaaatttaagaattaaatttatttacaaatttagagctatttagtgattaataaatctgagtttatacagtaacacccatgtattcaccaaattctgagaatttacacaaactattatatatgttcaaggacaaaagagccacatggatcttggtagatattattagtgcacaacaagaagcacttcttttttctgtcaaggcacaggaaagattgttttcccattatccttggttagtggagttatgagaccctgaatgactttacggaacagagccctggctccataattgatattttagaaaaaaaaataaaaggtaagtaaacttttgttatatgaaaccactgagattttgtgttaatatgttattgacataatccacctgaacttaactaatacaggtcctttggagaaataaatctataaaatattaagacatggggaaaaggaaagcattcaccaggccatgatatactatatctggtaaaaagtgccttcttatcattttacacaaaattttaaaaatgatctgaaaaggatctaattaagccactaataaattttaagtctaatgagtgtctttttttttctttttttttaatagggtatgagcacaattcatgatgaatcaatataagcggaattattataatttataagtataaagtggatttgtttgtaaactcattctaggaagaactctccaagatgatttacctacaccatgtttgccaaatcagagtaaagacataatttaggacatcaaaagtggtaggagaaagcttgcttcacacttgctcaacagcaagcacttgtagtttagcaaaatatagaaacataaaaaaaaaagttatttttttttctttcagtctgggaccagaaatagtggacaagtagagaattatttttgttttcttacggcaatactagaaaatcaaaaacattagatatttcttccttttgttatatttcccaaggtggtaaacacccaatatgaatgtaaaaatttaccatttttctgagttctgtgaagactgtataattatcaattcttaaatcagtccacaaataaacatgtgttaccacatggtataagataaaaacacgagggaggagccaagatggccgaataggaacagctccggtctacagctcccagcgtgagcgacgcagaagacggtgatttctgcatttccatctgaggtaccgggttcatctcactagggagtgccagacagtgggcgcaggccagtgtgtgtgcgcaccgtgcgcgagccgaagcagggcgaggcattgcctcacctgggaagcgcaaggggtcaggga

SEQ ID NO: 32417 - DNA, 2300 bp, Homo sapien
ttatctaagtcacaaactaatattttaataaactttgtttttcagaagacatgccattctcaagcttctacattggctgaggttttcagatactgatcttatctgccaaagtgcaggaaaagcatcatttagtgacaacttactctagctgctgactcagtatctctagaatacaggtaaaaatctcaaaaatctcaatcaggacatgtcagggcatggtgttttagagctgtagggaatcttaggtaatctgctttatgtaactattatgcaatacatgatactgtctacttgcaatttttagaagttgttttaagaggttgaaaatttttttctgccttcttattcagatgtcattttaccagcctgaagaagaatttactctctgatgagaaatgccacaattgccagcaaaattcacagtgacttgcatacaaggttataactattaaaaaaaaaaagagtaaggagctttacagctttcatggatgagggtgcttcttgctgcaatatagtgttttccctctgttgatatgctttaagctatatgcataggcactgtagtgaggacataaaatatatgaactatgaaacattttgaatattgacattttcaattattttttaatactcataaaaccttactcctgaatttgctgaaatgcagggcggtctacttcagttcattagatacctagtgggaggatgtaatcacaaagctagaaaaatgtgaaacactccaggctagacatcttaggctaatcataatgtaggaaagttcttcaaggatttgagcacacagcacttcataaatagtactgctaccaattaatttctctaaaatgaagattacagatttcccatggtgaaattaatgtcatagagttaacgtcttttgtaatagaaaatggttattttgtcgcctttctaattctgaattaagatacaacctttctcctcattcttctccacccacacacatttaatattagatattggtagaactatttaaaatttttctctctactaaaataaaggattctcttatttatgaaaataaatagttgatgttcattttaatagcagatgtaataaaacaataaattgcaagttactaaagcagcagatatcaaaagaatgctataaaataaatgctatgttatatggattatataacatatattgtattatatttacttgattatatttatataattacacagtcacattattatattaatttattacaataacttcaatcccatctactaacttagagaccagaatattgactaatgactaaaagatgagagaataaatatacaattcatgtatcaatcctttatacttccctttgggggaaccattttctttctcttctagtgtccccatcttaaattttaaagtatgaacttctacccttttagaagaatgggagaagaatttttagactttgttctatcttctgcacctttacttcaacaacagaagtgccttaactacttggtaagattgggcaaaaggatgaaatatgaaagctcagcctttccaatagtctctcttttagggtaatttgatctgtagatgtgggctttctcttcttgctcctccctccagataaacacacttaaagcagggcttaggacctgctttctagaaacaagtcacctgtctttgtagttccactgttgggtcttgatgggtacgatgcaacaatgaagctgtagcaagttcagttggcatatgctctatagatgtaacacatggtgaaggcacagttccatgccctatcccatatttagttttcacttgtttcataacctgtagttgaatctgaaactttataaaaagctcactcacatttgtttactgaaacatgctctgcttaattaaattatgttcttacacgtttgataaacttatctaagtgtgtgatagaattaactgagacatttattagatgatactaattgcttacctttgtatttgtttagattctcaatctagataataggcttcttagacaaagatcataataatatttctcaaagaagttagcaatatagaagaaatgcaaacattattaaaaatattatggcgacaactcggtggtggccactgcgcagaccagacttcgctcgtactcgcgcgcctcgctccgcttttcctccgcaaccatgtctgacaaacccgatatggctgagatcgagaaattcgataagccgaaactgaagaagacagagacgcaagagaaaaatccactgccttccaaagaaacgattgaacaggagaagcaagca

SEQ ID NO: 32418 - DNA, 2300 bp, Homo sapien
acaataaatggaataaaaattgaaatagtctttcatgagcagactcaagcagaagaaagcatctgtgaatgtaaagacaggtcatttgaaatcatccagtcagaggatataaaaaaagaacacaaaagagttaagtaagccagtgagatctatgggacacaattaaatgaaacagtatacacattatgtaagtgtctgaagataacaaaaggaaaagagagcttatttaaagatataataactgaaaatgtgccaaatcttgagagggatatgaacatccacgttcatgaagttaaaagatttctaaaacagaataacttcaaaaagaatataccaagacacacgataaaaatattatgaaaagtaaaggacaaagaaagaattttgaaaatagcaagacaaaagccacttgttataagcaaggaaaccccattaagctattagatgatttctcagcagaaagcttccagtctaggagagtgagataatatattcaaaattctgaaagaaaaagactgccaaccaagatactacacccacaaaaactgtccttaagaaataaagaagagataaacactttcccagatgaacaaaatgacaatctataaaatgtctaacaaaaatttagagggaatttattaacattagacatgccttaaaaaatggtaaagggagttcttcaagatgaagcaaaatatgctgtttggtaagaggaacatatgaaagcataaaactcactggcaaaggtaaatatatagttaatgtcataattatctgatgcagcagtggtagtgtgtaaactacttgtaattctaatctaaaggtaaaagacaaaagtgtttaaaatgattagaatgaaaataatatgttgaaagttatacaatataaaaagaagaacctctagcagatacacataagaaataaaaaaaacctctagtaaatatacatagataaagataaagaaatcaaattataccaccgcaaaaaaaaaatcataaaattacaaaggaatatgacaagagaagaagaaagaaacaaagaaactgcaaaatgttcagaacaacaagatggtaattttccaaatctagtcattacctatataattattgaaaatataaatggattaagctttccagtaaaaatagatagagtgggtgaatggattaaaacacacgatcaaacagtgtgcttcctacaagagacttgctttagctttaacaacagacatagacaggaaatgaaggaatacaaaaaatatgccatgcaaatggtaaccaaaagacagtaagggtgagtataattatattagacaaaacgaacatcaagtgagaaattgtcacaaaaaaccaagaatgtcattatataatgagaaaaggtcatttcattaagtggatatagcaagtgaaaaaaatatatgcatctaacatacagcacccaaatatataaagcaaacattaacaaaactgaaagaagaaatagacagaaatacaatagtagaagatagatactatgttatcaacattgaatatatcatctctatagaaaattaaataaggaaacaacagacatgaataacattatagaccacatgggctcgacagacattttatccaacagcagcagaatgcacatttttctcaagcacacctatgacatctttcaagatagattatatgtttagtcataaaacaagtcttaacaaatttaacaaggctgaaatcatagaattatttctgaccacaatggtattaaactagaaatcaataagaggaagaaaaatcacaaaatttaaaatgtgtggaaattaaacacactcctaaataatgagttgaatctaaagggaaataacttgagagaaaggaaaatagtaacactacataccaacatttaggacatgaatacagtgaaaaaaaattactaaaagaaattttatatcaataaatgcccatgttaagagaaaaaggcctcaaataaaccacctaactatatacctcaaagaattagaaaaagaagaacaaactaagctcaaagttagcagaaggaaggaaatagtaaatattacagcagaagtaaagtagaggctagaaaaataataaaaaagatcaacaaaatggtatttgttctcatactatgataaagacatacttgagaccgcattatttatggggaaaagaagtttaattgactcacagttccacaggctgtacaggaggcatggctagggaggcctcaggaaacttagaatcatggtggaaggtgaagaggaagcatgcaccatcttcacatggcagagcaggaga

SEQ ID NO: 32419 - DNA, 2300 bp, Homo sapien
ggtttgttccagattcagaaggaagtgatgaaattcaagtcaacaaaggggttctctgtaaaatgctgtgttgaataaaatgtgaatgagctttggttttcactctcaaggcatttatgatctaacttagtagtagttctgtctaactctaatacaaaatagggtgtgttacgacagcatagaagatagatggatttattccacattaaaggactggacactacttcatgggcaaaaggaatttgaactagcccttgagatggtgaaggagagtggttgggaggacaaatacgtgctttccaagcagaaatattaacataagtaaaaatatggcagcaaaacattttctggaatgttcaggaaaaagtgtacaagatgaatgaaaacagccagaagtgagaatgtacaactgtgtctggaaaaatagtaacccaattcagaaggctagagagaagggctcaagtgagggaacgggaggaaaagaggtttgccaaacttggaggtaaggctttgaaaggttgtgtaatgagcttgacatccacacatccaacattcctaaagaattccaattataactgagacaatattatgacattaatacctgacctcgactagtcactcgattgtgttaacaaatcttcagtttgcaatgaggccagattgacataagtcaatcattataagaaaagaagtcacaatgatcaggattttatcttaaggaataagcttgcagaaaatcctttcactggagactgagaggctgtcattcaggacttcctcagctttttccatggaagagagtacccaacttcctcattcggaatttatctacataggttattaagctactcaatgaaatattttgaccaaatgtttatgaaaaatttttctgttttatttaattattctgcttttttattttaatttcaagatcttttctatcctgatagagaagaatttctatcaatagaaaggatttcaggaacctttctctatcctgattgcctaaaaaatacactggagacagaaaaaaaaaatcattgtataaaaggtaattagcacgttctctcctttttataactttataattgaaatctcattaaaagctttctaggtctgtatttccctaagtgaccaggtgtccctaatttgttttcaaccaatgtgactaattccaggcaaagactagaaaaagtctgatacctgttagagaatagcaaggttaaataagtggggtggcttttttaggttgcatttaacctcgtaaaataaagaaaggaaaaaaaaagcttcaatgtctttttacagtcctgcctttttctcagtcccggttgaagattccatgggaaatgagagcactattttgtttctcccttgtattgcagatagggggaggaggtggttattagagagaagctcttcctctcttggtttccccctctctccgcctgacagcaccgctctctcgcaggctcgctccttctcctaggtgatccatttctaggcaacgtggggctggtgctgaagctgccaggctcgctccttgcttcctgcatcccgccaggcgaaacgctccaaaagcatcctgcagcctgcggcggcttccctcctctggcccggccccgctgctcgcgcccggcgcaacccccccgccaccgcgccccagcaaaccggctccccgggcccgcctcgccaagctgcgttccgcgcctcacgcagaaagggaattttctctgcattactatctgcattaccttgaagttcactttttctacccctcttggagagggcttttttcccccctccctggtggaatctggctgctccgtttggaatctcctaatctttcctttccacttagattctggcagcgaagaccagtgattctctgcgggctgtaggggcgggggcgggggtcttttttggtccgagagggtgcggggaagggggcacatccggcgtgaggggggtgttggaagttgcagcggagctgggaccggagacccgcggcccccgcgcagcgatgggtctgatctgagccccagcctctccccctgcccaagagcagtagaggctggatatatttttcaaaagccaaactgcaaacaactctggcgatgccaaaattcccctccaagtgacacggctttgcgaaggaggtttcctcaggctgggctctttctgtcattcccttctgcctttctcggcgacgataaaaggctttgctctggcaataggaatttagaaaaaaagaaaaagctgcgctaaactccaccgtgacctcaaactctttggactgt

SEQ ID NO: 32420 - DNA, 2300 bp, Homo sapien
aagtattatcggagaagaaagagtaaaattgtcctactatatttggggacagaaaagaacatgttattgctgttgttatttaatacagttaatatctgttaaattagtcctgtagtatttatgttccccttttaaaaagtttcacacttatatgtcttaaatacacactacaaatgtaaatatccagcacggtgtcagcaaagagttaaaaataactgctgtatcagaggacagaaaaaaaaccttattaaaatattgttatacttttgtcacatctattatttaattagtactactatcagttactacttattgaccctgttaactcgtcctgttgtttatatagcattttgtaataaaaataaataatacagaataatatataattttaaataaatgactatttcatgtttttatgttaaagtaataaaacatatataattattattacacactatattttatgggttttgatctgatgcatttgtgttctgggttgtctatctaaaaagctggtcactttttaatgaatgttgttggcataattgacaggaagaaaataaaatcaaatcattttgtactctaaataataattttcaggggggaggagccaagatggccgaataggaacagctccggtctacagctcccagcgtgagcgacgcagaagacgggtgatttctgcatttccatctgaggtaccaggttcatcccactagggagtgccagacagtgggcgcaggccagtgggtgcacgcaccgtgcgcgagctgaagcagggcgaggcattgcctcacctgggaagcgcaaggggtcagggagttccctttcccagtcaaagaaaggggtgacggacgcacctggaaaatcgggtcactcccacccgaatattgcgcttttcagaccggcttaaaaaacggcgcaccacgagactatatcccacacctggctcagagggtcctacgcccacggaatctcgctgattgctagcacagcagtctgagatcaaactgcaaggcggcaactaggctgggggaggggcgcccgccattgcccaggcttgcttaggtaaacaaagcagcctggaagctcgaactgggtggagcccaccacagctcaaggaggcctgcctgcctctgtaggctccacgtcttggggcagggcacacacaaacaaaaagacagcagtaacctctgcagacttaagtgtccctgtctgacagctttgaagagagcagtggttctcccagcaagcagctggagatctgagaacgggcagactgcctcctcaagtgggtccctgacccctgacccccgagcagcctaactgggaggcaccccccagcaggggcacactgacacctcacacggcagggtattccaacagacctgcagctgagggtcctgtctgttagaaggaaaactaacaaccagaaaggacatctacaccgaaaacccatctgtacatcaccatcatcaaagaccaaaagtagataaaaccacaaagatggggaaaaaacagaacagaaaaactggaaactctaaaacgcagagcgcctctcctcctccaaaggaacgcagctcctcaccagcaacagaacaaagctggatggagaatgattttgacgagctgagagaagaaggcttcagacgatcaaattactctgagctacgggaggacattcaaaccaaaggcaaagaagttgaaaactttgaaaaaaatttagaagaatgtataactagaataaccaatacagagaagtgtttaaaggagctgatggacctgaaaaccaaggctcgagaactacgtgaagaatgcagaagcctcaggagccgatgcaatcaactggaagaaagggtatcagcaatggaagatgaaatgaatgaaatgaagcgagaagggaagtttagagaaaaaagaataaaaagaaatgagcaaagcctccaagaaatatgggagtatgtgaaaagaccaaatctacgtctgattggtgtacctgaaagtgatgtggagaatggaaccaagttggaaaacactctgcaggatattatcctggagaacttccccaatctagcaaggcaggccaacgttcagattcaggaaatacagagaacgccacaaagatactcctcgagaagagcaactccaagacacataattgtcagattcaccaaagttgaaatgaaggaaaaaatgttaagggcagccagagagaaaggtcgggttaccctcaaagggaagcccatcagactaacagcggatctcttggcagaaaccctacaagccagaagagagtgggg

SEQ ID NO: 32421 - DNA, 2300 bp, Homo sapien
aacacccacttcaatcaccaaacggagaattttctgcccaaaaaaaaaaaaatacattagatggccttttctttttctttgttctcatggatggttttcagattaggtttgttttttgttgttgcttttgtgtgtctttaacatttatttcagcagagcccaaacattcacacaagaataaagctctgaagtttctggcacgtaagatacgcccaagactattcctagacaccagcaaacagacgaggttgaagaagaaacaggtgaagaataatgtcttaaacatcattttagcaccctattctgccattctgtatctttataggatatgtccagtccagtcccagaaaatctactgcccaaggagttctagatgacaggttagatcaagccccggcaaatgtttgcgaaaacaacattcaactgcctctggacattgcaaagacatattccagggagctatctcttgggctcttttttaacatctctcctagaggatgagactcctttcgggattacagccactgggaaagtaaaagcaacagtagcatcaacaggttgcatcgcactcccgcgccccaggggcggtgcaggagagcgcccggagccagagccagggcgcgctgggcgcaagctggggcgcgcccagggccaatgagcttctgattggctctttgctgtgaatagactaggccgaggctaataggaccggagggggcgttcacctgggaattggcctcccccccttgccaaggacctccctgattgtatggggcggagtggggtgggggtgggggctggaaaggggaagcccaccctaactaaacggaggggcgggaggaggttaaactgaggaagccacgagcccgcagtaaagagagggcgatcgaggcaaaagggtaggtaacttgggacttctgtgccttgaaagtgttaaggattgcagggaatgcaggcgcctttcattttactttgggcaccctcccctggctgggcatttaatgaggagtcctactgtgtgtgttgaaactctgcataataccgtaaaatattctggccctaaattacactcaacggagagatttaggcagattacaatcctaattggccgcagggtgctggggaaaggggacagagagaattgggggatctggaatttggtgtgctatcactacaccgcagctctattttccattaagaaaaagatcatatgacgaagtcgaactaagagatctgaagtaaaaaatgaaaagatggagcaaaagtaagaaacatactctgagacgagtgggttttccccctttattccaacagcaatcttaaatgatggacgtcatgtagcagttatatatctatgaacatgcatgagagatttataaatacctgcatacataaatacaaacatcctattatacatgagaaatcgtaaatgcttgggcatcagaagtgggagctgtgatcctagcttgggggcagcacagggtaggcggccttctctctgctttgagtggcttctgggcgcctggcgggtccagaatcgcccagagccgcccgcggtcgtgcacatctgacccgagtcagcttgggcaccagccgagagccggctccgcaccgctcccgcaccccagccgccggggtggtgacacacaccggagtcgaattacagccctgcaattaacatatgaatctgacgaatttaaaagaaggaaaaaaaaaaaaaaacctgagcaggcttgggagtcctctgcacacaagaacttttctcggggtgtaaaaactctttgattggctgctcgcacgcgcctgcccgcgccctccattggctgagaagacacgcgaccggcgcgaggagggggttgggagaggagcggggggagactgagtggcgcgtgccgctttttaaaggggcgcagcgccttcagcaaccggagaagcatagttgcacgcgacctggtgtgtgatctccgagtgggtgggggagggtcgaggagggaaaaaaaaataagacgttgcagaagagacccggaaagggccttttttttggttgagctggtgtcccagtgctgcctccgatcctgagcctccgagcctttgcagtgcaatgtcccgcctgctgcatgcagaagagtgggctgaagtgaaggagttgggagaccaccatcgccagccccagccgcatcatctcccgcaaccgccgccgccgccgcagccacctgcaactttgcaggcgagagagcatcccgtctacccgcctgagctgtccctcctggacagcaccgacccacgcgcctggctggctc

SEQ ID NO: 32422 - DNA, 2300 bp, Homo sapien
attcaattatacatccttcctggactcctacatcccagagagagtgtctgtttgctgcatatccccagtacctggcacataagaggtgctcaatacaagctgttgaatgaatgaatgacaaaaaacaaaggctgctaagaagaatgtaaggctgatttgggaactaaggagataacctatccaaacaggtaaaggtgccacacattgaatttaatgtttagcaatccacggtgaagaaatttattattattattattattattatactttaagttttagggtacatgtgcacagcgtgcagatttgttacatatgtatacgtgtgccatgttggtgtgctgcacccattaactcatcatttagcattaggtatatctcctaatgctatccctcccccctccccccaccccacaactatccccggtgtgtgatgttccccttcctgtgtccatgtgttctcattgttcaattcccacctatgagtgagaacatgcagtgtttggttttctgtccttgcgatagtttgctgagaatgatggtttccaccttcatccatgtccctacaaaggacatgatctcatcattttttatggctgcatagcattccatggtgtatatgtgccacattttcttaatccaagaaatttgttaatctttgatgaaatgattcagcaatgttttataattaaaataccaataactgcatgattttataagtatggaccaaatagaggaccaaaatatcaatgtcaccttaaaatatgactatagagcaaaattcagtacaattgggtttaaatcatttaaattatggaagtataagcaccataaaataaataaattataagacaatcctacaataatacaattccaagaaaaaaggccattctacattataccaaaatatcatagttttttaaaaaataaattatcaatcaattaggtacatgactgatttaccatcttccaattatttggaataacagatataggttgtgaaatattttctagcgggttactaaattgttaataactatcatgttttgaattgttagtacattttaggtctctaaaacatgaaatgagtaaatttttaaaaaacagctttgagatataattcacataccatataatttacacatttaaggtatataattcagtattttttagtatattcacaaggttgtgcaactatcactacaatctaattgtagaacattttcttctcccctaaaagaaacctggtcactcttcattctcctccctctctcccctagccctaggcaccatcatctactttgtgtctttatagatttgcctgttctggacatttcatacaaatggaatcatataatatgttgcctttcgtgtctggcttcttttacttcacatgctgcttttttcccaaagtttttccatgctacagcatgcatcagtactttactattttttatccccaaataatatttaattggttataccacattttatttatttattcatcagttgttggactgaataaactttttttctactaagactttgctggagaatgaataaactttttaaagcatgtttgagtaaattaccctaatccttagctataaaagagtttactgtagaagcagactcatctacaatacaaaattaaaataaggccgggcatggtggctcatgcctgtaattccagcactttgggaggctgaggtgggcagatcacctgaggtcaggagatcgagaccagactggccaacatggcaaaaccccatctctactaaaaatacaaaaattagctgggtatggtggtgggtgcctgtaatcccagctactcaggaggctgagacgggagaatcgcttgaacccaggaggtggaggttgtagtgagctgagatcatgccactgcacaccagcctgggtgacagagtgagactctgtctcaaaaaagaaaaaataaataaaattaaatcagttaattaccaaaataccttttgatttgaatgggttcaaaagagcttgtgtaattaaaatttctggaagaatattttctgtacaagatctgggatactgtggcttctaaaatatgtcacttcatttcagagggttgatgtgaggatttaatataatgaatgagctgtttaatagtttaggttcagattaggagctaaggcggtcctatccttccagctattttaggctgtcccattattcctactattaattgcacagagccctccattcctttgattcccactccaggtctcacatctttactcctccataatctgccttctccactcaac

SEQ ID NO: 32423 - DNA, 2300 bp, Homo sapien
ttggaacaaagggagtatatcttagttttttgtttttttgagacagggtcttgctctgtcacccaggccagagtgcagtggtgcaaacatggctcactgcagcctcgacctcccaggctcaagtgatcctcctgcctcagcccccaaagtagctgggactacagacgtgtgccatcatgcctggataactttgtattttttttagagatggggtctcactatgttgccccagctctgccttggcctcccaaagtgctgggataacagacgtgagccactgctcctagcccaggagtatatattctttgtttttttgagatggagttgcccaggctggagtgcaatggcgtgatctcggctcactgcaagctccgcctccctggttcatgccattctcctgcctcagcctcccgagtaggtaggactacaggcgcccgccaccacgcccggctaattttttgtatttttagttgagacggggtttcaccgtgttggccaggatggtctcgatctcctgacctcatgatccgcccgcctccacctcccaaagtgctgggattacaggcgtgagccactgcgcccggccaggagtatatattcttaagctaacatttccatcaagataggtgaattatatgcaaaagaaaggaaatcagtgtatcgaaatgatatctgcattctcatgtttgttgcagcactattcacaacagccaagatttggaagcaacttaagtgtccattaacaggtgaatgaataagaaaaatgtggtgcatatacacagtggagtattatttcgccattaaaaaaaatgagatcctgtcatttgcaacatggatggaactggaggtcattatattaaaggaaataaggcaggcacagaaaaaaaacttggtatgttctcatttattatatttgtgggagctaaaaaattaaaacaattgaacgtatgagaaacggtagaacgatggctaccagaggctgggaagggtagtgtggggcgggggaggaccccggtggtcggtgagcatggttaatgggtacgaaaatacagtttgaatgaataagatctagtatttgatagcacaatagcatgactacagtcaacaacaatttattgtacttttttttttgagacaagagtcttgctttgttgcccagggtggagtgcagtggagtgatctcggctaactgcaacctccgcatcccaggttcaagctattctcctgcctcagcctcccgattagctgagattacaggcgcccgccactacgcccggctaattttttgtatatttagcagagacggagtttcaccatgttggctaggctggtctcaaactcctgaccttgtgattcacctgcctcagccccccaaagtgctgggattacaggcgtgagccaccactcccagcttattgtacatttttaaatgactaaaataactggattgtttgaaacacaaaggataaatgcttgttatggataccccacttaccctgatatgattattacacattgcatgcctgtatcaaaatatctcatgtaccctataaatatgtacacctactatgtacccgcaaacattaaaaattaaaatatttttaaaaaattaattaattaatcaaattccattctaagaacaatcaagccgaaagtgaggaattactttaaatgctttgaagctcagcatcccggggttcttatccgtcactaattacctatacatttgcaggtctcagtttctttgctttgtaaacataggcttcttgtaaggattgggattatacactgaaaaagcttagcacagtattattactattatgctatctacattatattataggtgaaacactacagattataatacatacaatatatactaattgtattatatattgttattttttgtcattatgctatttactattgttctatttaataactctctagataatttaacaggacaaaggtacagaacaatctggcccttacaagccggcggagacgggtacgaattaccatgacaacagcgcgcgcctcgacattgtcggctcgcgcgttgtttgggaagaaaaagcctaggctgcgtgttgcgtcatcattacgcgctcttaaggtttctccgtggtgttttggaaggtcccggcacggctaccgtcgccccacgctaggaaattttttttttattttcaacctttgttacatagcactgaggctacaagatcgtaagtactgagggaagaaagaacaagcgagcgattgaacgttaaaaagatgccttagcatgcactccacctctg

SEQ ID NO: 32424 - DNA, 2300 bp, Homo sapien
gctcctagcccaggagtatatattctttgtttttttgagatggagttgcccaggctggagtgcaatggcgtgatctcggctcactgcaagctccgcctccctggttcatgccattctcctgcctcagcctcccgagtaggtaggactacaggcgcccgccaccacgcccggctaattttttgtatttttagttgagacggggtttcaccgtgttggccaggatggtctcgatctcctgacctcatgatccgcccgcctccacctcccaaagtgctgggattacaggcgtgagccactgcgcccggccaggagtatatattcttaagctaacatttccatcaagataggtgaattatatgcaaaagaaaggaaatcagtgtatcgaaatgatatctgcattctcatgtttgttgcagcactattcacaacagccaagatttggaagcaacttaagtgtccattaacaggtgaatgaataagaaaaatgtggtgcatatacacagtggagtattatttcgccattaaaaaaaatgagatcctgtcatttgcaacatggatggaactggaggtcattatattaaaggaaataaggcaggcacagaaaaaaaacttggtatgttctcatttattatatttgtgggagctaaaaaattaaaacaattgaacgtatgagaaacggtagaacgatggctaccagaggctgggaagggtagtgtggggcgggggaggaccccggtggtcggtgagcatggttaatgggtacgaaaatacagtttgaatgaataagatctagtatttgatagcacaatagcatgactacagtcaacaacaatttattgtacttttttttttgagacaagagtcttgctttgttgcccagggtggagtgcagtggagtgatctcggctaactgcaacctccgcatcccaggttcaagctattctcctgcctcagcctcccgattagctgagattacaggcgcccgccactacgcccggctaattttttgtatatttagcagagacggagtttcaccatgttggctaggctggtctcaaactcctgaccttgtgattcacctgcctcagccccccaaagtgctgggattacaggcgtgagccaccactcccagcttattgtacatttttaaatgactaaaataactggattgtttgaaacacaaaggataaatgcttgttatggataccccacttaccctgatatgattattacacattgcatgcctgtatcaaaatatctcatgtaccctataaatatgtacacctactatgtacccgcaaacattaaaaattaaaatatttttaaaaaattaattaattaatcaaattccattctaagaacaatcaagccgaaagtgaggaattactttaaatgctttgaagctcagcatcccggggttcttatccgtcactaattacctatacatttgcaggtctcagtttctttgctttgtaaacataggcttcttgtaaggattgggattatacactgaaaaagcttagcacagtattattactattatgctatctacattatattataggtgaaacactacagattataatacatacaatatatactaattgtattatatattgttattttttgtcattatgctatttactattgttctatttaataactctctagataatttaacaggacaaaggtacagaacaatctggcccttacaagccggcggagacgggtacgaattaccatgacaacagcgcgcgcctcgacattgtcggctcgcgcgttgtttgggaagaaaaagcctaggctgcgtgttgcgtcatcattacgcgctcttaaggtttctccgtggtgttttggaaggtcccggcacggctaccgtcgccccacgctaggaaattttttttttattttcaacctttgttacatagcactgaggctacaagatcgtaagtactgagggaagaaagaacaagcgagcgattgaacgttaaaaagatgccttagcatgcactccacctctgaaccttcctgtgtgttcttaatcctatcagcttcctctcagctgggatcgcgccgcgtcaacttccgggcggatgcccgccagcacggcctccgccgctccccttctttggcccctttgtgtccccgcagtgtcgaggcgcgggccctggcaggtcctttctcgaggcagggggcacggtagcacagggagcttctctttgtgggcgggcgcgaggcccgctagggggttatactggggaacgtgcctgcgcgtgcttgggtaagaggaggttgcatga

SEQ ID NO: 32425 - DNA, 2300 bp, Homo sapien
agacggggtttcaccgtgttggccaggatggtctcgatctcctgacctcatgatccgcccgcctccacctcccaaagtgctgggattacaggcgtgagccactgcgcccggccaggagtatatattcttaagctaacatttccatcaagataggtgaattatatgcaaaagaaaggaaatcagtgtatcgaaatgatatctgcattctcatgtttgttgcagcactattcacaacagccaagatttggaagcaacttaagtgtccattaacaggtgaatgaataagaaaaatgtggtgcatatacacagtggagtattatttcgccattaaaaaaaatgagatcctgtcatttgcaacatggatggaactggaggtcattatattaaaggaaataaggcaggcacagaaaaaaaacttggtatgttctcatttattatatttgtgggagctaaaaaattaaaacaattgaacgtatgagaaacggtagaacgatggctaccagaggctgggaagggtagtgtggggcgggggaggaccccggtggtcggtgagcatggttaatgggtacgaaaatacagtttgaatgaataagatctagtatttgatagcacaatagcatgactacagtcaacaacaatttattgtacttttttttttgagacaagagtcttgctttgttgcccagggtggagtgcagtggagtgatctcggctaactgcaacctccgcatcccaggttcaagctattctcctgcctcagcctcccgattagctgagattacaggcgcccgccactacgcccggctaattttttgtatatttagcagagacggagtttcaccatgttggctaggctggtctcaaactcctgaccttgtgattcacctgcctcagccccccaaagtgctgggattacaggcgtgagccaccactcccagcttattgtacatttttaaatgactaaaataactggattgtttgaaacacaaaggataaatgcttgttatggataccccacttaccctgatatgattattacacattgcatgcctgtatcaaaatatctcatgtaccctataaatatgtacacctactatgtacccgcaaacattaaaaattaaaatatttttaaaaaattaattaattaatcaaattccattctaagaacaatcaagccgaaagtgaggaattactttaaatgctttgaagctcagcatcccggggttcttatccgtcactaattacctatacatttgcaggtctcagtttctttgctttgtaaacataggcttcttgtaaggattgggattatacactgaaaaagcttagcacagtattattactattatgctatctacattatattataggtgaaacactacagattataatacatacaatatatactaattgtattatatattgttattttttgtcattatgctatttactattgttctatttaataactctctagataatttaacaggacaaaggtacagaacaatctggcccttacaagccggcggagacgggtacgaattaccatgacaacagcgcgcgcctcgacattgtcggctcgcgcgttgtttgggaagaaaaagcctaggctgcgtgttgcgtcatcattacgcgctcttaaggtttctccgtggtgttttggaaggtcccggcacggctaccgtcgccccacgctaggaaattttttttttattttcaacctttgttacatagcactgaggctacaagatcgtaagtactgagggaagaaagaacaagcgagcgattgaacgttaaaaagatgccttagcatgcactccacctctgaaccttcctgtgtgttcttaatcctatcagcttcctctcagctgggatcgcgccgcgtcaacttccgggcggatgcccgccagcacggcctccgccgctccccttctttggcccctttgtgtccccgcagtgtcgaggcgcgggccctggcaggtcctttctcgaggcagggggcacggtagcacagggagcttctctttgtgggcgggcgcgaggcccgctagggggttatactggggaacgtgcctgcgcgtgcttgggtaagaggaggttgcatgagggtcagctcgtggtttcagtaaggaggggcgggcgggggaggcggacgaaggggagtgaaaagcaatggaaaattttaaaagatacccccgtccaccttctaattgttgcggcctaacaatgaagcgcagccataacagtcctgagccactggcatgtttgcgggccctttattgccttgggaataaactgct

SEQ ID NO: 32426 - DNA, 2300 bp, Homo sapien
ttaaaaatgttattctaatgataacttgcagaggatctgccatcattattacatttaagtagaagggtggcaaacaaaaagataccaaggataaacatgtgtgttaccaatctttcaggctacattaagttaaaagctgtttacgaaacagagttttgcataaaaaaagatattactgaaataaatattaaaatataacttccaacattcctttcacctttcctaagaaactaactaattagtttatgctcaggaatcatactgccaggacttgagttcaggctctaccaagttcctaataacctctctgaatctcatttcacattaacctctatgtcagtaatatctaccttgtaggattattgtgcaaattaaatgacagaaggtgaagcacttatcactattcctataatacaacaagagctcaaatatattcctctaatagttaactgttcaatgaacatagattcgagtggaaatcttaatttttggcttatcctcaaatacttttgtctctgacaatctgctgatgaggttaaaaatgttcattcaccatgaagaataccaattactcatttgcattctgaggacatccaggaagtcaggtggatgcaagaacttgatgtgatctgatcttcccttgtgtacagaggttgtctttaggcaccttgctcaatgtctagctcacagtagatgatcaatattttgagggaatactggaatgaatgaaaatgtctgcccaaatagcctcaaagtttatcataggactgaatcactgacatcgctcttccaatagcaaccgttctgacctatggatgccctaaattctaatttcaacttccaccatggggccatattcgaagaactcatataaaagtgaggcgacaatggatggatgctcagttgagggtacatggtgcttatggcagtcccaaagctgtatttaaaagggcacaccgcaggacaatgcatcaatatatatgacatcaagaataaaaatgagaatcccttctgcctttcatcttttaaaaactgtccttgatgttacatcaattttaacattgtaactcacctgttttttcagttatatctgaatcaggagtgtttgccctgctaacttccccttcagcattctcctcttcagcactaagagaaattggtgaagaagggccaggctgggaaggttgaggggttgcttcgggcgcttcctcaatcttattccttttctcaaagcgaaaacggtccaggttgaaaagattcatattggtagaaagcaccaccttgcagggatgggggctttaaatgaactatctgcaggggaaaaataaagagaggaaaaaaggccatgaaaacaatatacgatacaatgccacagcagtttattcccaaggcaataaagggcccgcaaacatgccagtggctcaggactgttatggctgcgcttcattgttaggccgcaacaattagaaggtggacgggggtatcttttaaaattttccattgcttttcactccccttcgtccgcctcccccgcccgcccctccttactgaaaccacgagctgaccctcatgcaacctcctcttacccaagcacgcgcaggcacgttccccagtataaccccctagcgggcctcgcgcccgcccacaaagagaagctccctgtgctaccgtgccccctgcctcgagaaaggacctgccagggcccgcgcctcgacactgcggggacacaaaggggccaaagaaggggagcggcggaggccgtgctggcgggcatccgcccggaagttgacgcggcgcgatcccagctgagaggaagctgataggattaagaacacacaggaaggttcagaggtggagtgcatgctaaggcatctttttaacgttcaatcgctcgcttgttctttcttccctcagtacttacgatcttgtagcctcagtgctatgtaacaaaggttgaaaataaaaaaaaaatttcctagcgtggggcgacggtagccgtgccgggaccttccaaaacaccacggagaaaccttaagagcgcgtaatgatgacgcaacacgcagcctaggctttttcttcccaaacaacgcgcgagccgacaatgtcgaggcgcgcgctgttgtcatggtaattcgtacccgtctccgccggcttgtaagggccagattgttctgtacctttgtcctgttaaattatctagagagttattaaatagaacaatagtaaatagcataatgacaaaaaataacaatatataatacaattagtatatattgtatgtattataatctgtagtgttt

SEQ ID NO: 32427 - DNA, 2300 bp, Homo sapien
gtagcacaggctgtggcttaggtactgaggttacatgaggaaacagtggatacaacctctgccgtcataagagtttacaatcattaaatttatttaacttcagctgagctttttcttattccattgtacttcagattatttcaattaaaaaaatgttaaatggcaaattacaaggaaataaaaaattaggattttctggttttttaattaaacttccatgctgcatcatggaacggacagaacagtcttatcagacatcttcatttttagtgtagtgcactttgaggtagtatatagaatgacaggtttgtctaaccttgaagataaggttaatcttcagtatactatgttattgagacaggaaactatacttgccattttaggacagttttcaacaaaagacctttttaaatacctgtaagtgatctttaacagatccagaaattgtgacagttcccattgtttcttttaaccacaaattgcagtcttaacagacagtatcatcctgcgtattaaacactagggatgtttttatgctgtttgttttgaaagtttgtttttgaatatgaaattacagaaacaaaaaaatgtatatccaaagtttttactctacttcagaagataagagtacgaatttattgatgttgtccggagtctctctagctgccctgttgtgtttttttttttttttaattttttattttgagacagggcctcactctgtcacctaggctggagtgcagtggtgcggtctcagctcactacgacctctgcctcccaggctcaagtgatcctcacgcctcagccttccaagtagctgggactacaggcatgcaccaccacgcctagctaatttttgtagtttgagtagagatggggtttcaccatattgccaaggctgatctcgaactcctgagccccagagatctgcccacctcagcctcccaaagtgctgggattacaggcatgagctgtgcacctggcttctgttctgttctttttaggaaagaattcagcatgtctaggtgatgtggcaagattatctggtttgaaggtttttttcagacttaaaatattacatttagaatattgtggttagtgtttgtagtgacacaaatactctgctttaaaatgttaataacattccatttttattttgtaatagccatgttaatgaaatttttaagctgacatgtatgtatgtatttgagctgcatagttagggctctgatataattaatgctgaaatcttaaacctttgtagtctttagcaggtgctttcatagtagcacagcaatatgtctgacaaacttgttctctgaaagcaaaagtatttaagaagtaggtaaatatatacataatgtatacaagcatacataagtagcatatgtagctctagtttgttttcttccagtcacgacaatatgcagatttcctgttactgctgtactctatgttatattctcttgtttttacattaaaagcatttgttgcttaagctctctgtatctctatcctcctcatttgtgaaataaaaatgttacctactttgtaggtttgtgtgtgaaaagtaaatgaaacaatagtttataaaagaccttgtgcaaggcctggtacatagtagactcagaaattgctggtttctgtgatggtattcagataacttacacttggtgggggtcagctttatttcactgctcaacactcagccacttggaagaatccctccctcctaatgttgctctgtagaattactcatcaatttagagatgtatatttttagattaaataatgtgatggtttatgaatatagtattacagtgatttctacttctgaaagactgcaaagaatgtttactttttttttcaattcagtcatatgtagaacaacaaacactgggcctgatatcaagagaactgtctagtattcattataatacatttttgcctttgttttacattaaattgattttttgctatttctgtgcaaagtttgagtgtgctgctctgctttaaaaggtggtgggcccaggaaaagaaaattatcttcttcttcagagccatatgaggaagatgaatttaatgatgatcaatctataaaaaagacaagactggatcatgtaagtttacatttgaattacagtatcaaaattggctgcttaaggttaggatatgtggagtttgtggatattattagacctgaaaatccacctaaatgaattcctttctatcacaactaagggaatttacgtctacatttaatttgtgactgtttttgctttttaatttatccagtatga

SEQ ID NO: 32428 - DNA, 2300 bp, Homo sapien
aacattcatagtagatatgaagattacaatgtaattgtgaccacgtaagtattgagaaatttggggaggatggatatttatgcagcccccaaatttaaaaaagaaattgtagtagtactatgtaggaaagtttatgctgttaactgtgatacgaaagtaatagaatgactaatgttgaggattcaggcattttttagtttggtgtgtaatacccatataggaggtttttgttagtgaatcacctcattaatggtgactataaaaaggttttgcctagttattgaaaaaagtcgtcttgtaatagtaatttctcagttaagcttaaagtaaaatttgagatatcccaccaaaattatttatatttttaacttacaaataagtatctgtaataaatacaatgaaatttcattttctcaatgaaaaatttgagttagggcagaaataaaaatgaaaaataatactaataatactacttggtaataattgatgtaaatatcttgcacagaacttaatgctcttgtgttacattagttgatttatttaaagttctattttaactgtagttattatttctctctactggcttcttgtgtaggagtctgtcctttaaaaattcatgcggaattttattttttcttaataaaacaggctccatatgcagtctcaagctgctagctattaactattatttcttggatctaatctgctagtttaataaaatattaagttttaaagagaaacatgttttagcttcacgttcttttttgtgcttattaaaatataacacttcatggagcagattacttacaagttatacccaaattgacctcctcctgggtatgtagaagttgtccgattgtaacattaacattttcttttttttttttttttttgagacggagtctcactctgtcccccaggctagagtgcagtggcgcgatctcagcttactgcaacctcttgcctcccgggttcacgccattctcctgcctcagcctcctgaatagctgggactacaggcgcccaccaccacacccggctaattttttatatttttagtagagacagggtttcaccgtgttagccaggatggtctcgatcttctgacctcgtgatccgcccgcctcggcctccaaaagtgctgggattacaggtgtgagccaccgctcccagccttttaacattttctttcaattatgtattgcagctttcatagcttggttacagtgtacatcaataattattaaatacaagtacgtcagtatttatttgagtatcacccgtgtctagtgctgtgctttaagtactggctgttagaaatgtgtaaataaaaaatgattttataagacattaaatttcactagactccaagctcttaaaggtataaccttagagatgttttttcttttggtgacagatataactgtgcgatcagcagttctgatgaccgtagtctgtttcgacggctgaaacttaattacgcaatttttgatgagggccatatgctgaagaatatgggctccattcgctaccagcaccttatgacaattaatgtaagagaatgtttgtaaagttttccaaattactgtaaaatttagattacgtaatttaatatatgtagtatttattagcagaatctgtattatgtagtttaatatatgtagtattctgtgttagcaagttttttctgtaaaagggaagatagtaaatatttcacactttatggactagatggcctctgtcacgtattctttgattttgttttttaacaaccctttaaaaaattattaggtcataagccataatttacctgttctatatgttaaactatttataaataatctttcatcatctcataaaggtgatacgaggacacaagttacctacttataaaagaagaccaatggttttcgtattcattgctgttgataatagcggacgtcaattatttaaattactatatcatttatcacagaatgttaaattattaataatggttttaatttatctctcctcccttcacctttcactggggaggatagacatgaaaggagtggctctttaagaaaaagctaatataaattttaccttcattcacaggcaaataaccgtttgctgctcacaggcacacctgtacagaacaatctgttagaactcatgtcgctgttgaattttgttatgccacacatgtttagtagtagcaccagtgaaatacgaagaatgttttcctctaagacagtaagcataaatgcatattttctcccaaatatgttatttgtgttttatctgggccattcttc

SEQ ID NO: 32429 - DNA, 2300 bp, Homo sapien
gctgatttttgtatttttagtagagatggagtttcaccatgttgaccaggatggtctccatctcctgaccttgtgatccacctgcctcggcctcccaaagtgctgggattacaggagtgagccaccgcgcccagccttatttactgctatatctctagcgttcagaacaatacctggcaaagattaggaacaaataaatatttattgtagaatcaatctccatctaaaggtgaaggagctcaggcacagagagattaagttacctgcccaaaggcccacagctggtagaagactaggagagttagagcacccccacctgggctgggagaagagacaagaggatgggaaagctgtgcttcccgagtagaggagatctgggaccctctcctgggaccctcttgtgcctccagggaggtagaaagaccacagagaagaagtggctctgttgggtactgggcaggtggaatctcaggcagcgttgtgatgaaaccaccacactggggcaagaaggtagcaaaatgagaatgctacaggagctgcagagagctcctggcgtggaggccatgcacacaaggacaatggatgcctctagagcagcctctgttgatcggtgaccaaggatcaagtggctgctccttccccaatccttgatgtgttactctgctttcctccagccaaaacaactggtcgtaaaagataaaattgtaatacaaaatgagaaaagtgttattttttgtatacttgatttttttttaactgaagcagtctcgtattatatataggcagcattatgtaaggaaaaatattaaatgtgtcatcagaaggcctagattttaatcctagcttgtcccaacaaaaattcgcaggcaatttacctaatttccctatgtctcagtttcctcatttataaaaatagggattaaaaatcattgaggtgaggataaaaagatttttttgaaaatataagttaaagctgtcaaagataataaatgcattgtgttaattttgtatagctcccactcccatcccatttgcacttgattttgacacacatgtatccttttttggtgggtaaagggctacacttgcgtcttctctttttacatactagtatttacatttattttcatttctgacgtttatactaagtggatgtaaacatatttttcaaaattaaaagcactttagaaataagaaatattaaatgattgatatgttgctattgttgcctgtgggagtaattttctggaagttgaaagccagctggtcattgaaatgtttcatggataatcctcaggctcagtaaggcccaggcaggcattttattggatcttttcactgagctgtcctaatattatagataaaaataattcctgcactaagaagtgaaacaataaatttctaaaatgtcaggcatttgttactaaattgtaaaaggatcacaaacaagatgaattggaaacttctacaccaggtttactttaaacactttggcttttctgagaaatgagagtaaatgaaataaaccagcaacaatgcaaatttacagtccttgcaaaaacgtgaactataaattagggttattctatcatcagatgtatattagtggtcatgacatgcctggcactcctcttagaactgaggagacaatagtgaaaaagacagtgaagtgcctgcctttacagagcttacattccactgggagaaaccaaaaacaaacaagttaaatacaccacattgttagacactgcctcgaaggaacatacagcaggtacaggagagactgtttctaaaatagagaagcaagtcatgtgcacatctgcaaagatgatttcattacattcaggttttcttattctccaggagcctatggtgtaaaactgaaaataagtgaacatgtaacagtgggcatacatatgcagctataactttgactttaccttgtatacaaatgtgttggtttatttatacccagatatcctgtataaccagcagtcttcgcaggcttgaactgcctggcatgcatgttttatctaagaaaagaaggaagagcgttaggtagaaggaagttgcctgtcctctcactggctcgtgattatcacttactcgtcatataaacccaaggcacagtcacatacccagggatacaagacactgcagactcccgagagacataacacaggtaagtcatattactgaactccacataggtaataaatgagatatgctttactctttacttcagagtttttattattctcatatcctgtttgtgactaactgtcttgtgagctattttc

SEQ ID NO: 32430 - DNA, 2300 bp, Homo sapien
ttatttttttagaaacagggtcttcctttgtcacccaggctggagtgcaaagacaagatcatagttcactgcagcctcgaacttctgggctcagcaatacaaatagctgggacctgggactacaggcacactacacgacgcccagctaattttttggatttttttagagatgggtcttgctatgttgcctaggttaacctcaaactcctgccctcaagccatcttctcacctcagcctcccaagtgctaggattataggtgtcagccactgcaccctgctcacgtaagtaattttaaattatctagtggccacattttttttaaaaagtgaaattaattttaatcaaatattattattattactcttttttttttggtgcggagtcttgctctgtcgcccaggctggagggcagtggcatggtctcggctcactgcaacctctacctcccgggttcaagtgattctcctgcctcagcctcccaagtagctgggataacaggcatgcgccaccacacccggctaatttttgtatttttagtagagacggggtttcgccatgttggccaggctgatcttgaactactgacctcaggtgacccacccgcttcagcctcccaaagtgctgggattataggcgtgagccgtcgcgcccggccataatcatgtatcatttaacaaaacataaaatatgatgatttcagcatataatcaatataaaaattattgaggcattttacattattttttcataccaagtcgtcgaaatccagtgtgcattttacacttccaacgcatttcaatttgggcattatattttcaactttagtccttaaatgtagtgcttaaaagaaatgttaacgacctggcgcggtggctcatgcccgtaatcccagcactttgcggggccgaggcgggttggtcacctgaggtcaggagttcgagatcaggctggccaacatggtgaaaccccatctctactaaaaatacaaaaaattagccgggcgtggtggcgcacgcctgtaatcccagctactcaggaggctgaggcaggggaatcgcttgaacccgggaggtggaggttgcagtgagccgagattgcaccactgatcccagcctgggagacagagcaagaatccgtctcaaagaaaaaaaaagtaaagaaatgttatcctgcttcagttttaaatgttaaattatttaaaattacgtaaaacaaaaaattcatggtctcagttacagtagccacatttcaactgttcgatagccacatgtggccagtggctaccgttagggaaagagcagctttggatcttcgcctttggaattttgcttgcacttctgggggccggggagctcacggacctcatgaagttcatccttgctttatatgctccttggttaagaattgtccttttcacgttttataagccaattcacagtgtaacagtctagttactttccgtatgttcagtgaacattattcacgttttcttatgaataaattcctcgggcgtatcaagcaaccctatagaaggctggaaagtggactattgatttggatttagaaaaataaactgaagatacagtggttgaatcacttttggccgcttttatgtatcactgtcttctggtgtgatggacagggttaacttctgttagggttactggttttcaccttcctgacaggtaaacttctgggtctgcacttttcagagcatgtaaagctctttcaaaaaaaaaaacgcaggcagtaaccgctgaacttgcatagatagagatttatccaaagtacccttctatttttaggcagagcaactgcttgccaatttaaatttctggagagaaaaatgcacccactacaaaacggacgagcggagggttagacctttgccaggtagcgctcaaaatccgctaagactactcccaccgaaactcggtagcgcagttgtctttccgcagctgcttcagccagccccagcaagcccgagcgcccggcgccgccgccaccttccccgcccctgcgcggcgcggctgggactggcccagaggcgtggccgggagcggaggggcgtgtcctgggtcgggggtggggcgagggagagccaggaggcggaagttcccgcgggcggtggggacggcgccctcaccgcgagtcacttgtcagcccttgtctgaggcggaggcagccccgcgccgcgccggacccgaggtgagtggcggccggccggcgatgcgcctctcggatctccggtgggagaagggaaagaaccggccgctgtgcgccgaacgcgagaaggga

SEQ ID NO: 32431 - DNA, 2300 bp, Homo sapien
aaatccataactctacagaaattccaaccttttcgacgtgtttgaaagagtatgctgctatttcctgcctgcttggtatttgaggaagggcttgggcactaataaccagatggaggagtcttggaaaggccaataaaaatattgccattgcttggggcagagactgttttaaggcagatgaattccaaatgaagctagcagaagaagcatctagaaatgaacggacagtgactagaaatgaaatgacactggttttgtagtgtggctgtgaccttgccagtgctaggaattttaataacaaatgagagaagttaggaagggaatccccaagtaaagggaagttgcaagtacatgggttgataatctaaatgaaatacattttcttgtagggaagaatggggccagaggaagttgagcccaactttcatattattccccagacacaagttaaagattaataaaggagggcaggctgcctgtgaaatatcagttggctttacacgattctgatttgtatcgtgtcaatatcaggacagtccttctattagttttctgaaaatctcctccttttatagcgggaaagcaattgaattatgtgtggctcgttattagcttcccactagtagtttttcacctatatatacagtttgacttccggcttggcctttggatcttttttagtgctctgtgcctattacttcattactgaagtaatgtgttattgccttgtagttcagtatactaccacgccagtagaaaagctgtttcggtttctgatacaattttctgtaatttttattttccctgatataatttttctttaaaaaccaggcttatttgaatgttttgccccattttccctttatgagaagaaggaatgtttgctttaaatatacctatggctcaaatatctatatctgcaactatgaatttggggtgatgggctagaaattttgaatgggttaaaacatattttaagacaggtaatattaggtggtgatttggttgaatagcttacattttccaaggaagtatgtttttaatataaaattacatatctgttatgtttttaatattttttaaagagagagaattattgtttcttagtattccattaaaacaaaagaaaacttcattcctctgtctcctgccgttataacaaccaataggaaactcgaagtttttttttttttttttgctttttaaaaattatatgaaagtactactaggagagtcatcacacgcacacttaacagcagaacagacaaaagaaagcaccgaagcactggttcttttctaaactgccaattccatttgaatgcattaacccagcacttttgctgtatttagtcataatcttattcactgagtggcaaatgcttactctctgcctggtgaggtgtgtgtataaaacaaaaagcaggttgtgactaacatcactgtactagagtattgcctatcgttgactatctgaaggaaaagtagatatcactttaagtgtggaaaataccatgtccccataggaggaaatacaagttgtagttcatgattggagagaatagttttgtgcattgaaaaacagcttctcattgtaaagaatttagtatttggaaagcatgaatgggagcctactgatttgcagtctctttcacatgttagagtaacttagaatttaagtaagtgcagttgaaagactcttgtcaattgcagacaaaagaatacatgaagtggagggaaggagaaaattattctgaattcaacctgaaataaaatcttgctacattagtgaagtattgtaaagtactttgagttaaactttgcatgcaagaagccacaaaattggattgaagcaagttgtgaaacatactaagtgtctagaaatgtattctgatatggaatttttagaccatggaaattgccatgagtgtagaaaatttatattagctcacagattgcttttcttaaactgaaattaatgaagaacttaattaagacttatcttctatatcctctcacccccctcaaacaaaatactaaacataatttatgttctagggtttcaagtaaacatttttgctaatcatctgattttctttcacagcatatttcattttctgtcattggactttgagccattagaaccatgagcaactacagtgtgtcactggttggcccagctccttggggtttccggctgcagggcggtaaggatttcaacatgcctctgacaatctctagtgtaagtaaactttacaaattttattatagatgttcattcagtgcttagtcctcgggctgag

SEQ ID NO: 32432 - DNA, 2300 bp, Homo sapien
actgcaagctccgcctcccggttcacgctgttctcctgcttcagcctcccgagtagctgggactacaggcgcccgccaccacacctggctaatttttttgtatttttagtagagacggggtttcaccgtgttagccaggatgatctcgatctcctgacctcgtgatctgcccaccttggcctcccaactgtatttgttttaagggcattttagtagtgtcacaaaagagccaataaaatgtagactcttaatttttcacaggcagattatttgctttgcaagttttattacttttatattagtaatgaagtactgtgttgataaaaatatattttttatctacctgattgaagttggaagagaaaatctatcaagtagaagtaattacttaccattggaccttagtaagttttcagagaatgcaattctagtacagattgatttttttttttttcattcctaaagatagtatagttcatgactgttaaaaaatatagagttttggtagaaaataatgggaaagaagggaattatacttgtcagtctcttcccttgcataaaaatgcagggtgcatccttttcacttgttcttttaggattttttaaaaaaataattactagtagctccatttatagtatgtagaagcagggctgaaagaggtttttagcactctttatcatttattagcaaatgaactgaagtgctgactagcagagttacaaatagtgcttaaaatgttattctagtccaataatattaaatctgacccttcaccaaacttcagtatcagtgctgtgtggtatgaatttcatttgaatgggtggtatggaagttcagatggatcacctaaacagttgtaaacagtgtaaaagttttgggtagaggagataagaagaatttaaaggtagtgtcctgcaaccacagaaggaataatacgtttcactttcatttcttatatcagtatctgaacatattataattagggctttgcattgtgcagaatgattacgaggtttagagaccaaaagaggcatggtcatgtagaattacgtactagaacgtttggtataataaacaccttaacatgatctaaactagaggctgtcaaatgatggcttacaggccaagtcctgcccaccgcttgtttttactaaagttttgttggaacacaaccatggtcacttatttaggttttgtctgtgtctttctacagtgacagagctgaatagttgagatcatttgacacacaaagactaaaatatttactgtctggccctgtataataaaatttgccatttcttaacagtgggacatatagaatagattgtttatagaaaccctttattgaaatggtattttcactgtaatgaaattttttccatagtaataatgaattactcttaaatttgaaatttcttttattcttgaatacatctaaaattatgtaatctcttcattctttctgatataaaaattttataaatactatttagaaaaatggattttttttctttaaaagattctgaagttatttttgagtgtggacatgaggcacaatgggcaaataatttttttccctcataaaactgttactatggaaataaatgtagaattacagcaataagttttctccctctggaatcaaatagaatattgtgaaattttgcacataatttgaaaacagttttaagaaagatgtatgcaaataaattataggatatataaaacacttattcttaaaaatatgtcatatactaatattttaaaataaatgtacctaaggagataacaagttaagtgttatatctttgttggaatactttagaagattgaggctttgaccaaatgaatttacatggaatatcaccagatgatgaagtcaatttggggtgtgcccacagtaatttttgttttggacttcttttttttggcacgttgagtgaaatgacatctttgttgattcttattcttccatgacacgattctatataattttggattgtggttacctttagagatgacctgtacctatatggaataagtgcccttcccacaaaatggccccctccacagtgaggagttagaagagagggtgatactggaaagccattttgcttgggttgacactgattttagaaattcaaacaatttgtgctgaagagcaaggtctttggagaacatttgggatgataactagtctcccactccaaactggatgaatgacttgataaagtcattttaccccttcgtttgtttgtttgttcgtttgtttgtttgtttgtttagacagagtcttgct

SEQ ID NO: 32433 - DNA, 2300 bp, Homo sapien
tattaaattatatatattatattattgcttctaaaatgcaccaaagtataggtttgttttaatttttaaatgcttcctccttcccccagaacttttgcagataataccataaaaccttggtaagttaatgtttcctgacaccctttgagaagaagcagaaagttttgtagcaagcatttatgaaatgcttactttattcactgtacatataatgtataaataacatagtgatcattctttaagtttattgattggcatttgtaaagaacacacgtctaaatatgcatccgtttagatgatttgtgagtctgttcttaagtatctcttgttactttgagggaaagctcaagacaaaaatgaagtatgtgtgcctactttggattagctctacagggatttactggtacagatattagaataaacatttatgtatttattgtcatcttctttttttacatccaattacctttctgtaacaggaagtcatcagtgcgttgaaacaaacttggcatgtttcctgttttgtgtgtgtagcctgtggaaagcccattcggaacaatgtttttcacttggaggatggtgaaccctactgtgagactggtaagatcagggagccatttgtttcttgaattttgaataaaggtaaaacattaacccttatattactataaagctcaagaaaatattaggcaaagttattttcttaattgttttggaagcatttaatgctgctctaagcatgtagaaaaaactatgtagatttttttttttcttttgagacggagtctcacccttgttgcccagactgcagtgcaatggcccaatctcggctcactgcagcctctgcctcccaggttcaggcgattctcctgcctcagcctcccgaatagctgggaatacaggcatgtgccaccatgctcggctcattttgtatttttagtagagacagggtttcgtcatgttggcccggctggtctcgaactcccgacgtcaggtgatccacctcccaaagtgccgggattacaggcatgagccactgcgcctggccctatatagactttttaatgtgactttgtcaaaacagatattcccaactttattattagaattgagaatgtaagcattacttagtaggaaaaatattttgcttgaattcccaatgatttgtggatataaattctactaaatcatgtaccttaagtccacttcttgtagtccagtagtgaattttgtaaacatcagaaatgttccactttagaatatgatattgatttgccctttaaggcgactgccttgaaaataaactggagatcgtttgttacttttactgaatgagaaggtaatcctgacttggattgttcccttggtaaaatgatttttaataaactagactaaaaggacctatctactgcatttgtcttattacacaaactcagaacgtttccttttccttcccaaagtctgtaagtgaacttttataacatttattaatagtgcccttacttagatattactaccacatatacatgtttcaaaatacaaaacatttttcctttattgtgcctctattcactaccagtgcattctcactactgagttttattgttattctaccttgaaattcaaagctctgtgctgatagaaggaggtattccaaaataatggagttaaaggagcagtcagcttctaagttgaagctgtgtcatcatcattcagcccttctttgcccactcagtattctcttattttcatcttcctttcagctccttagtttaaaccaacctggatatattccagactgtctcccaggaaccccagaaattccagtgaagtaccccatgggctgttttgggacaggttggccacaagctgccttcctcaattcaaccagaatacttcatattttgtaattccacttaatttttctgaagaaagggctgggttttgtttgtttgtttgtttgtttggtttttagtttgatttgtttgttttagcagctttggaagacattttgactaactggcaggtagcccatatctagccaaaacacataaaacagtctagccttaatacctatatttaatgtatttgaagtcatattttaaatactaaataattacttataggaaaggaaaaacattattgaatatttatttaaatgtcacatctaatcaacttggtctgtttttgttctttttcttcttttaacctccaaaccatttcttaacccagtttcctctatctcaataaataaccccatcgtccactatccaaaaacctgcaggccatgttggattctg

SEQ ID NO: 32434 - DNA, 2300 bp, Homo sapien
gaaaggatagattcaatcaggtttctttcctctttaaacttgcttaatgttgatgagatattgacaatgatcaacacattacatttttagttctatggatttccagtaaattctctaagcttttctatgtatacaatcataagctctgtaatgaattataatttggtatcttattttcaatatttaaaactcatatttctaaactcacatttcattttcgataatttattatttttagttaattacataatagctcataattccttgctttgtcttttattttaatggtgtagaagttataatttccgtgtcttcaagcccccttctccccacaaaacacttagttaatatgaggatggagatgatgaaaaattggattgaggaccaggtagaaggtaatttaggtagtcatatgctttattgttttgaaagaaaggaggtggaaaagggaaggggtgggagtgagggtatcagagaagaattgggatgagagtaaaatgaatggattttatcttggaattcttggggcaagaggatgagtactggtactggggactggaacagtggttgaataaggaaggtcagatgatgtcaatgactaatttcacttgttttggaaattttctttcagatacctttcttcttccagtttggcattagaaatcacaatgcagatatatcatggggcaaaaagacctttgtggagactctaacattgcttttatagaaaaaacatgaccacatcttcatacactcaataaacactgggggcaccgcctgctttaagtgcaagctgcataaaataaattgatacacaaatgaattttttattgataagtgcaaaaagattacatttaatgtttaaaaaagatttaatagaaacaatttaagaaaagggagtagttgaaagaaaatagtaggctaagaattgaatatagaaatagatatgaagaaaattggaagaaagttacttcagggtgaaaaactgttaaaaaaaaaaatgacttagatcacacacttggtggtgaccagagactgtttgtcaatattttggaggaaaaaaattttacagaaggagaaaataagtaatgctggagagtgggaagctgaaaggtattgaaaggaaaagagtatttggaagtcacgagatatctccctgggaaatagagttggcaaaatggctgattttaaagaggttaactattctccccaaatttctgactgtgaactagcttactttatatttacccacttagaaagtgtttcaacacttaaagacttagcaaggagaccacaaagtataagacgttacatacttttccaaaagaaacacgactaactgtaaactgtcatcaaatacaaatggaatgggttttctcttttgggttttatttttttatttttaattttttggtggttgttttcgtttaacggtttcaaaaaatatgtagaagggaaatatttcatttcccttggacgctcaactgtatatatttcaagattcttaaaacccccacctcaaactgcaggcttaattttaatgtgttcattttttacaaggtgtgtcaacgttttatcaatttctgaaaagtgtctatggccccgaaaagttgaaatccacgacattatatcatctctgcgagccctttccagctctcaaggtacaataattccacgaatctttgttcttcaaaccaggaggttttctggaaaccttcttaaacaaccaggacaggacccatgagggaaatcttggggatgctctgagcagcggacggggcttgggaagcgcacccctgtacccgggctgcctccggcccgcaccccgccgctccccaagtcggctccgcactccgcacacaggcggcggcgctggggccgctccaagtgcgttgagaagtgtaatccctccgctaagtacttggctctcagtctccaatcactagtgggagctggagagggcaagtgaaaaaaaaaaattccagaggcagccgaggagcgagagggaaaaaaaaaaaaaaaaaaaaaaaaagtcccgcggtggcggcggcggcggcggcggagcggccgcggcggccagaagttgacggcgcagccgggcgcggggcgcggagtcggcggggcctcgcgggacgccgggcagtgcggagaccgcggcgctgaggacgcgggagccgggagcgcagccgcgggtaaggcgcgcgcggcggggccccgtcccctgcgggtggccgagttcccgagcgcgcgggaggcggccgagccggcgagagccgggcagagcgaggggcggcgcggga

SEQ ID NO: 32435 - DNA, 2300 bp, Homo sapien
tcttcctgtgtgttatgtgtcttattgcgtttaaaaaaattaatgtaaaatacatgtaacataaaatttactatcttaaccatttttaagtgcagttcagctgtgttaagtatattcacgttattgtgcaacagatttccagaactttttcatcttggagacctgaaactctggattaagccacaagccccattttcttttcttcacgtccctggcagccaccattctaccttctttctgtttgtttgagcttgagtactttagatacctcatgtaagttgaatcatacagtgtttgtcttgtagtgactggcttattttacttagcatgatgtcttcaaggttcatccatcttgtagcatgtgacaggatttccttcttaaggctaaatattttatatatatatgtgtgtatatatatgtgtatgtgtgtgtatatatatacataccacattttgttttatccattcatctttcagtggacatttgggttgttttcagcttttgactattgtgaataatactgcagtgaacatgggtgtgcaaatatctctttgagattctgctttcaattctttggattatatatccaacagtggaattgctgggtcatatagtaattctgtttttagaatggaaagtgttgctatagtcttatttttgaccttaatttgactaccacagccatactgctctcagtcttctcctttaagcttgtgtctctttttgtttatgttttggaaaatatggaaatcatggagcatatgtaaatatagaaaaatatattttatatcaattaaaatctaattgtgatttatacattttagtagaagagggtattggtgatgtgaatactaacaaaaggctgtagaaatctgattatcttttgctttctattttttagtaagtaaacttgattagaaaaatgttatagatcaaagtcagtttatatatttactcttaaaatctgtggctattggccgggtgcggtggctcctgcctgtctgtaatcccaggactttgggaggccgaggcgggtagatcacttgaggtcaggagttcgagaccagcctgaccaatatggtgaaacgccgtctctactaaaaatacaaaaaattagccgggcgtggtggcagacgcctgtagtcccagctactctggaggctgaggcaggagaatggcgtgaacccgggaggcagagcttgcagtgagccgagatcgcgccactgtagtccagcctgggcaacagagcgagacaccgtctcaaaaaaaataataataaataaatctgtggccagcatttaagtatcaaaatccttgcactaagtaacatccccaaactgtaagtctagtaagacttagtatttgcttctttttggaaagataccagagaaacatcatatggtgtctgtaattctattatatggaatattatattttctcttattcacaagctaggagctcaaacattagaactttgaggtgctatagtaaaaagttagaactttgttaaaaattacaccaaaagttagaactttgaggtgttcttgatctctactacagtgctatagtgaaaacctgtaatactgttttaacagtttgaactggttcacaataatcatgggaagatgtgctttatttttagtacatcttttcaattaataataacaaatgaggctggacgtggtggctcacgcttgtaatcccagcactttgggaggccgaggtgggtggatcacgaggtcaggagattgagaccatcctggctaacacggtgaaaccccgtctctactaaaaatacaaaaaattagccatgtgtagtggcgggcacctgcagtccctgctacttgggaggctgaggcaggagaatggtgtgaacccgggaggcggagcttgcagtgagccaagatcgcgccgctgcactccagcctgggcgatggagcgagactccatctcaaaagaaaaaaacggaagaactgtacttcccctcccatcccccaattccattatgtattaccatgattctgcatttgaactggtaaataataataaacctttctcaagccacaaatagcaattcagtttttgtctctttgttgacagggtggagttcagcctactctttcttagatgtgaaaggaaaggaagatcatttcatgccttgttgataaaggtaagttcatagtaattattaaataatttgagatgtttggtaggcatcgttactgctttttgacactccgactttgtggtatgctgaagttaacagaaagataatacattttataagatgaatggaatc

SEQ ID NO: 32436 - DNA, 2300 bp, Homo sapien
ccaatcacatgaggatattttcttttctactttagaccatttggtgtcagtgttccatttaacagcttttcccaccagctggtaaattctgtgtgtgtttaattcatcctagttaaacaggctgtgcctggaaaatgggagggcacccaatacatatttggtagtagacatttgcatcataaatgaatttttattattgtgttttaaagcatcaaaaataaagggtctggtatgaaaggaagcaggaagtaataaattttaaatactctatttttattacttggtctactgaggtgactcaggtcataaaggcagtaacattgagaaccaggtttagaaagaaggagcttaccatgacagggtgagatataggtacacctacacactctaccctggcatagcaagcggtgctgcactcccatgtggacaaacttggaacaaatggctttcaagataaggcagtgacgtgaactatttaacctcactttatttgggaatttaacctaaggacgagcatactatatagaaataatacatgtattgggagtaattgtgtggttggattacatattatttgcttaatctagggtttttctaagtggagtctacaagtaatttgtttcagaattacatgagatcttgttgaatatgcacatttcctggctcgcctctgacctacagaatcaaaatcactgtggctggggtgggattctgcatacgacaatcttctcatatgccacaggtgcccactgcaatcaacattttttttttctggacaaaatttacaggaaactgtttgagaaagttagatgcacatcttttataaatttgaataatctaatgaaatattatagttaatagagagaaaattctgatatattgacaacatattttattgctttttctttcaactatttttttctgtaagaatttgaataattcgttatacatgcagaaggtcaggaaaaattatcacagattaaaaaaaatagacttctaattctctgatggaaccattacctgcaggccttcatttttggtttaaaaatataacaaatatgtggcatatcttatacttctgacctaaaatttcaattttttaacccagcaattttttaatatttttgttgatcttagatttcactatagataagctaaatgtgttatgagagagattttaaattgaaaactgctcacggtgacaatttatgcagttacatggcatgtataagagctcttaccacaacgcctgaaacaaaataggtaataattaatgcatgccctcttctgtgtaacataaacattctaagctcttgacatgaggtttggtgtctataattatctccattttaaggataagaacatgagtcacaagattatttataaagttatctaaggacaactaacttggtaaatagtaaagcctaatgttgaacccagaatatctctttctaagagatcatgtctaccatggtgccttctatcaaagatggtagaaatatcactacagtaataggtaggcattttgcatttccccatgctgatggggaagatgtatcttttgaaatgtgtcttgatattaactaagtttttgtcttcttacccaattttacagattaaatatttctcataatttctttaaaaagaagtacataatatacataatagtacctaaagtagagagactctgtgatatggtagatagacagttttaaagctgaaacaatttgagtttaaatgctgggtctatagtctatccattatctgtgtgcagatctcttaaactttgagtcttaattttctcatctgagaaatgaggatgatagtgtttacccatggaattaccagatatagtagaggttgtctatataatgtctcattgagctccttgcactgtattaaatatagctgttacaatttaatacataaaatatcctcctgaaaggattatgggtctttctttattctgtatgaggtgtatactaggtaaaagacatgattttaatcaaaataccaaaatgtctgtttttctgtttaaatctttaagtatcttgaatacttcattttaaaatgtaatctcatgttttcgtttgaacagaagactggggtagtctaccccacagatgcctaactctcactatttcttctttcagcaaacttccttgataacatgcttttgcgaagtgcaggaaaattaaatgtgggcaccaagaaagaggatggtgagagtacagcccccaccccccgtccaaaggtcttgcgttgtaaatgccaccaccattgtccagaagactcagtca

SEQ ID NO: 32437 - DNA, 2300 bp, Homo sapien
catccaagcctggactagaaagaaaacataagtctcttgatttcctgtttagaatatgacccatagacatcttgtctcttaaattatctcactcagagctgaggttcacaaagttaaacatcacatcccctgtctggggctgatctaattaagcatgggctagttatttaggatggctcactgtcagccacaatgggaccaggaaacttaaagacaagtagagagacagaaaggtttagctgaggaaaaatagatatgtaagtcacactgttgagcacattttctctttcccaattacaggtacttgaattactttgccaccaaatccagcccaactggcgtaatcctggatctttgggaagcacagaacttcccagatggaaacctgagcatgctggcagctgtcttggaagaaatgggaagacatgaaacggtggtgtccttagcagcagaagggcagtattaaccaccatgctggaaggggaaatgaaggacaaaaatgcacagggagtctgtggccgtccaggtgaatcacagctgaggaggaaatccagatgagaccaatgcacttcacaggcaagactgcagcaggagccagaaggaaaacagatacaactgcccatgtacatgcccactttactcggacatcatcacgggagttaagaaaaattgtgtaaatttgtaccttgaatttagctatcaacctaattttcctcttagttgggctgtatgctgtgtggtacaggatcttacagtttcctaggaaacgctttttattgctatccagatatatggataaactttcttaacaaacccaatttctacaaatgttgtttacatcaaattggacagggatgcagacactgtccatggctcgttctatttttgttcaaatcatttgaagttgaagctgtggacggtttgttgtgtctatttcagattagtaatttacagagaaatcacagacttttgctacaaatcgtgtgcatcaagtgtctcagataatcctcccatcagtgttctgtttctagaacttgtagaaccagtgttactgtttgtatcagggaagtggagaatctaagtgtaaaaaagaaataactaagactcctattccttggagggacccttctggtgccctttgggaataaagctgtagcactgcagggaagacagtgattcatgttcaaccccacaaacaagcatttttttcacaacatgtgtgtttgtttgtaatatgcaatatgaagtgtttttttttaaaggtattattattatttacaggtattctggtaaaatgatttttttaaatttctatttttgttagcagtgctgtttgttagtatttggttattgactagacctgtcccaccttttcacctatcaaggtgggtgtggtcatcagtttaattcaacatgcatcacttccttgaccttttacctttcccttattccaccccagaaaggtgattgataaatgctgaatggctttgtcagtctgttccttcagcttgctcaggcagggtctttctttctcctctgaggagtcttaaggagacgtgttctctattaagttcacttaatattgccgttgtgtggccccacgtcgactccctatggtgctctactctagaggcagtgtggttggaggaatggactctaaactggagatcaagaaaccagttctcattgtgggtctgtcactgtcttgttgcgccaccttgagaaagtcatttaaccacacgacctcagtgtcctcactagaaagtgaaagggtgggattagatcatctccaagttctgaaatgctcaacttccaccgtgatgcctccagtctcattcatcagtctgaagaccacaatggactctgacctggatcatcatttaaaaatcatcagctggtcttttgcccaggctatgttacgcctttcaagtagttctgacaaggaagatgattattctaaccagcattatgatgttgtttgtttggcctgagtcgctctgcatcattgcattatgctgttcactgagagatgacatccctttattatcattttcttagcctctcttgggatgcccctgcccccagccttcctgactggttgcaaattctgttttttattattgtcttggcatcttgatatctagaccactcctacaagtttatctggcagtaggaacttggtgcatttttttctacgctacacccccccacccttaatctttctttgctgtcataatattcagtagcatttataaaagctgtctagttagctctttaaaaacttttgtcctgcaaaatgt

SEQ ID NO: 32438 - DNA, 2300 bp, Homo sapien
ataaagtataataataatcccttgtgaagtcattctcaaaatacttgacaagttattagtggcctcgatacaccataaaatatggtagctgctggccacatgtgactatttaaattaaaattaaataaaaatttccaattcacactagccacattgcatgcaagtagccacatgtatctcataactacgacctcagaaagtacagatatgaacatgttcttcattgcagaaatttctgctgaacagcactggtgtagatagcatgaggctaatgggaatttttcatcaatggtaagaacagcagtttacaattttggcgtcaggcattttacatatgtttaacttacataatcctcaaataaccctatgagatagttcctgttactagacccatcttacaaattagggaagagaggcacctagctttaatgttcaatatcagtcaagtaataagaaatgctaagaactgaaggcagacagtctggtgccagcacccaccctgttgtcaaatatcttgatgtcttggtatggagaagatgaagagagtgaagaagggttttgtgtggtggacagagtctccacagaaataagaagtggccagttttgtcaatgtctttggcaaatactaccttttcggatctccctgattcatccgagataggtcttattgcctagatggggctgtgcaggcagaatcatagaatgttagaacttaagagaactttgaaactatcaaaatatttcacaaatgaagaaactgagacattcacaggttacctgacttacccagggtaacagagtagttatgaccacagccaaaattagacctcatgtttcctgcgtgtgtgtgtgcatgcgtgtttacacatggcccccttggcaccaagagcataaaattccctgatgtattattagtttaaagacatgctaatcttgggaagtgattttctttttcccaaaatgttgtctgtgtctgtgtgttgaccttttaataaattcactttccttttgtctagtcttattttacccacccaatcttgcatccctccatcatgaccacagggattcacaacccagctacgtagacaattatttcctgtagaaaggtaaacaaattcatagcagctcgagttcttacacacactattagaaatttgaaaaacatgttataggctccaccatcactttgagtatctacaaattttgctttgcattttttttttctaagagagtttctctcggtatcgcatcaccacccttgtcagccaccaacatgcacgcaaagaaagcactgttgcagaatgagtttccgtcgagcttttagtttctgttccactgcaaaggggtcatacgcgctcagaacataaagcagtctgactggcgctgacaaccccaggacagcagccggctggggcagtgcaaaagcttcatgccttcttccccaaccaagaaggacttcagttcgagcccgcaccggcttcgtcaaccgcgagacccgaagtcgtagaccgagtccagtcctagggaattcggctgaggctttgccggcgcggcgaagaaggtggcaggcggcaggctgagctccactggacacagcctagtggcccggggcgcgcccgctgcactcccggcgtccaggtctggcgcaccgcgggaggcaggcgcgctgccactctccgcagccgcttcgtcccctggtctgtctcgcctcggcttcagcgggcaaacccacagctggtctcctgggcgctgatctccctgcaatccttgcttacataaggcgggcgggcgtgctcccgcccccggttaccccccagaggagttgtgctgcgccctctacgcctccttggcgagcgccttcgcgcacccgtgcgccctactctaggatgtgaacctccttggccacccagcagcgacagccgggacatctctccgccggcgtgagaacactgagattggagaccagagcgcctgacggtgcccaagcttcctccctccgttccctcctcctccaactccccccacttcaacccccacccccacccccacccccggtgtctgtgtgtgttcctcacaggcgaggggacccggagagcagtccagacttcggcgtgcggcggagctgcggctgctcctgctgctggggggagcggcggaggtggccgccttgcgcctccctggacttcccaagtgggggcagagcagtcgctcgcgggagacgtcagttagaaggcattgggaaagagggaccttcaaactcctcctcggcgtctcctctcctcccccttttggcccctgcc

SEQ ID NO: 32439 - DNA, 2300 bp, Homo sapien
ttgatttcagatgtctatttttaagttgaatttaggatatatagggtaactgatgaccaagaggtctatgggagtttcacattttattatttattatcttaactagatcctgttgagaaatttttttttttaaaggacatcttctgtgggaacccgtagtacagatattttccaattagcatctttgtatgttctcttctggcatgagtcgggtttaggcttgacacactgggcttttaaggggagctctatctttgcagtccaggctacgtgtgacaagattaaattggcacactttactgtacagctcttgtgttcctggcagcactggcctggctgatacctctgagagaaggctcagctgtcactcactgacccattaacactactgttctatcctgcagtgtcatttttctcattcttatggagataatgctccctggagatctccaatacctggaggaatgaaagagaacagcagagacaggctaactatcaaagagggagcaaacaacacagcaagaccatgaattccaacagttgaattttcaattgagtgaaaagatgaggcctattatgatggctgggttcagaaggtggggagacgatcaagttttaagaggtatcttaactttttaacaagctattttctcttttcttcctgaatattaaaagaagtgcccaaaataacacctgcaactagatatagagaaggcagctgctttgaacatgtaatagggacatttgggtaagaatttatcatttgcaaataggcaatggatataaaacagagcatgcattaaggtgaatggcttaatattctaaataaaacaggatccctagttagggttggcttattggggcacaaaatcgccttcctggtaaaagcacaaaaagagagaaatgatatgtgatctttgtatcccttggtctaaggcttctcttctcttgtgattgaacggtttccagtggcataagcaaactctgttgctctcttgtagtccaaactgtgtattgtttggtgggtcactttataagaagtaacactttctaatggttactacataaaaaggcactataagaacatgtttctagatttcctggactaaggctggtccagtttgattgatatgaaagcaaaataaataaataaataaataaataccacctgaaagtctatggaaacctgctgaagacatttttatagaaaaccaaaaagaaaaaaaagaggaaataaacaaaaggaagagcaaaagtgaagtagtcagaaaatagggataaaactaggtaaaaacagagattcagaattattaaacagagtaaggaaaagtggaatgtcacaaactacaaactttttaccacaatctgcacctcaaccctctctccctgcttccaattttcccacaccaagcaaagtttattactgggtttaaagtgttatcctcaggccgaggtttgtatacattttccctccccacttcaagtgtcacaggtgctagacgccatcaggataaatgtggcatattatttgagagtactgacttttctttaaaaggggtttttgttaacgtgcgtgtgcttgttttgtttttaaagttaattaagctacaaataatttacagctttgttgttaccttaaaatacatatggcacattatggagcaggataaatattcatacctattttaaagatcaaaaacaagacattaaagaaatattggtaggaagaaatacctttggactaactctcagaactctcatgtgccttagggactgagtttgttcctttcttctatttgatacgcttgtcgggaaagcttgagatacagtgctccagggtttaacagggaaaagggactcagattattgaggttcagcaatgacggcgattaggatgccctgtagtttgcccaagtcctccagaaaaggaaatcacttttagtcttcattttacagctggcaggcactgtacaaatcagtcagctcaggctgcgtggcccatgtcccagtgctgtgcaggacctgcctctatcacccgtgtgcactgcccggatggtgccaagcgcattggagcaccggaaggagacgcggagccgaggccaggccttccggcggtcgttacgggacgccgctgccatctacagcactccgtgaagaatatgctggccgccttcatctcccgcgtgttgaggcgagttgcccagaaatcagctcgcagagtgctggtggcatcccgtaactcctcaaatgacgctacatttgaaattaagaaatgtgatctttatctgttggaagagggt

SEQ ID NO: 32440 - DNA, 2300 bp, Homo sapien
gaagtttgttgcagggacaaggctatcatggagaacctgcactgctagggcagtgcagaagggaaatattgggtgggagcccctacatagagtccccacctagtggatctgtgagaaggccactgtcctccacaccccagaatggtagatccactgaaagcttgcactgtgcacctggagaagctgcagacactcagtgccagcccatgaaagcatccaggtgggaggctgtaccctgaaaagccacaagggcagagctgaccaagatcatgggaactgacctcttgcatcagcatgacctggatgtgaggcacagagttaaatgagatcattttcgatctttaagatttggctgccctgctggatttcagactttcatgtggcctgtagcccctttgttttgccaatttatcccattttgattagctgtatttatccaatgcctgtacctgattgtatctaggaagtaactaacttgcttctgattttacaggctcatagatggaagggacttgccttgtcttcgatgaagctttggattgtagacttttgagtaaatgctgaaatgagttgagacttcgggagattgttgggaagtcatgattggttttgaaatgtgaggatgtgagacctgggaggggccagaggtggaataatatggtttggctgtatctccacccaaatctgatcttgaattctcatgtgttgtggaagggacccagtgggagataactgagtcaggggggatgtatttcccattccgttcacttgatagtgaataagtctcatgagatctgatggtttaataaagaggagtttccctgcgtgagctttctctctctttgcctgctgccatccatgtgagacgtgacttcttcctccctgccttctgccatgattgtgaggcctccccagccatgtggaactctaagtctattaacctctttcttttgtaaattgcccaatctcgagtatgtctttatcagcagcctgagaacagtctaatacagtctcttaatgagtttaccctttaccacgctaatttaccttagttttctcacttgtaaaataggaaattataacagaactcataaacattaaattggctgaaatattcaagaaggcagatggacacataggaaagtcttggtaaagagcaagtgttataacttttattttactatgtagcacacccttttatccaaagtgttttgctgcaaaccccaaaccaagtgcctgagtttccaacaaaagagaaaaccaggctccttcatgtgcactcagaacaggatatatcttatgatcaaggagcacaatactttccttaggatctcagcaggtaaatttttgtcattcccaataagaagtcaagcagttatatatatgtatatatatatgtgtatatatatatatttgtagccacagccatagcctataatcaaacaaaactgcttcttccaatttctggctacagtttcaatatttaagaaaataaaaaatagacaaacagatggaaattttagcagccattttctaaacaacattttagtgactttataataatcatatagctacattatattattaaacttgatgatactaggttattttattcatgttatttttatattttccccttactgacacttaatatttattacatattgacaatcttctaagtactaaaacattatttcatttaataatcataaaaccaaacatgctattgtgttattacaaactgcagaataggaaaccgggaccctgaggagtttaagtaaattctccagagtcagaaaggtaataattatgaccatatttttatatgcctgttgtacttatcttgggagaaaatatgacattggaaaagaattgaaattatataattattgttttttcttttaattgacgatacgacattatttacatattgacttttgtctaaagaaagaggacattattgtagttttgaaaatatgggttgccttttatagttgtaccatagttttgatagctcaatttcacttacagatacatttaacgccactagatacaaagtaaaaactttgtctattatctgctgaatgtgtcatttcccacaggtgctaagaacgctcaagccatggagagagatgcatttggagttgtttacattcagacaaagctcatctggttgtttgcagctagtcacaaggtaagcaggggcgtgcatgcgcacacacacacacacgtgaattatatatttcaaaataaattggaattacataaattaaaaaataaatattttaaaatatgatttt

SEQ ID NO: 32441 - DNA, 2300 bp, Homo sapien
tgttttcctagctggtactcagaaactctcccatagaggtctgcaaatgagctaggaagggtgctatgaagaactccctttgtctaaattaggttacattcaatggctgaaaatcaaatcagacagaaagcatataaagccagctttaccatttccatttccaatctccaaaaatatgtatattcaagcaaagagtaatgtagactactgcagacagaatggccagacagggcttgaaattctgcatcaatgcttacggcaaccatggcctagacctgagtatgcagtttgggttgatatccttgtttggatcatcaaggtcaaatgatgtccttaaggacatagcgggcaaatttacaagcaccactggattatcatacacagcacatgaatttttctctttcatctctgtgactctttctaatatgtcatagtaaatatctagatcttctgaatgggtataggtggcagcttggaaaataaggttaaaacaacattgagagaattatgagggtttctgacagaatgcagggagaatcgaagttggtgagatgtttccaaaatattgcaatattcattttcctaccattaaaaaaaatctttgccacctctcgttttggattatacgtctctttccccattagagagagaacacctgagggcagggactttcttatgcctttgtatcctcataacttagcagggatggaacctacagtatatgccaattcgtgttttttaagtgcataaataatttagctagctattgaacagaaaaaaaggtactacagatacatccttgagaagcatatagcctcgcaaggagagggttccgacctatatggcacaatgaagccacagtaaatgttgcacaggattgagtggcaaatcgtgtattacagagtatgaaaactataaaaacttgtagtaggaacaaattaacgtactgtagaccatttggaggtgaggtatgatcaaggtaggatttgtctaagcctctgaggatatttataatctggacagaattcttgctagaaaaaacagcctgcgagatgcagaggtggattctgacatagattccttaagccccaaggacaagcaaggtttcttttgcccaaggttcagaatcattggtttggtggggtggactgggctttttcagtgccttcgctttgctttttaaatattgatgaatcagtattgtggttacctggcatacgacaaaagaggcagctttcagtcacttccacggcttcagttggtgagcttttcgcctccttgcctggtgtcctcatttctttttttttttttttcttttttacccttatcttatttgttatttttttttctgggttctccatttcttgtcactgccctgagccctgggtttgtcttagcagtttggactatctacaggttaagatcagaggtgccttttctctgtgagtacgagtggggctgcagtagaagcgggggagagcttgcggaaccccaagctctctgcttcatgctactgcatttttctttactaggttctgttgagtcgggaagcagatcaaggtcaagttagtcctcacccttcctaacgcgttttctaaggttcttctgcatacttaaaaaagttcgggacctaagtagttaccgggaccccaagagctacgaggtttaggcctgccttcttcaaggcgcgccgggttccgggtaaaaagagccgggaaagggtggctgctcggtgcgcatgctccgagggctcggcccaggaaggcacctccacttcgctccctagagactgggcccgcctcctccccagagactgggcccgcctcctccccaggcttccgggcggagagaagtgggcggagtcagggccggaagcaccggggcgagcgtctaatccctaatacccaattttggtggcgtgcacctggcaaactgatgattgtgtgggacgtctaatctctagtcgctcacccctctactttaccacagagctagaaatcgatttgaggaaatctggtatcaatgagcgggcggggagacaaccccacccctaatttccctgtttacggaagttctttcccggcctcctcagactggtgtcggcttcctttttctccacacttctagctaccttgtttttatcgttttcggcacctgcccttccccagcgcccccaccaccccgagcactatgtatgatcgggctccccgcctgctcaaattggctgaaggtggcagcactgaggcccatgtgggtcctggatcctaccaggtacctttcctgaagcagcaggcgacagg

SEQ ID NO: 32442 - DNA, 2300 bp, Homo sapien
aagtgttaggattacaggcgtgagccactgtgcctggccctggctaattttttgtatttttagttagagatggggtttcgtcatgttggccaggctggccctattcatatgtagaagtcctaacccttagtcccttagaatgtgacctgatttggaaatagggtcattgcagatataattaacgtccatgaggtcatactggaggatggttcgcccctaatccgttatgactgctgttcttattaaaaagggaaatttgaacacacaagcacactgggagaacagccatgttcagattggagttacgctaccatatgccaagaaactaccagaagctaggagaggcatggacgagatccctccccagtgccctcagagggagtacagccctgcctacaccttgatttcaaacttctggcctccagaattgtgagataataatttgttgttttaagtcacccaatttgtggtatgttacggcagccctagggaactaatgtagtgcgattattttaagaggcaaacaagaagaacatcctaagagtgaggtgcctgatagtctcatgcatcagaaaagtcccatatatttgacttcagcagttaaattgtattttcctgttttaccaaacctttttaattatcgtttcttgctgtagaaaaatcacataaaatctgctctttgcttaacaaattacagggtcgcttctgatttgtgtgctcgaaatactagtcaccaagcagaaactgatgactgtgagaataggcgactaattaacaaacaaacaaaaaaagccctttctcaacattggattgaccgagtgaaagttgacaggggaaagacacctcgattcagccatctttctccaacaggttgtactgctgactgcacagtgtcccctgaaggactccggtcgctgtagccttggagagcgaccagattcctcaccccactcaggaggagccagggcaagattagggtgcagagaaatcggtttcctccagcctcctaccccagggaagaggaccgaagccagccccggcctcacgtgcatgcccagtcgggaggacgccctcagtgggagagccctgctcaggttctccccgaggccgaggtggtggtgggagcgggcggtggccccgggatcaaaggacctccgccgggttagctttggcagtgccgcagccaacccagcaggacgcttattttcaagcctggggaacgtagttcctcccgctttcacagcaggatggagcccgacggcaccccggttaaagggcctttccagagccctccggggaacggaaggccgcgctcctccgggagggagaacgacacactcttcgaggaaatcctggggcgggcgctctcctcgctgccgggacctttgtttctaagctggccacagctagagcagccttaagtgtcccaatgacacgcctgctatcgagcgccctcccggcggcccctcctcagccagctgcccagcgggcgtcctcaggtgtccccaagaggcgcaggcctagtcgcctacacgtcctttccaacttcgtcagctctggcttcccaccacccctcccggctctgcggcggcccagcctcttctccggttaattccggcctgtgcggcccggtcgtcccgtaaagaaggcaagcccgggttccgggtgaggggttggtgggtcagggtgggaaagcaaggcagcggtgagtcctctgctagcagatcgggctcaatatccccattccctgttttctccgggcccgccctccgcctctcaggcggccgccatgaagatcctctgccgcggctgcagccggtctgcaaacacacgcccacccgcacgcttagcctcgctcgccacagagggaggggtggaaaaggcactgagcatgctcggtggggagggcggggcgctcgtgggctgcgagtcggggccggagctcttcaggccggctcccgcgcctccgccgcccgcccgctcggagccgcgcccgccgcaggctgcgcccgccagtcccgccccgccccgccccgccccgccccccgccgctcgtccccgccgcggccgcgccgcctgcagcagcaccagctgctcctccccggcggccgccccccgcgggtccctccctggctgcgggagagacggaggtagagggaggacacagagccgcgccgcccgcaccacagaccttcgcctcgccccgccggttcctcaccctcggggagcaacatgggtaagtcatccttcctccgccgtcatcgcctgacatttttttctttctcggcgtgctgcagggt

SEQ ID NO: 32443 - DNA, 2300 bp, Homo sapien
gcctaataaaggtctcccatggagctcaagagtagatcctgaggtacgatattttcttggaaaaaaaaaacttgtaggtgtttgtagccggaccgggtgctgtgttagttttcagcttctagctcgatcctatttcctgagaaatgccaagggctttgcaataggcatttgtctaacttctgcgtgaattgggtcttacagaagatgacctcccccctctctgggggtcagggggtgtgtgtgttttttatacatctgtctttttttgtttgtttgtttttactgaagacctcttatatttgcagacactgaaaccaaaggtaacaccacgtcttctccttacagggtctaatgacagtttcttgggctcttcttttcttttttttttttttttctctacatatagttttcccaaaaatatgaacacgtttagatgttggaaagaaagcagtttccctccctccttccctccatccccccctccctcccttcctcgcttcctcccttcctcccttttgtttctctcttttctctttctctctctttctctttctttctcactctttctttctctttctctttctctctctctttctttcctctcttaagtattaatcacatacctgataatcagatgccctctgaaggttttctttgggaggggaaaggacaaatgcaataatctttacatgttggaaaactgaccccacatccccgtgccttgttgtgtgttcttttctgctcccagggagttctgtccaacatctcttccatcaccgatctcggcggctttgacccagtttggctcttccttgtggtgggaggagtgatgttcattttgggatttgcagggtgcattggagcgctacgggaaaacactttccttctcaagtttgtaagtattccactctctactctcagattgagagccaaaactttaccttccatcaggaggtcaccctatctacaggcaagacagtgagctgtaccaaaggcactggccaaagtagggcccaggtcattattttcttttgagagagctctctagccctgattcccagttgtgcctccttaataagtacaacaccacccccaccaccccaccatgccatccatggaggttttgtgcatatatatcacagacttggattccattccctaagatatctttaggactaaggtaggtatatatatatattttcttctaagtgattccttcccaccgttttaatgcacatagtaagtggggagctgtgcaggctgttggtttggagaaaccaggcaaaagcacagtgactgtggcctgtccagattaaatctgttaagcagtaggttttgctaaatatggagaaacagtaaaaggtaaagcttctttgtccttagctggtacaaagttctcctttgtaatttttagatgtggtgcggttggcgtgatcactgtctgagtgaatgtttgtagaggagaggtttcaccagggggttcactggtatttaaagttaaaatagagaatgaaaagtgaaagcctttgcgttggagactcgtttcaaaggagaagaaaatggcatgtgccgtttatgtatcttatatagggttgttgaatgtagccaaatgtgcctgtcagcatggagcttggcactctgatgggcgtctgaatcatagctctctatacgaagcatccattcccctttctaagaacagagaaaggatccaaagcacccaccttcatttgctgaggaaggatggggatggtggagatttctagagaacagttgtagtgtaatatttcctgttaccacagttattcccaacttttgttgacacatcatcatccagggacattctcattaaaaaaaaaaaaaaaaaaaaaaagcatatccaagaagtagcccaatagtcatgtaatgtgtgattctcttccccagcatttctgccacatcatcctccagcgtcttttcttaaacatccctgagaagagggtacacggtgtgccccacccagggcagcccatttctgagcagctctgtctcggagaagtttttggaggctatttaacctgaaaattagcatgacttattctaacaaggagaaccgaggggtacctggtcttacagataagttcacaagcagctggttctctcttgtggatacatgggaccacagtggctgtagctagtttcctaagactccatctgccttatctgccagatccttcctttgccacacacacacacacagtgtctctctctctctccctccctctctcatacacacacaaccaaatgcttcattcttcacctag

SEQ ID NO: 32444 - DNA, 2300 bp, Homo sapien
gtggtttcctgagatgaagtctactcctggtgaagatgctgtgaacattgttgaaacgacagcaaaggatttagaatattccataaacttagttgataaaacagggtttgagaagattgactccagtttcaaaagacgttctactgtgagtaaaatgccatctgacagcataacatgttacagagaaatcttttgtgaaaggaagagtcaatcaatgctgcaaacttcattgttgtcttattttaagaaattgccacagccaccccaaccttcagcgccaccaccgtcatcagtcagcagccatcaacattgaggcaaggccccccaccagcaaaaagattacgatgtgctaaaggcttaaatgattttcagcatttttggctataaagtatttttaaattaaggtatgtacattttttagacatgatggcattgcacacttactagatgcagtatagtataaatataacttttatgtgtactgagaaaaaaattgtgtgactcgctttattgcaatatttgccttagtactgtggtctagaatggaacctgcatatctccaagatatatctgtagtgtgattattttggaaaaccatttagtagttacccaagataagttaaaacatgtccacaaaaaagacttgtatgtgaatgttcatagcaacattattcacagtggccaaaaactggaaacaacccaagaatccatcacctagtgaatggttaaacaaattgtggtatatccataaaatggaatactactcagcaacaaaagggaacaaatttacagatacatacaacagcatgcatgaattccagaaaaattgtgcagtcaaaggaataaaactcagaagaccacatacaatgttcattcatatgaagttctggaacaggcaaaactagtctgtaggtacagaaagcaaatcagtggttttctggagtttgacatgggggtactaacaagggaactttttggggtggtgggaatgctgtatattttgattgtggggatggttacatggttggatgcatttgtcaaaacacacttaatggtaatgcaaaatgaatatattttattttatgtaaattatacctcaaagttgaatttttttaaaaagtttcttttaaaaagtaaagacatttgtggtgcttcttgtaaattttactgctgattatgaccttgtttctttagatttgactttccaagtttgaaaagaccagtttaaaaatgacttttgctgggcatggtggcatgtgcacgtagtcttacctactcaggaggctgacgcaggagggtcccttgagcccaggagttggaggctacagtgagctatgattatgccactgcactccagcttgggtgaaactgtgagaccctgtctctaaaaacaaaaataaaaaaaaattaaaatggctttttagattataatctatatgaaattgggggttatttcgcacttttatattatttgtccattttgcttctttctaaatagcctctggattgtgtgttattttcagaaagctcttggagattttttgaagtgtatgttttaacaggattttcctgttgctctttggcaaactttgtccttttattgtttaaggagtataaataacaacagaacagaattactttctggtgcattttcctcttctcctgagtcttttatgttcaataactctgaagttcctgttattcctgcctttgaacgtagaaaatgagactctctctcaaatacctgaaactaaggcacataaaaaatttaggaggggccaggcacggtggctcatgcctgtaatcccagtactttgggagattgaggctgaggtggatggatcgcttgagcttggcagttcaagaccagcctgggcaacatggtgaaaccccatctctacaaaaacaaaaattagctgggtatagtggcacgcacctgtagtgccagctacttgggaggctgaggtgggagaattgcttgagcccgggaggtggaggttgcagtgagcacagaccgcgccactgcactgcagcctgggtgacagaagtgaaaagaaacactgtctcaaaaaaaaaacaggagggaggagccaagatggccgaataggaacagctccggtctacagctcccagcgtgagcgacgcagaagacgggtgatttctgcatttccatctgaggtaccgggttcatctcactagggagtgccagacagtgggcgcaggccagtgtgtgtgcgcaccgtgcgcgagccgaagcagggcgaggcattgcctcacctgggaagcgcaaggggtcaggg

SEQ ID NO: 32445 - DNA, 2300 bp, Homo sapien
tactatgagggtgggttcatgttattctatatttgtccaaccctatagaatatacagccccaagagtgaaccctaatgtaaactatggactttgggtgataatgatctggcaatgtaggttcactatttgtagcaaatgtgctactttggttggggatgttgacaatgggggagggtgtggggtcgggtatatgggatatccactgatttttatttcaaagataaatccacttagagatcaactcagtcatcaattgcatctaatttctggtccttttgaaatgtgtcacatcagcttaggacagacctttcttctgactcatccagtattcctgcagcgactgttctatttatatacagaattacaacatagctccaataggcttaggtaaagcttgtcagtaccttcctgttaacaaggaaatctgctgctgaaagaccttacttttgaagtctaccagattggtggtagtatggcctgtgttttgagtgggtagagagcacttttgagggagtgaggattatttcatccaaagggctgaagctactgttatcccgtgtcatagcttctgaggtactgaatgagtaggatctcctggccctcccatctctgtgggtacctcgttcatacttgcgacctcaatatagcctcaatcctgctgaagcccagtactatctctaaatgtggtttattgcaggaaaaagtagcttcttgactagccaaaacttgactgccggttgtcaactagccagtttttgagaaaagtgagaggttgttacgtaggaaaccttataactagaggctctcaaactcaagtatttaagtatcatcttttagatttctgtgtccaggatcgggttgcactgggtggtgctggaaaaattttttgatctcacctccttctagccttttgaatccttaaaaatattcccatagacatttatacacagtcctgggcggttcttccttctccttccgtgaaatactggtacctgctttgccaacacctatgaaagtgctccaggaggagggcggataagcaactaatgagcacacctgctcaggtagggttctaaaacaatttccagccacctgttctattcttccccagagttcaaaagcttaatggttcgtgatccaaaaacccaattcagattccccagaagacctccctggaatccgttgtggattccttcctagagttaggaggcaagcaggtttcttaggcactattctgtcggggtaggggggagcgtgcgctgtccgggtttgtgtggttgcaatagaccctagggcgaggatcgcatcccgggccaggactcccttgagccatctctttttcctcgtccccatttctaggataaaacccatttctccggtaggtggggaggttgggttagagtcacacagggattcaggaagctttccttttcaacgtcccatcccttcatcctttcctcccacttcccgtggctcttttctccaccttccccaactacccccttttccattcagcgaagtccacgacgactttccttccctgtccagtggcatcgcatcttctctagccacataagcctgttgtggaggagggggcgccagtgtggctaccctggaaggggtgtcgggggtggctcgcaggtcctcactcacccagccctctccccgaggagcgaccctctcgcccgcgtccctccagagctgcgccgctcatcaatcccggtcactctgccagcctgctccccgggcgcccttccttctccctctcgcctgcggtcctccaccctcccaccccctacctaccccgcagcgacgttcggggtcagcggcgcttggggttggcccgagaaggggcggggataaagcgagcggtggaaggaggcggctacgtggtgccaccgccgcccgggagcgcccgaccccgtgcgcgcgcgcgcctagccaaggcttgggcggcgggcggagctgcgggcggcgcgggcggaggagcagccggccgggcgggcggagcgagaggcgggcggagcgaggggtgggagggcgcgcgcgaacgggcgggcgagcaagcgagcggcgtctccaccagcatctgccgcggccgcctttgcccgaagcccggggacgaaccgacggaccgaccgcctggcgcacggacgcgggcgctcgctttgtgttcggggctagcgtcggcgaggcttgagcttgcagcgcgcggcttccctgctttctcgcggccaccccggctccggcggcctcggcgcgcgaggggctggaggtgcgggagccgctctccgccggt

SEQ ID NO: 32446 - DNA, 2300 bp, Homo sapien
gagaaacactgttcacaggttgctttccccattagcccagggcaactcatttgcccatcatttcctagaacaaccgggtctgttacgtctacagttttcatcttcatgcagttatggatttggtgtcaaaaactttggtcctgttctctaccatcttaaaataaactcttgtgtcctgctttactatgaattgcaaagtaggcattaggtagccttcctactaccatagtttagagttcaatattcttatgaccattctactggtagaagcaaaaaatgaacttgtaggcatgtgatcacatgtgcctatggtgctgtcttttccagtacaggggaactaattttcatattttaatcttgcagctttttgtttacttcatgcattgtgatttctcatagttttgcacagaactcacttccctaccttttctgaaacaaaagtatgtatacacacatacatatgtattgagcacctctatttactgtgttccacgtgctgggcatatagcaagaacagaatggtctggggccctgctctaaagaagatttaaaagcaaacatatattaaaaatgcgtgagtctggccaggagcagtggctcatgcctgcaaccccagcactttgggaggctgaagcgggtgaatcacctgagatcaggagttgagaccagcctggccaacatggtgaaaccccgtctctactaaaaatacaaaaattagcctggcatggtggcatgcgcctgtaattccagctactttggagactgagacaggagaatcacttgagcccaggaagtggaggttgcagtgagctgagatcgcgccactgcactccagcctgggtgacagagcaagactccatctcaaaaaaaaaaaaaaaacgtgtctgttcataaggttctacaaatagctgttgttacagaaaataggactagggttttattactggggattatgcagtcgaggtaaatataaaatgaggttgtttcttcttttttttatttgagacagagtcttgtttgccaggctggagtgcagtggcgtgctcttagctccgcctcccgggatcaaacgattctcttgcctcagcctctcgagtagctgggactacaggcgcgtgccaccacacccagctgatttttgtatttttagtagagatgggatttcaccatgatggccaggatggtctcgatcttttgacctcatgatccacccacctcggcctcccaaagtgctgggattacaggcgtgagccactgcacccggccctggttctaaatactcttccagctctaaaacattgattctaaacagatcacattccaggaggactctagcaaaccagcatatgcaaattatagcttttgcaagaccgtttctacttttatattactgaactctatatgattgtccaagtaaagttttgtgtctctttgattatttgattgtactttaaaattttttcaccattcatttaacattttttaccatactgtagtatttttaatgcaattgtgtttgcattggtgtggctttagaggcttctccaaccaccttcccaaaatactgatctgtgatttttttctttaatgtttggccaaacataatacatgcttattttatttttcatccctacagaaaggtagaagatgagaattctgtctcctactgttgtttttcaaggtgccactcaaatttcttgtacgtgtctagaaacttgtgcatacaatagaagtacactgtggctgggcatggtggctcatgcctgtaatcccagcactttgtgaagctgaggtgggtggatcacctgaggtcagggagtttgagaccagcctggccaacatgatgaaaccccgtctttactaaaattagaaaaaattagccaggcgtggtggtgtgcgcctgtaatcccagctactcgggaggctgaggcatgagaatcacttgaactcgggtggcagaggctgcagtgagctgagatcatgccactgcattccagcctgcgcagctgagccagactccatctccaaaaaaaaaaaaaaaaaaaaaaaaagatgtccaatatatgtaacttttttctttggacacaaaaattccattagctttgttttctcatttttacttgtcatgatgtatgtcgaacacattatttttagtgtctggtgttccattatacagatgtctctcttgttggttgaatttttgcattcacagaccctcaagttggattcatatctttttacactaagcataaagaagacggattggggtcgggtatggtggctcacgcctgtaatcccag

SEQ ID NO: 32447 - DNA, 2300 bp, Homo sapien
ttattttggatagtctaagtaacagtagatagtctctgtaagtagaaatccacttatccgtttattatcattttttttttttttttggaaatggagtctcactgtgtcgcccagactggagtgcagtggcgggatcttggctcactgcaacctccacctcccaggttcaagtgattctcctgcctcagcctcctgagtagctgagactacaggcaggtgccactatgcctggctaatttttgtatttttagtagagacagggtttcaccatgttggtcaggctggtctcgaactcctgacctcaggtgatccgcccgccttggcctcccaaagggctgtgattacaggcgtgggccactgcgcctggcctgttaattctatctactttaaaacctagtagagctaagcccactagacaaaagctttcattaatcacttctgatattcaggtaaaccaaaacatatgaacaggcaatggctttgagttctcatacagcctcaattatgtgttagtcaactcaagcatccattatgtactcaataataggtatgacacagctctggacctcattaacactataagcagacaggcacaggcagcctgcatacactccttttcctggtgtcaacattatttaaaagcatgggaaatagtaatgagacagtgtcttcttcattagaaccttaggagtctactagatttcttcatctctatttgttgttattagtagccaaactgtgcaaaaaacacggtcttgagaaatgacagcacagtatcttagagggaaaggaaatgtaggatgccagtgtggggacaaatttctgattgccagtgattgttgtgagcataacaataatttcatgaacattaaagcctctattgagggcagctgcagttgtaaaggaaaaaaaatggtcctgaacatttaaaactacactggtgtacatcataatcaaacaaagtaaacagaaaaaaatttaaactttgctaaaaaaaaaaagcagaagcacttgatctttaggaaggcacgcagttgcttattatgaatcatttctagagtccgatgcattttcaaagccggttacagtcattacgaagcacacccttgtgaggtaagtgtatcatcacctttggttcataaataaaaaagctgagacgccgagcgattaagtcactcgcctaaggagaatgagtcaacgtcaagagtcatagttgacccggcctaaagactccagaccatcagtccagggcttagtcagcggggcccggagtggcttccctggctggcatctggacttaggctatttccgtgcacgtaaaagcggaatattggaacggttgcacagaacttccaaataatttttaccgccacgcaagatttagccctgaggtcttaatctcaggatttgggacagtaaaagctgtcgtccctccccctcgtccagccggtggcaagcgggtactgcgggcggttccgtccgtcccctttcgcagaaatggcaacgaatgaccaccagcattagctgagccaggggacgtgggagggttgattgcctaaacgactctgcatcgccgcctctttttgaaactaagagaaaatggtgggagatcaaaagaaaactaaataaacacacaggcaacttgtcctgggacctcaactaagcaaatgaagccttattgtgtgtgctgagcctgcagttcccaaccttccggggaagatgggaggacagggcgacaaagggcacagtaggcttgcctggcagtaagtgtgaccgcagctatccaggcggaagagcagaggactgaaaccaccctccagcaagcgagtgtccgccgcgttgagaaccgcgcaccctacccatcggccacgtgaccagtcctttttaaaaaaaatttctttaccttaaaaaaaaaaaaaaaaaaaaggtgggggagagactccacttcccagaagcctctcgttactcacgcagccgcagtcttgcgcaggtgccgccagggccaaacggacatatccgtcacgtggccagaagctggccaatccggtttgaatctcatttttttcctcttacccccccttctggagcggttgtgcgatcagatcgatctaagatggcgactgtcgaaccggtgagtattgcctttggcccccacccccacgggtccccgcgctccgtcttccttctgactgggggactccgcgggacggcgttcccggcgcgcactgtaccccttgccgccccttccccttcatgttggacctgacctcccgcggacaagtggggacgtcccggaggat

SEQ ID NO: 32448 - DNA, 2300 bp, Homo sapien
tttttagtagagacggggtttcaccgtgttagccaggatggtctcgatctcctgacctcgtgatccgcccgtcttggcctcccaaagtgctgggattacaggcatgagccaccgtgcccggcccgagttttttgattaacagaaaatttaataaaaatggaaactgttgtttaaaaaaagttttaagaacatcactggctttcagtcctataggtattttcttgccaatctcattgattttttgctgttatataacagcttcatgaaaataggacatctggccaggaatggtggctcatgcctgcaatctcagcactttgggaggcccaggtagggggaccgcttgagcccaggagtttgagaccagcctggggaacatagctagacgctcctgtctctgcaaaatataaaaaaattagctaggcatggtggcccatgcctgtagtcctagctacttgggaagctaaggtgggaggaccccttgaacccagaaggtcaaggctgcagtgagccataatcatgccactgcactccagcctgggtaacagagcaacaccctgaaaagacaaaaagaaaggaaggaaggaaggaaggaaggaaggaaggaaggaagagagagagagagagagaatgggaggggaggggagggaggggaggggaggacaggggaggggaggggaagagaagggaagggaagggaggggaagggtagggaagggagaggaagggtggggaagggtggggaaggggaaaataggacatctatgctgtctttttctcttcaaagaaggtaacctgacaccacttctaaccagcagaaaataacaacgcggtcaacagaattattttggatagtctaagtaacagtagatagtctctgtaagtagaaatccacttatccgtttattatcattttttttttttttttggaaatggagtctcactgtgtcgcccagactggagtgcagtggcgggatcttggctcactgcaacctccacctcccaggttcaagtgattctcctgcctcagcctcctgagtagctgagactacaggcaggtgccactatgcctggctaatttttgtatttttagtagagacagggtttcaccatgttggtcaggctggtctcgaactcctgacctcaggtgatccgcccgccttggcctcccaaagggctgtgattacaggcgtgggccactgcgcctggcctgttaattctatctactttaaaacctagtagagctaagcccactagacaaaagctttcattaatcacttctgatattcaggtaaaccaaaacatatgaacaggcaatggctttgagttctcatacagcctcaattatgtgttagtcaactcaagcatccattatgtactcaataataggtatgacacagctctggacctcattaacactataagcagacaggcacaggcagcctgcatacactccttttcctggtgtcaacattatttaaaagcatgggaaatagtaatgagacagtgtcttcttcattagaaccttaggagtctactagatttcttcatctctatttgttgttattagtagccaaactgtgcaaaaaacacggtcttgagaaatgacagcacagtatcttagagggaaaggaaatgtaggatgccagtgtggggacaaatttctgattgccagtgattgttgtgagcataacaataatttcatgaacattaaagcctctattgagggcagctgcagttgtaaaggaaaaaaaatggtcctgaacatttaaaactacactggtgtacatcataatcaaacaaagtaaacagaaaaaaatttaaactttgctaaaaaaaaaaagcagaagcacttgatctttaggaaggcacgcagttgcttattatgaatcatttctagagtccgatgcattttcaaagccggttacagtcattacgaagcacacccttgtgaggtaagtgtatcatcacctttggttcataaataaaaaagctgagacgccgagcgattaagtcactcgcctaaggagaatgagtcaacgtcaagagtcatagttgacccggcctaaagactccagaccatcagtccagggcttagtcagcggggcccggagtggcttccctggctggcatctggacttaggctatttccgtgcacgtaaaagcggaatattggaacggttgcacagaacttccaaataatttttaccgccacgcaagatttagccctgaggtcttaatctcaggatttgggacagtaaaagctgtcgtccctccccctcgtccagccggtggcaagc

SEQ ID NO: 32449 - DNA, 2300 bp, Homo sapien
gtacgccaaccagattttacagtcggggaaggaagtgcctgtacttcctgtgtcctttaaatatcctccactggttacatagttcccattactaacttagtacttgttggatggtttctggtcagttctgtaaatgaacttggaattacaagtcctttgaagagcaataaagaataatagagaataaatagagaaataaaacataaaatttcagctctatatatttaggattggcaaaaacaaaacaaaacaaccacatacacacatacataaaaacctaatcgttaaatctttgaaatggtagaatctcaaataggcaaagacacattaatggtcataaaacacacacaacaaagtatatacaaaaatggagattttcctgaaactctgtgcttgaaaattataaagaaaaattgttgaaaactatgtaaaaaatggaaagaaactaaaccataaagaatagagcatccataagtattgtaaaagtatgagtcttggttgacaagagggagttttttttttttttttttttttgagactgagggagtgcagtggcgcgatgtccgctcactgcaagctccacctcctgggttcactcctttctcctgcctcagcctgccgcgtagctgggactacaggcgcctgccaccatgcccagctaatttttgtatttttagtagagacggggtttcaccgtgttagccaggatggtctcgatctcctgacctcgtgatccgcccgtcttggcctcccaaagtgctgggattacaggcatgagccaccgtgcccggcccgagttttttgattaacagaaaatttaataaaaatggaaactgttgtttaaaaaaagttttaagaacatcactggctttcagtcctataggtattttcttgccaatctcattgattttttgctgttatataacagcttcatgaaaataggacatctggccaggaatggtggctcatgcctgcaatctcagcactttgggaggcccaggtagggggaccgcttgagcccaggagtttgagaccagcctggggaacatagctagacgctcctgtctctgcaaaatataaaaaaattagctaggcatggtggcccatgcctgtagtcctagctacttgggaagctaaggtgggaggaccccttgaacccagaaggtcaaggctgcagtgagccataatcatgccactgcactccagcctgggtaacagagcaacaccctgaaaagacaaaaagaaaggaaggaaggaaggaaggaaggaaggaaggaaggaagagagagagagagagagaatgggaggggaggggagggaggggaggggaggacaggggaggggaggggaagagaagggaagggaagggaggggaagggtagggaagggagaggaagggtggggaagggtggggaaggggaaaataggacatctatgctgtctttttctcttcaaagaaggtaacctgacaccacttctaaccagcagaaaataacaacgcggtcaacagaattattttggatagtctaagtaacagtagatagtctctgtaagtagaaatccacttatccgtttattatcattttttttttttttttggaaatggagtctcactgtgtcgcccagactggagtgcagtggcgggatcttggctcactgcaacctccacctcccaggttcaagtgattctcctgcctcagcctcctgagtagctgagactacaggcaggtgccactatgcctggctaatttttgtatttttagtagagacagggtttcaccatgttggtcaggctggtctcgaactcctgacctcaggtgatccgcccgccttggcctcccaaagggctgtgattacaggcgtgggccactgcgcctggcctgttaattctatctactttaaaacctagtagagctaagcccactagacaaaagctttcattaatcacttctgatattcaggtaaaccaaaacatatgaacaggcaatggctttgagttctcatacagcctcaattatgtgttagtcaactcaagcatccattatgtactcaataataggtatgacacagctctggacctcattaacactataagcagacaggcacaggcagcctgcatacactccttttcctggtgtcaacattatttaaaagcatgggaaatagtaatgagacagtgtcttcttcattagaaccttaggagtctactagatttcttcatctctatttgttgttattagtagccaaactgtgcaaaaaacacggtcttgagaaatgacagcacagtatcttagagggaa

SEQ ID NO: 32450 - DNA, 2300 bp, Homo sapien
ccgtggggaggcaggtaagccccggcaagaaatccagcacagcactggtgggccggcactgctgggggacccggcgcaccctccgcagctgctggcccaggtgctaagcccctcactgcccgaggccggcggggccggccggccgctctgagtgcgggccgccaagcccacgcccacctggaactctagctggcccgcaagcgacgcacgcagccgcagttgccacccgtgcctctgccaccacacctaccacaagctgagggaaccgtctctggcctcggccagcccagagaagggctcccacggtgcagcggcggctgaagggctcctcaagcacggccagaatgggagctgaggccaggaggcaccgagagcaagcaagggctgcgagggctgccagcatgctgtcacctcgctgtcacctctcactgtgagcaccactgcactccagcctggttgacaggatgagatgctgtctcaaagaaaaaccaaacgacaaacaaaaagttgacatcatagtaactgaagaaatcaggtaagtaaattactttatatggtatggtgcagtttttatttaaaaaatattttatacatacatacatacttattgatttttttcttgtatacaaaagtatatgtatgtatgcatgtaaacatttctattacttgattttattacatcatttttactgcttatattgcaaaactaagtttttttttttttgagacatggtcttgctctgccgtttgggctggagtgcagtggcaggatcatagcttaccatatccttgacttctcaggttcaacagatcctcccagctcagcctcctcagtagctgggactacaggcgcctgccaccatgcccggctaattttttagtttttagttttagtttttgtagagacggggttttgccatatttccaccctggtctcgaactcctggcctcaaagaatccgctggccttggtgccctggatgccctggcctctcaaagtgctgggattgattacaggcgtcagccaccgctcctagccaaaacaaagttcttaaaaataaaagtagtatgagcttttctggtgtattaagtacggagaagttaaaaaaatacaataacaaagttcacagccttttgtgatcagtaaatgttagtttttcgctcttccctagtgacaaggaggcactcaagcatgagttacaacacaaccgacctggaatacagctgaaaagattgaagcaacaggttcgcaggggaaggcctttacagcttctttcgactctgacatttcaggatcagcacaattctcccctatttactgctgaagcaatcaactgggattatacaaaaaaattatttgtattgaatacctgacagttgtgttactattactagcactatcggttttgaaggggaggtggtggtgtgtggaaaaaaaaagtctggcaggagggagggcagatgtgaatcccagcccaccgtcccgttgacagctctatggctctcctttctgtgaatgagcggtggtccttaggcctcagacccgacaatgtcagtgagaaacagaacttaacccaagggactgttctccaaggagcggcgggggaatccaacgcagaggagcgcagcgccctctctagcctcctgcgggtgtcggggatgatcagggctcctgggtgttcgtcagtgaagacgactgtcttatctgactgtaggcacagagagtgcgccgcgagagggcggctcctcaccgtcaggcgccggcaggtcgcgttctctgctggccgacgcccgaaggcgccgaatgggggggccctgccgagctcccttacagccccaatgtgcgcgccgccgggaggcttgggcacgcaggcaccgccggcggggggcggggcgaagccggcggggcggggcaccagctgcgcgcgcggggcgggggcggggccggggcggggcgcgctgcgtggtcccggccggccctggctcctccccctcccgcgcccaggccagcggcgggcccagctcctcccccgactcggtctctctcccctcccctccgcccggcagttcctccctcccgccgccgcctcttcctcggtgaggcgctcttccagcgggcaggcagcatggcggccgtggagacgcgggtgtgcgagacagacggctgcagcagtgaggccaagctccagtgtcccacttgcatcaagctgggcatccagggctcgtacttctgctcgcaggtaggcgcccgctgccccgcggatatgccgccgctgcgggacccctcctcgcttctcccct

SEQ ID NO: 32451 - DNA, 2300 bp, Homo sapien
ttttgtgatcagtaaatgttagtttttcgctcttccctagtgacaaggaggcactcaagcatgagttacaacacaaccgacctggaatacagctgaaaagattgaagcaacaggttcgcaggggaaggcctttacagcttctttcgactctgacatttcaggatcagcacaattctcccctatttactgctgaagcaatcaactgggattatacaaaaaaattatttgtattgaatacctgacagttgtgttactattactagcactatcggttttgaaggggaggtggtggtgtgtggaaaaaaaaagtctggcaggagggagggcagatgtgaatcccagcccaccgtcccgttgacagctctatggctctcctttctgtgaatgagcggtggtccttaggcctcagacccgacaatgtcagtgagaaacagaacttaacccaagggactgttctccaaggagcggcgggggaatccaacgcagaggagcgcagcgccctctctagcctcctgcgggtgtcggggatgatcagggctcctgggtgttcgtcagtgaagacgactgtcttatctgactgtaggcacagagagtgcgccgcgagagggcggctcctcaccgtcaggcgccggcaggtcgcgttctctgctggccgacgcccgaaggcgccgaatgggggggccctgccgagctcccttacagccccaatgtgcgcgccgccgggaggcttgggcacgcaggcaccgccggcggggggcggggcgaagccggcggggcggggcaccagctgcgcgcgcggggcgggggcggggccggggcggggcgcgctgcgtggtcccggccggccctggctcctccccctcccgcgcccaggccagcggcgggcccagctcctcccccgactcggtctctctcccctcccctccgcccggcagttcctccctcccgccgccgcctcttcctcggtgaggcgctcttccagcgggcaggcagcatggcggccgtggagacgcgggtgtgcgagacagacggctgcagcagtgaggccaagctccagtgtcccacttgcatcaagctgggcatccagggctcgtacttctgctcgcaggtaggcgcccgctgccccgcggatatgccgccgctgcgggacccctcctcgcttctcccctgctggctcctcccgcccttgcggcgagtcgggacgcgctcctcctcttccccccggccgcgtttcctcctccccccacccgcgtcgccaccgccccctcctgcctcctggggtccctgggtcctcgggaaccgcgctgggctcacgcgggggcgggggcgccacccgccgcggccatgtgggctggggcggaagcgggctgtgcggggtcgcgtggccgcgctagacctccgcgttctggggccggttccccgcgctggggcgggggccgccaggtgtgcgggctgccggaggcaggtagcggcgccgggaaggagggcagcccgagcgtcgcgagcctccacatccgcagcaccggcggggctcgggtctgggcgctggaggcgccgggccgtccgtcgggtccctgcggggtggggggctgaagctacctgccgggctctgagagatgggtggcccgaggaccgtcggagtcgcagagaggaggaacgctagctagctccagccccacttctttgtgctttactaccgtgctttgacacttaagcaactttgggggtggggaagggagaggtctgtgtaattcattcttttctttcggtatataaaattattaatttacaaaactgtaagctaacgggatgagtcacctgtgactgaatttcccagagtgaaaaggacagttccattgagggttaggcgtgaatgctgtagtgtattttaagttttgtgcagtagagcaaacccagcgttgaatggggtccagactgaagcgtgtgctcgtgtttctgtttactgaagagtactagtgttgctgctgcatttcgagacccaggatgagggctgggcggcaatagtatggctcttagttacagtccaggtttagtgaagagaggcacatgaatattcaaatattaaattggtagcgtcctgtggggaggagagccggaataaagagaaggcctgattggggccctgcccttgccagttattgtgcgatcttgaattagtaaagttacttaatctttctgagttccagtgttacactgtacagaggggatgattatagctttctttgtaagtttcacaagcttcttctgagacccagattatccaaggaacgtgaaatgct

SEQ ID NO: 32452 - DNA, 2300 bp, Homo sapien
gcactgggagatgtttaggccaatacttggtctacgagggacttgtattccggctacttaaagtcttattttactatgtggataagagttttattttactatgtgaataagaggtgcagccagtatgttgacatcacaggcaccaaagagtgtcttctgtgtgagtagaattcttgcgtatatttcagtcagcacacatagattaataactgacacgattgtgtgtatggatatgattcttaatttttctgctgaactttaaacagaccgttccctcccttgtctttgcctttttcctgcctctttcctttacccctttctgaaaagaggcaaatgatgatcataaagttttcaaagcaatttgaaatattgacttgaaagcaattgatcagctttgtgagaaataattatttttgattttgaatttgctttgggattacttgggatctgttcttttagtaagaacataatttatttgtaacatctgacctcagttgggtaggttttactagggcttatgtttcatattttaaaatgggctttctataaattgatgtggtcagaatacatttagaaaagctgtctatgacctgttcttgttcgatattatgtaaaaacttagtatatgtttacatggagttttttcttccaagacctttagatcttcaaaaaggagttataagggttttgaatatagcagtaaagcagttgctttggtgatttaggttaaggtaaaagtttggtggatttttgtgcctggacttgttggcttggttttaaacaagagatattcaaagtatgctgctgctcattagcttgaccactgaaacattcctttccctccttctcctccttcctctcatatctattcctccgtctcccagaagatgaaaaggcgaagcgagaagtgtcttcctggactgtggaaggtgatattaatactgacccatgggcaggttatcgatatactggtaaactcagaccacattatccactggtgagtaaataaggtaataaaaacaacattccaattttgaattttccaaaaatgatactcgtaatttgttttccagtagtgaatcatataatcaggattgtgtttacaaaggaactcgaattttagctcttgagctcttacggtgcatcatttgggagctggtagtttggcaatcatggaagaagtgggaaaaattttagatgaaagaactaaaacttttaaaaagaagtgtagggtaaggtagaatagatattttgttgctggcatgatggtagtgtgtacagtcgtccctcgatatccatggatgattggttccaggacatcctcactccccatatagttacgaaaatccactgacgctcaagtcccttaaagtcaaccttccgtatcacagattgtgcgtcaacagatgcagaaccaggagatatggaggactgactgtattatacttttctaaaattattttattatgatatatttctcccttaatttagatatggcttttctgccactcttttgccttcctctattcttggcagataggacttggagtcttaatgtaagaattcattcaagttgaaatctgtttgtcacccttaaatatttaaattctctttactgatgattttctttttataaaaggaatacatctttaatctttaaaatttggaaaaataggaaaagcataacaaaatctccttaattctgcctcccagagataatgactaggaacatgttggtatatatttactttgagacatcattttattgttgttagcttgccaatttgtttggaataacatgggtgtcttgttattagtctctgtctaatcttaaatccttaatggccttggccactttccccctttctaaataccctgcaaaaggggtggcattaccactaggaaaagtaaagcataatcttaatgaaatatatatctgttataatatttaagatgccatttaaaacttctaaaaacttttgaatggacttctttctcccctcgttttatttatttttcgttggtaaatcagttttaactaactttgtttttagatgccaacaaggccagtgccaagttatattcaaagaccagattatgctgatcatcccttaggtaagctctgctatgttgattcttcatttttcaatttgtgggcttgatgactactgcaaagggaaggaatgcttttcttgtagaaatttttcagtgctggacttctaataaatgtgttttcaagcaccattagaacattgaagagaattaaagattcttgcccccattagaaatctacctacctc

SEQ ID NO: 32453 - DNA, 2300 bp, Homo sapien
gaaaccccgtctctactaaaaatacaaaaaattagccaggggaggtggcagtcgcctgtagtcacagctaccggggaggctgaggcaggagaacggcgtgaacccaggaggcggagcttgtagtgagccgagatcgcgccactgcactccagcctgggtgacagagcaagactgcgtctcaaaaaaaaaaaaaaaaaaaaaaaaagaatatgaagtccctaacacaatccttggcacagcatagctttgcaaaataagttagtagttattggtagcaacagaacaaacggttgagggaaaggagaggtgaactacatagagatataaaaaatggcctctgtaggccgggtgcaggggctcacgcctgtaatcccagcactttgggaggccgagatgggcggatcacctgaggtcaggagttggagaccagcctggccactatggcgaaaccccgtctctactaaaaatacaaaaataccgagcatggtgacgggcgccggtaatcccagctactcgggaggctgagacaggagaatcgcttgaacccgggaggcaaaggttgcagtgacccaagatcgcgctatcgcactccagcctgggaaacaaagagcgaaactccgtctgaactggcgggggaggggggggggagggaaatggcctctgtaaattggtgaggttggaaatgtggaaatgatcgtttttaaaattaaattgcagatattaaatctcatagtacaaagaatcagacactgcattagaacctttttcatttcaatgtgccataaatttcaactccacaagtcagattcagaatactaacaattaagttatgcaacataggaatccaaagaaacaagaatactaaatttgatggcctgctcccctttaaaaaatgtcttaatggagcctaaccttttccttttactgacaattctaagcaaaacaaagccccactctaaatccgcgggaaatggccctacttcaacatttgaactatagtaacaattataatctttcaccttctctgaataaagacactcagtaataaggaaaagcaactaccagtttaagtctgaaagactgtttagagtttatttctttcaaactccaatatgtttaaggccatttgtcttactagaaaatgtccaaaattgcaaaacattaaaataatcagcaactttagactgagtatgttattcgtaatttctgcctttctttactgtctaatttgtattttatgaatttgtcatagaggagcagacctgggtcggaatcccagctcgccatcgttggtgtgaccaagcacaaccaacctcaaacctcagtttttggtaagatggggataacacctcgcagaggtgtttgttacgtgaggactagagggaatataaatctcttggtatttaagtgctcgaaaatgtttctgaaagggacgtaggggtctttccaaaatacactccttggaggcacaataattaaggcgtaggctcaattatgcaacacaagcaacctaggagttagaagcacgggatctggctgcagctctgccaagtatgcaagctgcaagaatgacccagagcgagttacttaatttcgtgtaagaagcaatgcgtggccgctcctaagccatttccactgggataccgacctgaccagcccctgccccccactctccggctctcccacccccccaccccgttccgactgtcccagaagcagcaaagaaagctgcttcccaactgaagagccgagacaaagcttccttctctttctgcccctctgagccgctcgctgggggcccagtttcagaaccaagagccagatcccgtcttgggcgccgagcctcgcgcgcccccgaggatagcagcctagtcccatgccatgcactccctcccttggactcagggccctccgctcaacgggccctacctcgttcgccatgttcacggattctggtcggcgcggggggctgacatccggggtgggccgcgcagcgacggaggcatgggcgtggcgagcgcctagcgaggggggcggggcgtggggggggcttgcaatggctccaaccggaagggcggtgctcgagctgtggtgcgtgccgctaagttgtgcgttccagggtgcactcgccggcgaggctgcacggcgccggtttcattgctaaaatccgacggacttgttgcagaactcgttttttttgtcgggaaagggcttccccgtgtaactttacagcagttatcgtagataagacttgcaaattacagatgtggacggtgagggaacgggaatttcactgaaag

SEQ ID NO: 32454 - DNA, 2300 bp, Homo sapien
ccccacttcacttacagctctaagaagagttattaatttctcattttttttagctttttagttgttgttaggatggagtgatgacttctaaattccttacatgtcagaccagaaacctaaagtcttgcctattattgttaaacaaggcactacaaaaatgcaagtgtctctttccagaaaatagacaatatatctgcaatagggaaaagaaaactctctgccaagtcttttttttttcccactagaaattgcttgctgcattccaagcagaagtattgacatacacaaaggcctggaatcaagaaaaagcatagtccctttaaggaactacgaatgttccttaaatgttggtgtgaaatttggcaggagagcaggaaataaggatagaggtatatacagaaggaagtaattcagagcctgagtggcctaaagagtttggattttatccatttgttctcccttgaatatttttaaatagaagaatggtatttatttatttatttatttatttatttatagcctaactcattcaaaaattattgaaggaaaataggaaatggcattgattgatgttacgttttggaaagatcactaacagggcattcctttttaagtattagattcaagggcctggcatcaaagaaatcagatgggaggctctttcagtaatcctgtaagaaattatgaaagcctgaactaatacagcagcagtggggagagagaggcacaagaccagagagatatttagggcttggtgacaaactgaatgcagggaccgagggagagggagaagttgtgactctcatgtttctggctagggtaagtatgtggagagtgtcaacacacagaggaaagagtccctataaggagaaaatattaataggagttttaggagttgcattcgattgtgagatatcctaatggagacagaaatccagtaggcagttacatgtccaagtctggagtttaggggagccatcctgattggagataataatctggtagtcatctttccataaatagacgttaaaagccaaagtgtgagtgagagagtggagtgaaaggacggaaagactttggacaatcttaccatatgtacccggaaaagagccaagaaaaagactgaaagacagaaaagagcagtgtgtctgacagagctattttaacaaaattcagcgtttacaacagagtttaagagtaaactggcaggccaggtgcggtggctcatgcccgtaatcccagcactttgggaggctgaggtgggtgaatcacttgaggttaggagttcaagaccagactggcatacatggtgagaccaaccccctgcccccactcccaatctctactaaaaatacaaaattgagccagcgtggtggcgtgtgcctgtgatcccaactactcaggaggctgaggcacgagaatcacttgaacctaggaggcggaggttgcagtgacccgagatcgcgccactgcactccagcctgggcgacagtgcgagactccgtctcaaacaaacaaagaaagagtaaaccgacaaatactacattctctctctctacactctggcccactcttaacacaaaaaactgtccaggatcaggagactttttgttctcctcatctcctccttccaaagttctctgcccacgttctactgtctccccaaaatcctacctacccttcaggaactgctggaatgggagcttgggaagtttcagcaaactcctctctcctcctttgtggcccctttattcccaaagctgtgtcctctccctatgacgagtcccttgaggggctgtatcttactccttgtgtctccaagcacacataatgtgtattaggggaggaagcattcgccagtggagcacaaagctgttgcaggtctcttactggttctcaggcgctttcagtgaaattcccgttccctcaccgtccacatctgtaatttgcaagtcttatctacgataactgctgtaaagttacacggggaagccctttcccgacaaaaaaaacgagttctgcaacaagtccgtcggattttagcaatgaaaccggcgccgtgcagcctcgccggcgagtgcaccctggaacgcacaacttagcggcacgcaccacagctcgagcaccgcccttccggttggagccattgcaagccccccccacgccccgcccccctcgctaggcgctcgccacgcccatgcctccgtcgctgcgcggcccaccccggatgtcagccccccgcgccgaccagaatccgtgaacatggcgaacgaggtagggcccgttgagcggagggccct

SEQ ID NO: 32455 - DNA, 2300 bp, Homo sapien
tcgcctgagggcacagggggagggacaatgattgggatataaactccaggcattcgagccgggagtgggcaacctcctttcaggggcaaccccctttgggtcccctcccattgtatgggagctctgttttcactctattaaatcttgcaactgcaaaataataataataataataaatcttcattttttaagcctcttttactcaaatttctattattttcaggcaaaacaatctaattgatacatatggtacctccactgccacctccaaaaattgcagtagatcagacaatactattttccaaactactccagctacctgtcatagtgatcatgcctacctggcttctcctgcctcactacttagcctctaccaccccagtatctggtatcctggttgaaatcaggaagcccatctcaaccaaagcatcccctgccaacctacagggaaaaatgaaccatagccctcccccttgacaatttatttctcaatcccttgttggaaagtttattttctgggcttctctcaaggaacatagtatgggggttaggtaagcacgtagcacatgaaaaattcctccctacattcctctctctgtgtccttgtattccttcctttatattatctaaagaaatatctggcatctcaacttcattgaacatggatcatttttgagcttggatttctatctataaatagaacaaacaattttaacttctaatgttttttgagctagtgtgatcaatacagaatttctaataaaggcacccatcatgacccatttagcctgatctaaaattatgcccttccccacttgccctagcacccacagaattcattttcgcaagagttggtcagagtttggtcagcattcatcagcaaaatataatacatattattttggtatttaacacttctccttccaacttgcccccttactgcttagtctgactataattataggcctgaagacaatgagagatggaagtgaataggacatgaggaaattggcttccccttacagggacgctgctcagccaaggtccttatatgtcctcaaatcaagcagtgacatcctcatcagacaggcaaaagaaaatgtttcagtaggcaaagaaagatcagtggagactgggagttcaggataatctgagggacatttgaatctttcaatatatacccattatagtatttgagatcctattatttcccagtcaatgccctggttttcacctaagagatcttttgtgttcctatgaatttaatcagtgttacagctggaaacctacaggatcaaatttttaatttggcttctggctagtttaaccttatggcttcaagaaattatgtcataaaacatccttaggtttcagtttataccatgagccaagaacctgaaattttaagcttaccattctccttaactaaactgcccaacactttaatgaagtaaccacctaccttacagactttaaatagctcatgcactttaatattcttccatggcaataaccctattgtctctaaggccttgcctttaattcttatttcctttcaggaagtcagaggttttttttttattattaactgttccactcctgcatgtctagagctgctccacccttagagtcatctgaattatcactgccttcagcctaaaccaggtcagaaaattaatcccagattgacccatttccctggtggtctgttttctagtaatagtccaggtatttttttttttttattgatttcattgcaagtcacagaaatcaattcggaattattttaaatgataagtcatttatttaaaggatatcatgtaggtcatagaattattaggaggattagagatatacagcttgaaattatgtctaatctgaggcagcaaaactgatctggtcaccattttccttatccttgtacctcagaggctgcaaactgaatcaccaataccactcctggacacaggataccaccactggcttggctgccattgctgccccaatgaattaatcatgcttgcaacaacttcaccagagagtccctccgcagtccacagctttcaacttgaggtcttggacacatacttctttggtggcatctgagtcacatgtgtattacctggctgcgaagaaatattttcagactcataagatggagaataccccaatgtcagttatcaaaataattttaaaaaatccaccataaacttcctttataaactcactggttatggttttggttttggtttttcctgaactgaacgaaatcttggacagatttcatagctcttccagtg

SEQ ID NO: 32456 - DNA, 2300 bp, Homo sapien
aagccctcacattcaaatgcccaggatttactattctgaaacctcttctcccttctcctctcaaaacaattctcagcagatcctttgatatttatagaaaggaaaagaccatctttaccttcaaagaagtttatcaaagtgcagcacagaaggaaagaccaagaaaagacagatatcaagcattcagaaaagagtgttaattccaattgtgtttccaaggtcattattcaatttgaccagcatttagtaatcacctagtattttttcggggctctgaagtatactcttcaggatatgaaatgtaaataaaatacaatctctacagttaaggaggctacaggtaggaaacaggttgtcaaaaaaggcacaagtaacagaacatgagacaaaaatgaagcaaaacttactttgcttcatttgcctatttatgtataagcctgaagagtcatgcaaacacgagtgctacagagattcaaaaagggaaaagaccatatccaaatagaaagagtggggatgcaagataggaacctggagacacaccttaaggaaatataaggggttagttggccacagtagatgttccaatcagagcaaactaaaaaaaactcatgcattgcattggggaaaacagtttcaatagaacaaggagatggaaatcaaacaagttgagtgaaatgtggttagtgaaaaagtggaaacgagtataaattacgctttctaaaagtttaatagaacaactgaaatatttaagagatggtggaatactaggggactattaaaagaaataatgtagataatgaaaacacactgccagggaaagatagtaaaaatgtcattaaatttcttaaaacacatggaacacagaatacttgcatgcacgtaatatcaagcttcaagatatgtaaagtaaaaaaaagtactctcagaaattaacaaactcataataatgatgtatttttgtttctttttatttttagttattatttaaaataattttattgttatttattcatttttatttttaattttaatatgtacagaaagaattgtacatatttgtgaagtacctatgatacttcagtacacacatacaacgtgtaatgataattagagtaatcataatgatttctaaacatctctcagtagttaatagaataagcacaacaaaatcagtatgagctgactccagtacaggactggtgcttatccttattaataatcagatcaatacaaattaaaaacagaattagatatctttacacacgaccagattaagaagatttttaaagtctgccaattccaagcatgggtgaggatgtggagcaacgaggactctcatacactgctgctggtaggtgaagccattctgtgaaattccttggccttgcctattaaagttgaagactttaattccactcctagtcaaaaaatatttaacaaccagtacagaaaggaaactccatttctcacaaatggccatatacatgtgactccaggggagttctgacccacagcactggaggccacagccacaggaggtcagatggacactaggtatttatctactggggttccagggactactctgttttagggggacagccagagacccagaaccatcagggctggttgatggactcacacatcaggtgggacaaaaagagtagctccttagcagtgactaaataggggcccccagggctgcaacagagttgaaggggaacttggggatttgggatagtgactttttaccaagctgaataaaaatacttcaatattttgataattggcatggccttcatagtgggtactggctgaatatcagctctgaattttctttaaggcaactcaagcatatgtgcaaccaagtacatgaaaagaatttgtatgtaaccactaattcatcataagcaaagaggaaaaaaaacagcaaaaaggaaaatggatgaataaattatgttcaattcatacactggaatattctagagtaatgaaaataagctacagccacaggcaatgtgaatgattctcacatagagtagaggggagaaaaaagacatgaaacaatacatacactatgattccattcataaaaaggctttgctagattaaactattggatagagaagcttaaataggtagtaaaccactaaatatgcaaggaagtgattatcagggttgtgaaggagaagaacaggtaagttaaatgggcgattctgaggagtagaaatttcctttacttcataattatttgttaattcatctttatatgtttaatgggcttttctctattattttat

SEQ ID NO: 32457 - DNA, 2300 bp, Homo sapien
ctagccattgtccaaatcacagtttagcaaggcctctaagttctcagaaatctaggttatatacattttctctcagttcccagacagaaataaacaaaagaaataaagcaaaacaaacccaaaacaaacagaagaaacgaaataagaaaaataagaacagaaattaatgaaacagaagagaaaaatggaagaaacaagagcgctgaaaagttcaacaaaattaataaactaagaaaaaaagaagacacaaataactaatattaagaataaaatggcctggcgtggtggctcatgcctgtaatcccagcactttgggaggccaaggcgggtggatcacctgcagtcaagagttcaagaccagcctggtcaacataacaaaaccccgcctctactaaaaaaatacaaaaactagctggtcatggtggcggacgcctgttatcccacctactcgggaggctgaggcaggaaaatcacttgaacccgggaggcggaggttgcagtgagcagagatcacagcactgcactgcagcctgggcgacaagagtgaaactctacctcaaaaaaaaagaataaaacaatatggctgcagacactgcagacatcaaaaagataataagggaataacactattaacaactctacacagataaatttgacaatttaggtaaagttgatcaattcctcaaaattgcaaagtatgaaaactcatgaaataagaaatagattatttgtataaccttataattattaaggtaatttaatttataacttaagacatctcaaaaaggagattctaccaaacatttaaagaattaacataggttgggaatggtggcacatgcctgtaatcccagcactttggaaggccaaggtgggtggatcacttgagcccagaagctccagaccagtctgggcaacataatgagaccccacctctacaaaaaatacaacaattagctgggcttagtgacacacatgtgtagttccagctactcaggaggctgaggtgggaggatcagttgaagctgggaagttgagactgcaatgagctatgatcacaccactgcacttcagcctaggtgacaaagcaagaacctatctttaaaaagaaaaaatgaaaatgaataacagttctacacaatctcctccataaaatagaagaggtgaaaatacttccaagttcattttataaaattaatattactgtgacaccaaaaccaaagatggtgccaaaaaaagaagaaaactaacattaataactctcatgaatatagacacaaaaatctttaacagaatgttagcaaagtgaatccagtgactgatatataaaaaagaattatacatcaagtgtgatttttttccaggtatgcaaggctggttcaacatttgaaaattaatcaatgtaatctaccatatcaacatgctaaaaatgaaaaatcatatgattgtatcatttgacacagaacaagcatttacttattctctcttgtcttctagctaaaccctgcccactggtgttgccttttattggaaatgtattttatctccattcttcatcaagatccttgggccttgggtcaagacccaggtccacacacggagattttctagggtccaaatccaagttggtaggccctgtatgcaaattagtttcacttcctctgagtaaccagctctgcaaaccaaagagtgaggagctcttgataaactactagagaaaatctgacaccatccttatctgtcaacaaggggcctacattcagaaacctgaaagaattactcaagtttagagacaaatatgaccatttttgtattttgaaaacaacagaaaagaaatacttttgtacactctgttagaaattttaagtttggacatttaaaagtccaaatttaaaactcaaaaaaatggataataagaggggacctgtttgattaagggagaaaaaaatagtttgcattttcaccttttgtgctctttcactgagatgagcctatttcagattacacttaggaacttccatcaagcagcgggagagcctacttttcctgtttaataattaccagactacagagaaagctcaggacccagccttctgatctaccagtcgcctgtgtacctttgtactttctacagtgaaagttgctacaggatctccctttctcaataaattcatctgcggtggagaaaatcagcatgtgtactacaggccaagtaggtgcagtcttattctttatgttgtgtcatatctttgtcagtttgtgtgctcatctctttaccaacatctcatcacccagctagt

SEQ ID NO: 32458 - DNA, 2300 bp, Homo sapien
gtcctgataaacccattgcaagttgaaaatggatttaatacacctaacctatgaaacatcatagctcagcctagccttccttaaacgtgctcagaacatttatattaccctatatttggataaaatcatcttgcaatacagtacattgtaaagtcctggctgtttacccttgcatggctgactgggagctgctctggctgctggtgcctagcattgcaagagagtatcatactgcatacaactagcccaggaaaagatcaaatttcaaaatttgaagtatgatttccactgaatgcatacaccttttgcaccattgtaaagtcaaaagattgtaggttggaccatcttaagttggggatgtctgcattttgttggataaattttcaggtcacatttttgaggcttttgttacaatattgtcactttgccccaattcgcctcattagacatcatttgtctagcatccttcacagcctccatggagggagacagtgaagcagtttctctgctgaggactgtcaccttcacagtttacagctactgtaaggggagggtagtttgggaaggagggggtgagatagtaatttgggacaaggttcagcaattgcaggcctctacatttggagcttttctggcaacagcaatcccttagtcagttgtttacatttcatgtgaaggattttatatctgcaggtaattcagtaagtctctcagggtcctggccccttacactgcttctgtcttagcatacggtatggggacctgctctttctcttaggactttttcagacttttgctttaagacttgaatcagaacctgggctagggtgaagagacttgcctcagttgttctgaaatctggccaagagaatgcatttaggaggcatcccagataattatgctttatatagcaatgtattacatttatgggcaagatggtttaagaagatgggtacttggatggggctaaagggactgaggcttgttcattcctctcgctccttaggtaaccttctcccgcagtatcctggttcccatgctttctgtacccacgtgcctactcttgcaatctatacattgttcctgttcagcagagtttggatgaatacccaacagcctgaggagactgactgttacttgaaatgaaggagtgttcttgtttgaacgatcctgctcagaaggaccagcctgggcttgcatctcttgtagtattttactaaaccctgcaacagtagccactttttttccctgccaagttatctaaatgtagagcttcctgtggtctgagttttaagagattacaggtgataattaactaattatttgctttactatagaatctatgtataggtggaatcgaaggtggtggaatctttactgattccctgacccacttcactcagtgagttacatatttgagggatatcagtgaagtgtatcactatggtctacttgtttgcaacttacaaaaacccaacatgaataaccttggtatccatgggctcttgcttccaagttacaaaaacctagcatgcataaccttagagaaaaaagggaacattttgactgatagaaaccatgaaatgagcgaaaaacaaaacaaagaaagtgggcagaaatacaactgggagcagaaacttgaaaccattcaacttaaagaagactttccctctctcttatgtgaagtggtgtatgtagcatagtggttaagagcagagatgctagccctaatagatctgggttcaaatcttagctttatttctcttctgtgacataaggcaagaagcccaaaacttctgtgccccagtttacctatcaataaggtatgataatagtagtacccacctcatacatttattatgagcattaagagagttatcatatgacaaacgtttgaatttgtgcctagcacatagcgggacctatgtataagtgctacctgttattattatggtatctctgagaacattgatttcagttgttcaccattgacttgcttttgttatagagttaggaaatatggccaataaaaatgtttgattcgtaagtctaactgcaacaggagaattctgatctttccctcatcttaagtccaaagatgtaagggaggctctctttgctagcatgagtctggtgctcactcctcagccaatgaaatctcaccaaatttgtggagtttgggaagagtttgacagctactatggcagtcatgtggacatccttgagcagctgaaggtgggtggggaaagtcacagggcagattggttccattgtatatacagtgtctcttggaacctgag

SEQ ID NO: 32459 - DNA, 2300 bp, Homo sapien
cacaggagggttctctgtcttgtctacctgaccacagccaatcccactgctaatctgtaaacccttaaagaggagacatcggatcttctggattatgggactgctcatagaacagtgcctgtcctaacataaatgagcataagaattcaacaatcactcattaaacacctacagtatacatggagctaggtatagttgatgatataaatgaaatttaagaacatccctgactagaaatttccagtagaaattaggagactgatctctacactaaatatagagggcgacaaaagggaacagacccaaaaccacaggagagatgctagcatgacagggatgcagagacataaagcacaacagtgagatggagttaatatacctccacgagggtgaccttgtcctgcatctcaaattttgggtaggatttgaatgggccagagggacagaaaagaagagaaagagcatgatgagcaagggcttgaatgttaaatagattcctctttgggggaccagggagatacaagcttctaaagcacatacgccctgtattggagaatggggaggagtagatagatgagaaggttgaagccatattacgaagccttgaatgctgaacatcagatctggggctatattcttaccttgatacatttcagaagcaactgaaatcgtaggaccttccttgcttctctattgggtgaatgtttctcagtcttggtgtgagtctcagtgcctacgtagttaaagcttactgaaatgttccctttacaattctagagagatatgtcctttatgttgacatgttcatgttgacagactgcatctgattaaacagctgcctgtgcaatgcctccaagtgtggataaaagaaaaattaaactcataatcttggacagccatgtgtagactagttacattgatcaaagggcaatagaaatgatccagtgaggatttgtctgaatttcccacaattatttaaaatctacctcaaatacctgttcatctataatgcctcccctgaggccttcattctgaatagtacctctgtctctgtccccaaagcactaactgatccctgtgatagcgcacttcccagccaggctgatatgtagacttggctgcctgtgtatcttttccccatagactgtgagcttccttttatgaataataattgtagctagcatttagtagggtgctcctacctgttaaactctatgatgagtgctttacatagattatatcatttattcactaaacagtcctttaaaatggtgctatattcactaaacagtcctttaaaatggtgctatattcactaaacagtcatttaaaatggtattattcttcttcatcttacaggtaaacaaactaaggcaaaaaaaaaagtgaaataataagtgccagtacacagagctagtaaggaatagggtctgccaggtcccaaaaagcatgccatcacctttgccccatactgcctctggtacagatagaggtaatgtcttatttatcactgccatccactggacccagcttagtgcctgacacacagaggggctcagtcaatgctgattggtttgaggtggagcaaaaatgcttagcagggtgagcacctttgctgtgattgagtatctgattctctatgaagagaaggggagtcctgagccaaacacattcctctggctcctggctgtcatctttatttgcccggcttctttgctcttcctccttcctaactgcaccgtttggattcaaagctggagcttaatgcagataaagggaaaacagaactttgaatgaccactgtgggactaagagaggagaaacaagaaatttgacagatgaggaataaagtgaggagaagagaaaatgattaagctttatcactttaacttaatatttaacctaatgaaaacaaaatcttatttgaaattggaaaaatcaatgtattgattgctggttcattgccctcttctttatgatttgacagtctgtgaataatctaatgggtgtggcttaaagacctagatcatgtgtggaactggaatcgggtgttattcaagcaaaaaaaataaataaatacctatgcaatacacctgctttatgcacttgagcagggaagaaatccacaaggactcaccagtctcctggtctgcagagaagacagaatcaacatgagcacagcaggaaaagtaagcaaaaaatatattactgttggaactatattctcatcaatataacaaagaaagtaatacagtatttgatgaatcatttaaaattcatatctaaattagaaatgatac

SEQ ID NO: 32460 - DNA, 2300 bp, Homo sapien
agctgagaattcacaatgaaaagacggagtagggtcttcctcttttgattccacgttgaactttctcctggcactcaccacttcctgcttcacaggagggttctctgtcttctctacctgaccacagccaatcccactgctaatctgtaatcccttaaagaggagacaccagatcttctggattatgggactgctcatagaacagtgcgtgtcctaacataaaggagcacaagaattcaacaatctttcattaaacacctattgtacacatgaaactaggtacagttgaagatttaaatgaaattcaagaacatctctgaccagaaatttccagtagaacttaggagactgatctctacactaaatataaaggccacaaaagagaatgggccctaaaaccacaggagggatgctagtatgacagggatggaaagaagtgaagcatgactgtgagatggcgttaacatatctccacaagggcgaccttgtcctagatctcaaagtttggggaggatttgaatgggccagagggacagaaaagaagagaaaaagcatgatgagcaagagcttgaatgaggaatggattcctctttggaggaccacagagatacatgcttctaaagagcataggccctgtattggagaatggtgaggaatagttggatgagaaggctaaagccaggttatctggggctatcttctttccgtcatacctttccaaactagaagcaactaaaatcataggacctcctttgctttctattgggtgaatgtttctcagtcttggtgtgagtctcagtgcctacataattaaagcttactgaaatgttcccttggcaattttagagaaatatgtcctctatgctaacatgttcatattgacagactatatctaattaaatagttgcctgtatagttttatgacgcctccaagtgtggataaaagaaaaatcaaactcctatgcttggaaagccatgaggatactagctacattgatcaaagggtaatggaaatgatccagtgaggattttgctccatttctcacaattatttaaaatctgccacaaatgcctgttcctctacaatgcctcccctgagtccttcattctgaatagcaactctgtctctgttcccaaagcattaactgacccctgtgatagggcacttcccagccaggctgatatgtagacttggtttcctgcgtgtcttttcactataaactgtgagctttctttcatgaataataattgtagctaacatttaggagggtgctcctatctgcaaaactccatgatgagtgctttacaaggattatttcatttattcacaaacagtcctttaaaatgacgccattattcatcttcatctcacagataaggaaattaaggcaaaaaaaattcagtgaaataataagtccaagtacacagaacaagtaaggaactgggttggcctggtcccacaagccatgccatcaccgctgccccatactgcctcttggcacaggcagaggtcatgtcttattcatcactgctactccactggacccagcttagtgcctgacacagggaggtgttcagtccatacatactagttttgagtggagcagaattgccaggcacagtgatcccctttgctgtgactaattgggtgtctgattctctgctgtaaagacaaagaggctgctctctctatcctacttcgtttttcctgttttcttactcttcttccttcctcgccaccccatgtgcattcaaagttgcagcttagtgcagacaaagggaatacaaggcagaacgacctatgtgggattgaaagaagagaaacaaggaattccagaggccgggggggggtgggaagtgaggaaaagagaaagtgattacaatttatcactttaacttaatatttaaactaatgaaaacaaaatcttatctagaatttggaagtcaatattttgattgctggttcagtacccttttatctgttttgacagtctgggaataatccagtgggtgtggcttaaagacatagatcacgtgtggaattggaattggatgttacacaagcaaacaaaataaatatctgtgcaatatatctgctttatgcactcaagcagagaagaaatccacaaagactcacagtctgctggtgggcagagaagacagaaacgacatgagcacagcaggaaaagtaagcaaaaaatatattactgttggtaatatattctcatcaatataacaaagaaaggaatacagtatttgatgaataatttaaaattcatatctaaattagaaatgatatg

SEQ ID NO: 32461 - DNA, 2300 bp, Homo sapien
taactctgcttctacaagagtttccttattacctactgaatacccattgtgtctttttcccttaatcaccctggaggaaacatctattgtcctgttctgagctcctcctagatctggtaggaactttgtatggtaattaattaagatttagatcccctgttaggaaacttgttggtttaaagatttttgataggaaggctacaggttgtcagtggcctcagtgctgtcgggctactcccttgtttacactgacaacaaaatggtattggagtgttatagggttacagagaggaccttcaattatcaattataggttttaaatttaccctggcttttaaaggaatagagtacactattttttctttactacttctctctttctctttgacttcttctttgtctctctctttctgactcccttttttgtctgtctctccctctctgtctttgactttgtctcttactttctttctctctgactccctctttgtctctcttcctctctctgtctctctctttctgactccctttttgtctctgtctcttcctctctctctctttctgtctattgagaggtgaagccagctggacttctgggtcaggtagggacttggagaacttttctgtctagctaaaggattgtaaacacaccaatcagtgctctgtgtctagctaaaagtttgtaaacacaacaatcagcactctgtaaaaatgcactaatcagtgctctgtgtctagctaaaggtttgtaaacgcaccaatcagcactctgtaaaaatgcaccaatcagtgctctgtgtctagctaaaggtttgtaaatgcaccaatcagcactctgtaaaaacggaccaatcagcactctgtaaaatggaccaatcagcgctctgtaaaatggaccaatcagcaggacatggggtggggggggccaaataagggaataaaagctggccacccaagacagcagcagcaacccactcaggtccccttccatgccatggaagctttcttcttttgctcttcgcaataaatcttgctgctgcccactctttgggtccatgctacctttatgagctgtaacactcatggcaaaggtctgcagcttcactcctgaagccagcaaggccatgaacccaccaggaggaacaaacaactctggacgtgccatgtttaagagctgtaacactcactgtgaaggtctgcagcttcactcctgaagtcagtgagaccatgaagccactgggaggaatgaacaactctggacatgtcacctttaagagctctgacactcactgcgaaggtctgcagcttctggacacaatactattcattctcaccttaaagacgaggaaactaaggcaaagaacagtcaactaataagtccaagtatacagagctgctaaggaatagtctgtctgatcccaaaggctgtgtcataaccgcttccctatactgcctctcagcagaggtaagagtcaagttttatttatcactgccaccccatcagccccagcttagtgcctgacacagggagatgctcaatcaatgctgattgttattgagtggactagaaatgcaaggcacagtgagcccctttgctgtgactgatggggtgtctgattttctgctataaagaggagagtgctgtatcaaacacactcctctggctcctagctctctctgttccactttgtttatccaatttccctactcctccttcgtaactgcaccatgtggattcaaaattgcagcttagtgcagacaaagggaaaacggaattctgaatgaccccaaagggaaaactgaactctgaatgacccctgtgggtttgagagaagagaagcaggaacttgagagaggaggaagagagaaagtaattaaaatgtatcgttttaacttaatatttaaccgaatgatagcaaaatcttatctgaaattggaaaagtcaaggttttgagtgctggttcggtgcccatttctttatgatttgatagtctgagaagaatacgacgggtgtggcttaaaaacctagatcacgtgtgtagttggaattgggtgttatatgagcaaacaaaataaatacctgtgcaacatacctgctttatgcactcaagcagagaagaaatccacaagtactcaccagcctcctggtctgcagagaagacagaatcaatatgagcacagcaggaaaagtaagcaaaaaatatattactgttgataatatattctcttcaatataacaaataaaggaatacagtattaataatgaataatttaaaatttaaaattcatatctaaattag

SEQ ID NO: 32462 - DNA, 2300 bp, Homo sapien
atctgctactgattatgaatcaggcagtatacttcagtgctttctgaccctcactaccagtcctcaggacacccatgcaatgtggttatcattagtcttattttatgaatatggaagctgaagtcatacatattcaagcaaggctccaggccctgaaccaagtgactctaattccaaagcccatattcctgtagtacacttttcaaagttcctctaagttcccctgtatcttgacctgaggaaattacagttgcatgggtgctttgaggtaatcattaaaggcttttgtaaactttgggagtaggaccaggctcacagtaactaggagattgagtaccctgagggttctggccccagaatttcatagaaatatggtgtttagaagaaagaagtcatctgttaaattctctaaacctaaaattaagacttagctgctatatatccaaactgacccattttttttattaccttccaagattcagcttttggcactttatcatccaatcaagtttcatggagactggattaggaccataagacttattcagatattaagcctcacatgatacattattttttgtaaaaaaattttagattaatatgatacaaagttttgccaagcccttaagagggagtttatcaattcagcgcttttgcatttatgctgtcaccacccatgtttgaactcattttcttttgttcataagtaaacaagtttttgtttgaaagtcgagactaagaatacctgtccttgtccacacctgtttaactttgtcttatagtgccagcaaacatactggagttcttcagcactactgctaaagcaatggtgcttactcacaagccaaatcaactggcaatggtttttcctggtggatttgatttggttaatgagttgtagtaacaaattctaattacaaattctgaatttgacataatatatgttaaattggatgtacatttactatgttatattgaaagagagatgtgtggaaaaaatgtatacttatttttgaaaagaaacttttgtttgtatctgaaaaataaactcttagcaaatttcatctctgggttgttaagagtccaggttctggacttcatagcttgaacagctttgtctgaagacttagaaaacctgcttcactggatcacttaacaaaagtaaaatatcctttgtgtaaagttttcttggaggtgatggtgtaccagtatgctgaccatctggtgtaccagtatgctgaccatctactgtcaaaaataacatctatactggacattctcctatcaaataatagatccagaagcttctggagccattgcaacttatattaagaaataatggtctgtaatggttaaacagctactcaagaagacctaggtacttgcccaagtagatgaaaaccctctggcattcgatagccagtatgcaggctggatttcaatttctcttgagcccctgcactgtgttacattggtgccgtaaacaaactgtacaaccatatgaggcaactctgtggttaatgggatttggagtcagatgataatttctctaagtgcagacacagaaagtttcacttaactttctacacctaaaatacttagaaaccatagtcatccatattgatattttatatcatctcaacttctcttgcccaaacttgacctactgttgcaattattttacatttccttggctctgttttcatttatatttaattccagaaaccacatcaagtctttgcagaatgaagtagagcattaagaagtagagatgtacacacgcatctctaaaatcagccatgcctaggcaaagcagcttgcacttaaacacccaatacatttttcatgattgtgttgaagtgaagtaacctaacccgtttttatatccttcaaaataaggtggataggaatgctttcagcccttttcaatagctttgattatcttgtttttgttagatccctcctcttggtttgatcatagtagttactgtatttctttttataagttggtctgcaaagggtagggcttgcagaccattgcaaagttgtgacggctgtgagtcatattgctgaaggtggaactctgaagccagactatctatgtgaaggcacaagctgctgttatatacaacagagtgaactgagcatcagtcagaaaaagtctatgtttgcagaaatacagatccaagacaaagacaggatgggcactgctggaaaagtaagtggaacatttctgtcccctcctcatcatgacctaatgatgtgaggctgatacttagaactttgaatccattaaagta

SEQ ID NO: 32463 - DNA, 2300 bp, Homo sapien
tggtgaagccttgtcttagtcaaattgggctgctataacaaaataccctagactgggcagcttagaaacaatagaaacttatttcttacagttatggaagctggtaaggttaagaacaaggcactggcagattgaatgtctgctgaggggccactttctggtgatagatgtccccttcttcctttgtcctaacatggccagctcatgcaaggagacagagagggctctggtgtttcttccttttcatgtaagaacaccagtcctataagattagggtccaacccttataatcttatttaaacttaatcatctccttgagggccccatctgtaaatacagtcacattgggggttagagattaagatacgaatttgttgggggacacaactcagtccataacaattttcaaaatatctgtgggcaatgaaaaacctgtggatttcctgcttatcatgaccccagataagtttaaaaatcactaattaccattcataaatatatgcacatattccaaaaaaactttccatctgttttctttgctaaaataatagagtatccaaggcaacaaggatacctgtgctaccctgagcagtgcagcagagcaacctctgtctttttgattctgacaaaattaatgcaaacaagccagttgtatcatttttttcctagtaatgagacaggaaaattccccatggggcttcataaatggaaaataacatagttacatagccaagtacatgtttatctctagtgaccctctctaagggaaagcacagcacacagagtgtagacttctcctacccagagttaggtattaatgtcaggatctgtggttgagattgctttttataacccgatttatactttctccctctcttgttagagcccctgttttagaatggggtgtcaatgtgccctgttaagaaactacattttctatcctttcttgtagctataaatcatcaatgcaacatagattattgtctgagactcatgagaaggctcttacaaagagagcagatagctagcatgtgcccttgtcagcccttacctccccaaccttcctcttgtttcctgcttggagtacagatttgatatgtgcaaatatagcagccatcttggatgactggaacttcaggaaccatcttgaacaagggataatttcaaaaatggaagcctaatattaagaaagatggacctaaaacatagatgaagccaaggtccataatgatgcttcataaagcttccataccaaccctagatggttgaactcttccatgtgaggaagaaatacacatctatcttacttagaacactatttctgatctctgttattagctgtgtaataaagtttctcaactgatacaaagtgaaaactaaaaatctcagaatacaaaaattaccttagaaagtcaattagatctcccataaaattccccataaactacagtaaaacagggaggcataaggcataagaatgggttataggcaaaggcaattaaacctttaattcttgggccagtcaagaaaacagacaaattaggctctatccttgcattgttttaagctagtatttgcctttcagaaattgtctatattgctcttagagattgtaattcagaaattcaaaatcatgtgtattctgaaaagtcttgtgaagcaccgcatgtacatgtgtgtgtgtttctctatgacttctaattaacatttcaatattttttcatggctattgaacatgtcatcagcacagacatcctgactaccaaagcagtatattccattcacaactattagaaactccttaaaagcatgtataccttctccccgttggttttggattaagctatatttggttatatcataattgttctttaagcagaattgtgggaaaaattataaatttgatttatattgctctctgttttatttttcttctttttctttctcttgcattggatttaactctattatatgtccaaaattgaggaaagccatttgtggccacatggttttgtcaagtgggtaactggaggtctgagaagaatagtgggtgagaggttctagaacttagatttttctaaggaatgttaccacgttgctaagctatgtaacatatcttaacaaccagggagccacacaggctccttggagtaagagtgtgagaaactggatgaagacagctgtattcttttggaagcgttcgagattggtctgtctctaccaactaaaaacttctagcttaagtgcagagatttaaggagatcaacaaaaactcagtctagacatattatgaggctggg

SEQ ID NO: 32464 - DNA, 2300 bp, Homo sapien
ggtctgagaagaatagtgggtgagaggttctagaacttagatttttctaaggaatgttaccacgttgctaagctatgtaacatatcttaacaaccagggagccacacaggctccttggagtaagagtgtgagaaactggatgaagacagctgtattcttttggaagcgttcgagattggtctgtctctaccaactaaaaacttctagcttaagtgcagagatttaaggagatcaacaaaaactcagtctagacatattatgaggctgggagggtatcaacagacttgagttcttgtcagcaagatcacctgcttttaatattgtcctcaggtataattttaaattcatcattacaataatgttctaaaattttaggtatgatttagttaatagtcctcaagttcattcttttttcaagagtatgtgaaagccaaataagtctgttttaagaaaatgaaatacacattgttttcttgttgactttttttttttcaaaatttaaagtgtatcactaccctttaatctaagagaattgatgtgggacagacacatacagaataactgaataatatcagctaacatttaagtcaatttcatcaggtaatagacaaacagactgaaatctaggcaataaaacaattaatctgtggtcactttgctggttaatggcaaatctgggaccatgaatcctatctttaaatttctggtttaatgtctttttcactctccaaattgtctgctgtactcttttcccctcaatacaagtaaaaagcaaatttactggcttaattgtacaaaaggtcccacaccaaaagaatgagtaagtctaaagtgtgatttaaacaaagagattagaactagctcctcactgtgatattcataaacagcaataagaaaatatactttttattgctagatagatattttctgcatttaatgtctacatatattttacccaacctaggataattttagtatttatatatatcaaactgaagttcctgaaaaccagatattctgtggcaacaagtctgggaatttatacaccatacagtctaagtatatagcatgaaacacttaaacatagattgctttgttctaaaaaggtagtcaacgatctaaaagcatccatcccaacaaaatcctgagatcaatttctagaacatgaacattttttgacactgcaaattattctaacccaaaaagtctctgccatggttataaataaaatgtgtatttcccaattctgctacgatgaataagattttcatgtaagatagaaaaaatacaacaagcaccagaaaatcatccttcttagatttcaaaagcatactattttcaagaaaatttaaataacgactttctatgttcttaatccagaaatgttctttctcacatggttgtgaattcaccaagatacataacattatctttaatctcccaggtctatgacaccataggtgtctaaaaatgttaactgttactcaatattgcaaacaacaacatggcaaaggttctctggtttatcatctccagatacatcactcttttggatttttttccttctttgggttttaccattctctccgaagatgatatacattttaagatgctgggttttaaaagtacaatatgaagggacttaacttaaaattaattcaatgtaaagtgcatttgtgagtattgtatttaaaagtcatcatttaaatttactatatcaaaattgataatcatgtaattttttttggtaagtcaacaaagtgagctcaaatgaaattaaaaacagaatatactttatactttttacaaatataatataaatattttgaaatcaaacactttgattttcccctgggtaaatgttttagatccacccatgcctatacttttcaacgtttacaaaaatttggtctgaaaacaaaatagcctcacattgctgtaacatgagaaacaatttagttcaagcaaagaagatggagaaatgtttgatatataagaaagtgacaagaaactcttgtcagaatgtttgtcattttgtgatttcagggtctgagcacatctggaagtgaggtcaatcaagttagaccccaaaaacttttgtgacaacagtgaagaggggaaaataaacacaccacaaacatgaacctcaaccccccgacatctgctcttcagatcgagggcaaaggcagccatattatggctagaaatgtaagctgctttctagtcaggcacacccctcatcccagaagagtctgccacatcaaaggtaaggtgacttaaggtcctagtatgtgtctcta

SEQ ID NO: 32465 - DNA, 2300 bp, Homo sapien
catcagactgactgaggcaaaatctctgcagtgggacttgagaatttgtgtttctgacaagttctcaggtgatgctgataatgctggtctcagcactactctttgagaatcactgcactgatcaatgctagcaagtaccaatgtgtgaggaagtctaatgttttaaagtaggaagcattctggaaatattacctttccccaggaattcaacactactttttaggcaattgagaagtgtttagaggcgatgggtctttagttaccttccaattatttttccttttaaagaatgtaacatttaataaactatacaagtaataaatccttattgttgggagaaagaacagatgaaccagaaagaaaaaaagagatgagacagaaaaaaaataatcaataaaattaccacagacatcatttcagtgaatactttggtgtatatcttcctagatatgcttgtaactatttattacctattagtctgtattttaatggaatcatattacccttcttatttttgtataggtatccttatatctttggcagcagcctgtaagactggctactgtactcaatattttaaaactattccactgctattcagggacaagtgcctcagtgagttaactactctgggcactctacagtatcacaggtcaacagaaactatgttaaaatgaaccaacttttctgcagaagtccttactcccacataggtaactatccagaaaatagatgaccagtctttcatactcaggagctggatattcctgtgtttctatccaacatgataattgcaaccttcactcctcccacccttttttgtcttttaaaccagaaaaagagtgggtctcagctttgattcattctgagcttgccgagataaacctgttaactcatcacagaagaaacacctcaatggaaccagcagcagagactgggaagccacccacagttaaatcaccacccacagttaaattgcccccaaattttactgcaaaatcaaaagtgctgaccagagatacagaaggggatcaaccaaccaggtaattagatataatggccccctagagggagggcctatggcacatgaagactttgaattctcttgttatttatctttcaaaatgttaaacaggaggttctaaagctccgctttattcagtaagtgactgcaatatatatttgctttcattttcatatatgtaatataagaattgttctcaattctattgtttagaacattttggcagaaactatgtctttcttatctggtaacctttctttttaagaaaaattatttttccactaagggaaaagcaagagtggctacctagaaatctaagataataaagatttttatagtttaactaaaaatagatgcaattaaggaaaacaaaattgtattgttacagttattgtatattttgttaaatgtgtatcacacaggtttcacttttttgtgtagaacaatgcaagattaaaataaattgcttcacttaatttcctctgatttactcctggggccccctagagagaaaaataactactaaaataattgaaattattgcaggagaaatttttcttaaatgctgttatttcaataacagaagaaaaatatatatttatgtagaatcatggtgaaagaatgtgtggtaggatgttatttaagctaggagagaaaatcttgttgctttaaaattaaaagttgagtaaagcttaaagttagaggaaaaatacatttttgaaaatataaatatgtcactttaaaaagcattaagacaaaaaaattgtattactaactgtccgtatcttaaagtttccataaaatcagaaactagaagatagtaagagttaatctgtaccttaatgactaacatatgatacaatagttaaatatttactcaaagtaagaagaatttttcattgggaagtaaatttaatactgtatgcattaaaaaaaacaaagaattggggtagcatatttaagatacatatacactgaacttattgatgacagtgtagtctatagaaaatacttttttgtatctgtgaaattcacttttttctttctccaactgatctagagtgtcaagtcaaggatctgaagaaaacaaggaagtaccaaaaggttaagtacagtttttggtaactattgagttggtataaagaaaccagtaagtactaatgactcagggaacagattttaaggatcagtgcttttaaaaaaacagaaaaatacaatagtaatttccagatcaattcttgagagagcatctgcttactttctcataaagataaat

SEQ ID NO: 32466 - DNA, 2300 bp, Homo sapien
cggggtttcactgttttagccagggtggtcttgatctcctgacctcgtgatccgcccgcctaggcctcccaaagtgctgggattacaggcgtgagccaccacgcccggcctcaaaacctatttttcttccagtattccctaaatgacccggttaatgttactgcattcctacagttgtccaagttagagaagcccttagggttattatctcctccttcttcctcattctatccacagcttttcagtcatgtgcaaaactatgacacgcttaggtctttgctttcactgttcccaatatcttaaacttcttcacttttctgacacctgtacaactcctacttactttccaagatgaaacaaaattatttaatctccaaaactatgtcctctgcctcaaggagcatttagttgcttctttcaaagtacaagcatctcaagtacatgttgtatggtatttatttactgctggctcccctattagattaaggattccttaagcacagagagcatgatttcgtcatttctgtatcaccaatactaagacaaaacgcatagaactcgatacatgtgtcaaataaataaatacataaattttacaaatcaatgaaaatattgtttcacatgatttcaccgtcttaaactttctatatgtttcaattttttgttaaattgacttttgctggtgctcttttggtgcttactttggattaataatagaatcattttaaattttgcaccaaatgactacaaagttaaatgtctatgtcaaaagaaaatttattgacttcattattagaatatgaagtggttttttttgctttaaaactttgtttaaaatatctaaggaggccaggtattaactctgaaaaaactgtataattatttataaaacagatcccataggagcaactgaacagctgtggaaagatttggcacatcactttgccagcctgaatttaatgacctacatgtgaagggctacatatccaattactaatcctccctcagctactctttgccctcatatggaggcagctgaaaaaagatgccctactaacagatcagaagtggatccagacttttttgccagtgctcagttaacaaagatcttttaggtttgagatgaggaagaaacagaagagggactcacaacagtgttatagctgatacagtgtttcaagtaaaatttaagggcttatggcaagagtgactttagttttgtaactaaagtcaaagaaatttcggctcttttagagaatctcaaattctggatttaattttctattcactgaagcctttaaacatgttcaaatatcttcaaggataatttacttcaaaattctttctatatgagaagccagtcttctattcaagatgcaaacctcattcttaccttcaaattctgcaataatcacctattagaagtagaggagaaaaaaactaaatagaaaatgacaatctacggggttgtatttcatttctctctcagttgacatgatctatatatagcaaaagattatataaggtcaagtattataaacaatgaaatgtcatctgatgttttgcaaaacagcataggaaaaatagctcaaggaatgaataaagagtaaagctatggctgttttacttcagccataaaaaagccttacagattctaaatttaaatgcattttattgtgaatctgactcactttttgaatttaattttccacttgagttatgtaaaatcatgtgatatggtaattttctgtataaattaaaaataatataggcaagagatgtttttctctcattttcaacacagaaaaattaggagcctttcttcgttgttttgcatttttaacagtgggactatcttaattccttcatccaatactcacaagaatatatgaatgaatacacgtctgcaggtacacacttaattcttgaacgggaaaaaacagacatcactgtaactacctcccactcccaaaacactaactccagaccccgccccgcataaacccctcccctttcttccattgcgggttcgaaatggccgcagttcgatgacgtaagacgcaaccgccgtagcctccactgcgtaactaccgcccctgcctctgggaattgaagtttctgtggaaggaagcgtgagccgtaaccaggccaacccagaaaggctttctttctgagatttcacttccctgtcaactcttcagctcggtaagtgtcctggcactggttggcgctcccccgcactatggtattctctggacgcaaaggggcgcgtgccatgcagccccctactagcaacaagg

SEQ ID NO: 32467 - DNA, 2300 bp, Homo sapien
cagtgtttgctgtggacgatcaacagtaacagaagagcatacttcttcgatacacagagtttactgaatttggaaaggctttggcattcttatgtcatctgtaatgaaacaatctccagaagtcttttctaaaatgtccttgtaaaaagaaaaaagttatgtttatattttataaaaggatgatgttatttataaccagcagaagcagccttatttgaacatcttatgttgaaattgctacttaatacagtgactcataggagctttctagtggaaatcaaatgctcaaatgaaatagaatttagtttgttaggcaatagtgatatgtcttttattggttggactctggaaaacacttgacaacgaatagtactttacccgaagggcacgtatcatgcaccacatagcctaaccacaaacattaaaggtcttgtaactgtgagcctcaaatgaaaatacataaggacagctctcatacaatcaaatacaatacaaactagcttttaatttaaataaatatgtaagtaaagttcaagtgactataatgattttatatccctatgtatgtatcacagaaattgtggcaaactgtagaaatctattcaaatggaaagtaacaaagcactttcacattgccttgtattcaaaatccctactcttcataaaaacttatatttctttaacaaagctacttttctgtttaactcccggaaaacttcgtatttataacttaagggggtttctccaaccaaacaatttatttttgctaggtactatagctatattttttatacaaaatttgtgacagcaaatgaaattctaatcccaatagaagaacaaacaattttcatgtttcgatcttcatatatataattcaagaggaaatatgcttaactttgtagatttttacattttaaattgcattgtgtctgtatcaagtctactatcttttacctagattgtctggaagatttaagctcaaggttacggtttgagaaaagggttttgagagtgaccaggatagatttaagaattcattttatactaaaatatggccataaatatttttaaatacattcaaatagccctttgctggcacattttttcccttctttgccaaaacattcccacaggcggcctaagtcacctcattttataggtttagtaggtttagcaggctttatgtgctctagtagggttagtaggttttgttcatatcaggtctctctcatgggagtttccagggacaaggattgcttcagttagtatggccttagccatactagggtatttgctttaattctacagaagttttctaattaatattctgtagcaaaagaactaagatctggaattccccctcttaatctcttcctagaaatgagattcagaaaggacaggactgcatccagcctgtttgggaactcagacaaatgtgtgttgtcacagacacaaatagaggtctactatgaaataattggcttgctagtgtgctaatgacagacaatgctgatttgctccaacctcatacagtttcacacataaggacaatcatctatgtttcatgaaagttctatctactttaacattattttgaagtgattggtggtggtatgaattaacagtttaaatttaaatcctaaaattcagtgtgaattttttataatagcataaaaattcaaagatgtccatacaagaaaaattaaaatttggttaggtttagcagagtttgagaatccttactaccctcccacatagtattgtaatgtgaatataggcagttactattacaggcataatgatgattatgtattaagcagaaagaagtatcaccaccagtttttttctttgaatgcccctcagtacttctgcatttataggatggtagactggtttggtttagctctcaaaagtgaaaacatttaaagtttcctcattgggtgaaaaaaattaaaaagagtgagagactgaaaactgcagcccacctacgtttaatcattaatagtgagcccttcagtgaacttaggtcctgattttggagtttggagtctgacctttccccaaagataaacatgattgttgcaggttctgaagagggtcactccctcactggctgccattgaaagagtccacttctcagtgactcctagctgggcactggatgcagttgaggattgctggtcaatatgattcttcttgctgtgctttttctctgcttcatttcctcatattcagcttctgttaaaggtaagtttgtgttgccttttgctaaactttaatttccatctttggagttggag

SEQ ID NO: 32468 - DNA, 2300 bp, Homo sapien
gcccgggccactgccgaccagctctacatccagtccaagaagtctcagaccaaggccttggagttcgtggtcagcaaagtcgagggggaaatcaaacatgtggagacgcccctgtgtttccagaagcaggtccagacgggctcccgcgtcgtcacccttttggagcccctgaatgtacgcagtgagagcaaagccagctcggcccctgggcccggcagggccaccaaaggccccggcaagggtcccgggtcggcatacacggacgacggctccgagacctccgagggcagcaagcccacctcccgcgccgatggcccccagaagtccaagttcgcctccagtctgctcaaaaatgtcatttccaagaagatgcagcgggaacacgagttcaaaatggagaggggagaagtcatggatacatcccaccacctctcaggcacctccaaggagacggagggcgcccgcgggagcgagaggcagcgagagaggggcctgcagaggcagagctctcgtcactccgaggccggctccgagtacacagtggtcagcatgtccgacgcgggcggggaggggtccgtggcgggctccaaatctccagtcttcaaagccagtactcctcgcgagcgcaacgcaggccctggccggaatttcaccgatggacacacagaagtgtgtgaaattaaaaagagtgcctcagagaccgtcaagggcatcttcctccgtagtcagaacagtgcgttccggtcatggaaggagaaagaggccgagaagagggaggaacaagcccctatagggaagctgaagctgcccaaaggaggcgactggcgggctgatctcggggagatttctgccagcaagaacaccatcatgtctcgcctctttgtccccaacatccagcagacacccaaggacaagcagccgaggaagcaggccaccaagtaccctgctgctcaggccacctccacagcggtgatcagacccaaggctcccgaaatcaagatccggctggggagtgtgcagcagccgagctcagacttcaacattgccaagttgctcacgcccaagctggccggtggcagcgcctctaacctgttcaagaccatcgaggacaacagcagggcacagcagaaactcttccgcggggacaacctagaaaaagtgccccatttccaggtgagagacatcagagacaagtccaaggctcaaggccccctccaccaggtgagagatgtcaggaaactaattaaagggtcaggggatagtagtgacaagggcagtgttaccccagagcaggggctgactggacccaaacccaggcagctgtctgcagcagctggcggatctggatccctgtcccccatggtgattacatgccaggctgtagtgaaccagagggaagacagcatggaccgagagcccagggaaagcatgggcaaagggggcggcagcagagtcttgaattcttcctccccagaagggacagtcttggttcacagggcatctggcaggctgcctgtggctaccattgcccccaataagcccgagcagggctcatacctgcctgtgctcaagattgtctccaaggcttccacccagaagaccccagagaagctcaaggaggaggaggtcaaggaggaagggaaagccacgaagccagcccggaatgccctggagaagctgactgcagccgtgaggtccatggaagagctgtacagcttcaacaggaacgagtggaagcgcaaaagcgaccccttgcctatgatgatggacagccacgtgctgtcgctcattgccagtgaggagagggaaggggtagtggttgctgatggagaccacgacaagctgtccaaacggctgggtgaggtggaagagcggggcacaggaaacaaagctggtgtggtcctgcgaggggcccccatagaacgtctgcagcggagaaactccaaccccagcgctgagagtgtgtctgccagggcagcggcctttgagaacctggccagggaaagaccccgatctctctatattcccccagtccacaaggatgtagagagaacccaacccctgcagcccctcccaccactccccagcaaccggaacgtgttcacagtgagtgccagcagcatccagaaaactgggggtgtcgctggcaagttcccacaagggccttctccggagagtccttcagcagctaagggcatcaagtcgcagggactccggtccctcaagatctctccagccacccgggcacctcctgatgaggtgaccaacaggaaaagtggcagcaatttggagaagagcaa

SEQ ID NO: 32469 - DNA, 2300 bp, Homo sapien
aatttttagtagagacagggtttcactgtattagccaggatggtctcgatctcctgacctggtgatccacccgcctcggcctcccaaagtgctggggttataggcatgagccaccacgcccggcccagaacaagattctaaatcccctttcagttacacagcaatagatgtcccgggagggatgggctccagcattttgttgaaactatctagcaagcctcctgcagctgttaccactgcaaaactaagtgtgtagttagtggagtgggcggggtggtagggatactgtgaaaaattgagtaaatgacaaagtgggacaatgacatcaaaggagagggcaacagacaggacagcaacatgaggaagggcaaaaggcaggaagattcagccagaaaagcaggacgatcttagaaaattctgctacttgtacttccaaaaaagttaagaaaaagaacaaccagaatttgctaaaaatgggaatgaaatagatactaaaacaccaaataaagggctctagagagggaacaggaactctagtgcccaggctgttcccctgtcactgctgtatgcatattcagtatctccctggcctgcactggcctctctgttcaagtgggccctgtccttctctgtgagcaaactgtagccaaaagaatttaagtgctcatttagtcagttatatatgtattatcagagcttagtcttcagcagactgcctccagacactcaggaacttcccactggcaaccagtgttacccgggtctcaccgatcccgggtgaacagtggtaatagggaggaagatgaaggatagaaccattgcacagcagccttttgcaatcatctagtcctttaggaacagttctgctgtgctgtttagtcctcaggccacactgtgagaacaagttacagagcactgtggtgagtgctgaatgagtcagggagtagagataggaagagagagagagaaagggagagggagagagagacctgtaggtacatagaaaaggcaggaagcaacatatgtccttgactcatttgatactgcactttgttccacttcccaaggattcagtcactgcaatttacctttagcattccaggcagatagaatcctgctctacatatgaatctgggcacaaagccatgcaggtgtgagtaagcccatgaaggaagtggcactcaaagactctaggagttcaggccaggtgcagtggctcatgcctataagcccagcactttgggaggccgaggtgagtgtatcacctgagggtgaaaccctgtctctataaaaacacaaaaattagcagagcatgatgacgggtgcctgtaataccagctacttgggaggctgaggcagaagaatcacttgaaccctgggaggtggaggttgcagtgatctcaggtcatgccattacactccagactgagtgacagagcgagactgtctcaaaaaaaaaaaaaaaaaaagactccaggagttctaatatgccccattaggtgggcaccagaatggccccttgtaactttttcctaccttctcctctcctaattctttttctgtggaggaaacaataattgtctctgaatcatccctattcggagcattgaggatatattagaaggtctgggtaaacaagcagaaatattgcaaaagtgctaaaacatcaaacttcagggtcgaatttgtggtttgcttctgctttttctatccactctaaaggtgttcctgatagagaagcttcctcagtgttccctgtgttggtgtgtaagacagaaagaagatggggtaaaagagtgcacgcatcctccactacaaaccagaggctgatagcattagggagaagctagggtttggcctcacacaagcagtttgcactgttgtccaatcccaggtggggtggttgcctcttcatttcctttgatagcaaccgcctgttgcgtgatgtagtgtgggtgtcctcagaggtagctacctaagtttgcatacttcctgactgacagaacactcctgccagtgcctccaggccagggtggtggtgttggtgggaggagtaagtaaccaagtttcacttccttgccttggagactcagagccatagcaggctgctgtctcacagagcgagaaggtgtcaggagcagcccagttgtgtctctctctctacctctgtgaagggcgcgaatgggcagagcagaacttctagaagggaagatgagcacccaggatccctcagatctgtggagcagatccgatggagaggctgagctgctccaggacttggggtaaggcagcagatctcc

SEQ ID NO: 32470 - DNA, 2300 bp, Homo sapien
tttatctgtattaagaaatgcttcttgccaatttctagttttagtttttggattgctacataagactttctttccatttactttatgtgtttttaaaagctgcaggtaatttttaaggtttgatggaattataatggaagccttgtataagttaaatgaaattggtaaaggagagcttactttgtctataatgcattcaggattaaaaattagatttcaaaatgaaatgtctgatttgtaaaatatttaatgttatatcagacttacataaaattttctgtgagaactcaaatgcatttgatttttaatgaatgttctgaatgaaatatgaatttttgtctttcagtctctgtagtttatctcaatatattaataaaaaggtctgttctcactgtaaaatgtttgtttttatcatgttttatactcaatatggccactctttcattcattcaactattcaacaagtatgtcaatgcttgctatatcccaggcagtgagctgggtgctgggaattaatcactgaataagaaagacaaaaaccttaaagagtttacatctagcaaagaaaataaatatcaagtaaataattataattatgataaattctacaaagaaaattacagggtacaatgaaagcatttatctagaagacctaaactattcagtgagggtcagggaaggcttctctgagagtgagtttaagccaaaatgcaaaagatgagattagtaggattaaggtatgctagagaaatatctcaggcagaacgtgctaagttggtaaagtgataaaaatctttatggaagtgaaaacaaacttgtatgatcatagcataaggaatccagggtaggtgagagaattaagataggggccagatccccataagaatgatatataaaccatgatgctgatattgaactttatcctaagtcaataaacttgattttcaaggaaggagttaaatgatgtgatttgggtctttagaacatcatttttgttgctgtgtggagactggagggcaaaagagaatgtaagaagaataggaggttgttgtcaaaagagagatgatcatggcttggagtagggtaggaatatagataggtgaatagttttcaaagataggaggtagaatcaacagaactctgattagatttgtgacatatggaagcagcaattgaaaaccaggctaaagttttctgaaaatttggctatgaaagggagtagaggaaaaacagtgtggtagctgaaagaggatgcgatttctaaagaagcttttcttttgagggtctcgctctgtcacacaagctggagttcagtggggcgatcaccactcgatgcagcctcaaaccctgggctcaagggatcctcctgcctcagcctcccgagtacctggtgcacgccacgttcggataattcttaattattattattatttgtagagatggggtcctatcttgccaggctgctgtggaactcctgggctcaaaggatcgtcccgcctcggactcccaaagtgctgcgactacaggcgtcagccaccgcacccggaaagccttttatttttttcaattattatttattacatgagaccttactaatttttaaaaattctgatgtaaaagggaacatagaaggtgcccgtaatcagtgtctgcatgttaaaagtagacgcttgaagtgctccagaaaacccatggctcctccccattcaatctaggtaaggccttcagtaaagagcacccatggggaagtcacaagagcctaggaaacaggtcagaaacctgtggacctggtacttccaatcacaggcaatctggtgcttgctcttcagctcatcacaccatcccctcaaatttcttcatctacaagaaaaggttttaagataacagaccctgcaaaactaatgacatttatacaccctctctgcacaagaatgtcttgtaacacataaccttgcttgcattttctgggttccttagggtccagcgatctcgtacaaatctaccccacagctgacttccttcggcccgtgacacaaggcgcaggcgcaagacgcggcccgcggtgggcgggggaggggcggggcgcgtgcggggcgggggggaggggaggggcgcggccgccggacgcgccctcgcagcttccgccgggcccctccggaaatcccgtatcgtagggcgacggcggcttagaaagtgcttcctggagcgcagacgaggtcatgaatcatgtgacggtggcttgaggaggaacctgtctttaaagctgtccctgaagtgacagcggagagaaccaggcagcc

SEQ ID NO: 32471 - DNA, 2300 bp, Homo sapien
cttcaggtgctgaagtaaatcccattcaacattaagagaatcttcatgaatgtagcagtataattggacctggtggccctctctgaatattattgagaaaggttgtggtcatttctttctattttttaatagagacagggtcttgctctgttgcccaggctggagtacactggggcaatcatagctcagtgcagcctcaaaatcctaggctctaccaatcctcccatctcagcctcccaagttgctggtactactgacatgtaccacatgtctggctaatttttttaaaacttttttgtagagacagggtcttgctatgttgtccaggctggtcttgaactcccagcctcaagcaatcctcccaccttagcctcccaaatcctgtgctgggattacagaggtgagccaccatgcctggcaaggttgtggtcattgataggacgttttgcaaagcatccttgaaggaaagaggatatataaatgcaaattaatgactgaaaatataacctgtgttttgacatgttagaatacataattacagaaaaattattaaaactagtaattttgactggaagtatactaggaacaatcagaaatctttcaggcagtagtaaattttcttctgatacttgatttgcagttattttgctagttataacatagtttgtcaatggtagccatttctgattggtcatcttatatgaaaacaacttgaatgtttatcagcaagagagtgtttgaataaattctggtccatctataccaagatatattatagggctattttttaaaaatgaatttgaacactatcttttgatttctagagatgtttatgattcattgataaatgcaaaaagcaaagtttcaaagtaataatccaacatttataaaaacaactaatcacaactaatcataaacaaaagaggtttataaaaacctctatgtgtgtagagaaactcttagtcaagttttcataaagaaggaacttctacctgtaacggaagcagattgggaagaatcattcctatttctgtccacccttcacttacaagaggagagggcaataagtatttactactgaaaatacacatgcattattttagtaattttttaaaattaaagaaaaatgtgaaagaaaatgtattttttctgatcataattgctctccctaatttaaccttgcttttaattttttaggtagtgtacattctttttcaaatggaagagctggttatagccaacaacatcagcatcgacatagtggacatgaaagagaagaggaaagaggagatgtacgtttatgactagaaatcacaaaatggcaaatttcagctcaggaaaagtaattagagttgtctgaaaagagggcaagtagttgtaggaaataatgagttttctcttactagaggtgtttggtagagactagaaaatccttagggacattgtaggaataggaagagaggtcagccaggggtggttggatagtatgacccctttagatttgttattctatgattctaatgaaggtacacctgcactatgcatgttgtgaaggtaacttgttattgttggccctgaagaatttagagtactgaaaaacttgaattggaggtaactttccttgttctaatgcagttatacctaattgcctatagcaatttaattacatgaagtggaaaggtaaatggaaagagcactagactagaaattaaaaggcctggcccccagctttgccactcatcagctcccatcttctaccctcaaatccaaggtaaaaaatggttttacagcctgcagcatattgatagcgtctctgtgtgtgggggggagggagtcgggaaagagaaagagaaagaaatgaagacttcctcatctataaaatgaaatcaaattttatcagtgtttttcaaatcagaatctcctggtgatatgcctggataattatatttaagaatcatcctattggcatggttacgcagatttgaaagcactgaactagatgatctcaaatgcgctttctgcctcaaaatgtatgacaactgttgtattattaacaactacagttatattacaatttgttattctttgatcattttttatagggaggtttttctgtgtttatccagctgatgcccataattgtattgatcctcgtgtcattattaagccagttgatggtctctaatcctccttattccttatatcccagatcgtaagtagccaagtgaagttttacaaaaaatgaattgttgctatttctgacctagcttcctttaaagagcttgtgctcttttaaactt

SEQ ID NO: 32472 - DNA, 2300 bp, Homo sapien
aaaaataatacaaattaaacaaccaatatagtgtaacaaccatttacgtagcatttacattgtcttaggtactatttataacctagagattatttaaagtacatgggaagatgtgtaaaggttgtatgtaaatactgtaccattttatatcagggatttgagcatctgtagattttggtattcaaggagggaggatcctggaactaatcccctgtggataccaagggatgacagtgtattttatattatacatcttagagtctagggcagcagtccataacaaatagtaacatttctacagcaaaacatacaggtattcacacttaaatgggataaatgaagattctgtagtagcttcacatcttttcggtcagatttttgcctagaggcaaaatctacagttgaattcagttttttatgcagtcaaattagttatagaataactttgatttttcagagctttatggatattggaacattgatatgggatggtggacctgtacctaacacacagtaggtattttataaatgccccccatttcctttttttctatcacatagcttctaaacatttctaggagaatgagtctctacacaggtgggatcattctctttttttgtttacagatatatgtcaaatgcctagaacactgtctgggcatagttagtattcaataaatattattgactaaataaaggaaatgtcatgtttttggaataaaattgatgtatgttaatgtttttaagtatctaaagtagaaaaatccaattttaatttctgtaaatttgtacaattttatattactttccctttttacccccaagttcatataacaaatgatagatgccttcattatataaagaaagctaaggctcatttacttcaaaaatatttactgagatccttttgtgtgccaagcactgtgataactaataggtgtaatagtaaaaaaaaaaaaaaaaaaatcttgtctcttttctttgaaaactttgagtcagtctttgcagttcttttgctgccagtgtccacttataccctagatcattttgcctgtcactaactctgtcatcaagccacctgcacatggaacacatctaaagttgcaaagtactctccaaaaattttgaaaatgtactgtggcttttgtgaaagtaaattactaggttgtggaagaaggttggcatccacatgtacgtaatgttctctgttccattcagagtatttattttctaatcctaatatactttaaagatttcaggcttaaatctcttaaatctttaaggtacaaactgtatgtatataatctttagaaatgtgcttatcacaatgaaaatcagggataacattttttgagtcacgtgttatattttatcatgagatgttatctttttcagagagtgatacagataaattatctttggcataacggggatggccgggtgcagtggtttatgcctataatcccagcactttggaaggctgagatgggaggatcatttgaggcccgaatttcaagactagcctcagccccaacataacaagaccccatctatatcaaaaataaataaatattgacatttaaaccatagaatactgctgttgttttgcgtgtactaaactgttgctttgatagttggttagatctacattatgcaagaacaaaatttttggaatgtaatgcatgttcattcttagctgtgacatacttttgaggagttttggaatttatttatccacttacaagtactaaaaaattattattattgtctcattttagttacaatatatgctctgactttcatccacaattattatgggctttgtttacttctctgtagttgtgatacattacactaaggacattttcatggtttactcttcttagattcgggaagaggttggaggaatggtctgtggtcgaaaaagagaatgaagcagactaatccttaaagggataagccttcattagattttgagaaagagtccacagatagttctttatagtattctaataaattaaaaattagagatattacatgaccgtcttccttgaaatttacattataacacactctcttgttcacagcataaacaaatgtaaaaattactatgaagtacttggagttacgaaagatgctggtgatgaagatttgaaaaaagcttatagaaagcttgctttgaagtttcatccagacaaaaaccatgcacctggagcaacagatgcttttaaaagtaaagtaaaccttttaaagcaattttactaagctgtctttagaattcactttacggcgtttcagaa

SEQ ID NO: 32473 - DNA, 2300 bp, Homo sapien
gaactcaagaggcagaggttgcagtgagccaagatcacaccactgcactccagcctgggcgacagagcaagacaccttctcaaacaaacaaacaaacaaacaaaaaaggattccttaatcatggtaaagccatggtagagtatttgattagtatgaatggtagtgaagcactttgagaatataaataatgctgctaaccatttttatacttatagtactgtgtcagaggtagctgaataagtgaaagaagtgaataagtaagagacttacttttgaatttattttgtaaaaaacgtttattagtaagcagtgtgcttgaaacacgtttctggaaaccacatcctaaaacaaattgtatttgcttataggatttaatttatgttgggagaacatattctcaatgaaggattcaaagaaagttaaatgtattttatatatatatatttaagaatatagaatcacctatatatttgaaagtttaccaaaaaactatggttgaaagttttgaaaaagaagactctcctaaatctggtgttattttaaaaagtctgtttcttcatttcctctaccctagccttgaaagaaaaagaagagtagtccaaggtgtggtagaaataaggaaggaagagcattgatgcctctttgttctggtattgattatatatatatgtggggtggggttggttttgtgtgtatgtgggtggttgtgtgtgtggttctccaaagcccagaggaactggctgtaggcaaggagacaccttgagaatggaagaatgaaagatgatgctgagtgtagatacactctgtatgtggccagagacatacagacatacaggtggagacataaaaggtggaaggaatttttctgttttctctgtcaaattggagatgaggctgtcttctgagagttagaagaaaagagatgaggttgaaagcttaagagagtggtaaaagtatggaatatttgcagaggagaaaagcaaagggaatgaagtattgctgatttagttttaaggcccagccacatttgggaccatgaattctttaagagtggaagaaatagcttagtagtatacctgtattagagattggtcctctggtcaataatctcattatacctttttaattaaatgtaatttttttttcttttggggactaaatatgattggaacagtctctaagagaatccccaagttttcaaaatactttagtctgtactttatgtgagtttcttagctgaatataccttttctcttatattagccttcataagtgttgctttagtgagggtacagatcaccagcaaacacttacatgatgtatgtttttgttttttcttttacctatacacaggggatttttctgaagaaagccatgttatcttgttggttagcacgattatgcaaacaagttgctcagtgacaatttggctcaatggggagaagtcttgcaataatactgcatccattgcataagtaagagctagcttacagtaagactgaagagaaagtgtgtaactttgtaaactaatattctgttaaacttggcgatttgttttttttgagttgaagtgtattgaaaaataattgagacaaagttgtcatggatcttatttgaaatttttaacataccattgaaaaactttaaaactttacaagatcagtgtgaaattattaactggagtatcattgtatttatcaattagaaacactgtacaactgttaattatggggatttgaatttaagatttgatttaagcttccgttctttcagaagaaatcatttcgctaaacttataaaataagtaattctttttctcaggaataaataaatgtttccttaaacactagttaaatttggagtatatttaaataattagctatatagcacacatgaaaaaaagagaatcgaaaaatgaccttcctctcccaccaactatgcttccatgcacataagagaagatataaagtctggaccaggcagagttttcccattgttgagctccacacagatccttttggccttgttgtacattatttccttccaagataggtaatgggttactcctttttaatttcttttaattcttcagtgaggcaggagaaggttttactcttttagaaagcagcagattgtaaaaagtgtgacaaacacatgtagctgatgaaaaggagcatgatgaacaacagtatgaatgaaaataattatatgaatgataatttctcattcaggtgtgaaaacttaggtgaatgggtatatttggagcattacttcaaatacatagtcttcaggctgtccat

SEQ ID NO: 32474 - DNA, 2300 bp, Homo sapien
gttgtatcatgaaatttgatttatatgtataactcaatgaatttttacttcatacttgagctgcatgtttttaaagatacctttcaagttgaacagtatacactttcttggtttcaaatactgtgattttttaaaaaatcttaagtagaattaattcctgtcactctcctaggtgtcattccacacatccacaaatctctgattgggaagaaaggacaacagaagactgtctaaaggatgcctggattccttgttatctcaggactctaaatactctaacagctgtccagtgttggtgattccagtggactgtatctctgtgaaaaacacaattttgcctttttgtaattctatttgagcaagttggaagtttaattagctttccaaccaaccaaatttctgcattcgagtcttaaccatatttaagtgttactgtggcttcaaagaagctattgattctgaagtagtgggttttgattgagttgactgtttttaaaaaactgtttggattttaattgtgatgcagaagttatagtaacaaacatttggttttgtacagacattatttccactctggtggataagttcaataaaggtcatatcccaaactagttgtgtattaaatttgcttggttgtaataggaacttgttttgagtatctcatctagcagcaataactaagcacatttctttgtgactgaactgtcaaatctgtagatcaacaaagtgagatagcccaagtatatttttttaatgttatatgagctactaaagttttaatttaaaaagttggcaggagctggagtgggattgtcagtttcttaggctaagtgtgaccatttcagtttgtacattggcttcgcttgctgtgtgacagcactgcactagtatgctgttagcatggtggacttggggagggagagaataggtaggaatgtcctgtatatccacagaatgaactccgaatttaaactttaaagataatagtgctacgtgccaggccctgctttgaagtctgaagttgttaagtactcagtaacatcattggggatatactatctccattttatcgaagagaagcagggtttcttatttgaaagtaccgagttatggtagttagcagaattaacagcttggctcacagcattatgtaaaaattgttaccttgtggttgggttgagcaggtcattttgacagtttgtcatgtttttttttaaaaaatttgcacatagcaaacattccccccacccccaccgcgaagactaacaagacacggtacttccaagtggtaatgttatccaaatgggacggaaaaggtgaaatcaaaagtttgctttcgttagggcagcccctgaggggctgattcctgccttgttttggctacacaggattaaggtcgatctgcaccactcgttgcaagctacaaattaaactgctttgtactttggatagccagacatccgggtcagaaaaaatgtagctgaaataaggctgccatacaagccctaagattaggttcaaacgacgctctaacgtgtcccggaagtgctgagactggactgacaccttggtcctcacctgaccgcatcctccctcgcttgaggggcccagaggcggaacctccaagtcctggcaattttactgaaaacgagtgtccccttcccggaccctgtcctcctggcctgagctgcgagggcctcgcctggaggtcacagggcacggcgctaccaatgccggcaatcgggtcccgggcggaacccctccccgcgatgggcagcccggctgctatcgtccgcctcccgggcaggtccgcttcgagcctgctggcgccgtgcgcggaccaccgagtcagctcggacgccccggcccaggaggttggtcctgggccgggacggatgcggatcgcgccctaggggcccgcggggggcggggaggccgccgtgaggaggcggagctgcgaggcccgcccgtccgcccgggccgtcgcagccgctgccgcggtcccctgcgctcctccccgctgccgccgcacgcccccagccggtcccgcctcgcctcctccgcggcggcggcttccgcccttcttagctgcgctgccggaggaaacggaagaaggagcaagctatggaggggaacagggatgaggctgagaaatgtgtcgagatcgcccgggaggccctgaacgccggcaaccgcgagaaggcccagcgcttcctgcagaaggccgagaagctctacccactgccctcggcccgcggtgagacctcagcgtcccttctcttcctgcccaatccccagac

SEQ ID NO: 32475 - DNA, 2300 bp, Homo sapien
aagatactttatttcatccctctccagcatccaatgtagaaaataatagcagttatttactgagggctaactacgtgccaaacacatgctactatgtacattgcatacctttttccttaatctttcaaccatgtgaaaatagatgatactatcttttcacagaataggaactcgaagctcagaaagattagtaactaagatgacacagtgaggaggaggcagaacagaatccatctgtacttgcttctgagttcatcctcctaaccactattcagcgaggcaacagtaaattccctttatggggcttcatagcaaagagctggcagagtattatctaaactagagatggcattaatgttggttttttatatatcacaaagcttccctggagccatcgttaactatcaggtttcatagcttaatatatcattattatattatcagtaggaaaacggctgaagtcttgctatcgacgacatcataagagttccttggttccaagaaataataaacctcaatgtcaaaattgttgggaagctcttctctagaatttatctcacagaaattgggaggtcctctaattcgataaaatctttcaaattgaaacccaatctaaagtacttcagagtatatgtttgttgttgttgttgttgagaaagtctcgctctgttccccaggctgagtgcagtggcgcaatcttgactcaccacaaccgccgcctcccgggttcaagcaattctcctgcctcagcctccagagtagctgggattacaggcgggcgccaccatgcctggctaatttttgtatttttagtagagatggggtgtcaccatgttggccaggctggtcttgaactcctgacctcgtaatctgcccgcttcggcctcccaaagtgctgggattacaggtgtgagccaccatgcccagcatagagtatatgtttcaaaatgttcgtcacattgaaactattcaattatgttaaaaaatgtaatacactaaaacactgcaaatgagattgagacactactgtccccaagcagctggagatgtacataggtgttaataacctactagttggaaggatagtactgtgtgtacagtaccattactttaacctcatcatttgcaactgattgcattgcatggaccctctaactgcctgaaaatcatgtcagagttactccatcgacatttgccgaacatttgtcatgtggcaaaatacttactgtagaaaagttgacacataatagctctgaggtttcactaaatgagctttacacaccaggctacaggtacaacccattgatgtgtagtctccaaaaaatatggtttatgatttgattaaagaatactgcctcgccagaagctccctaagtatagacaaaaagggtttcgtgaccagtgaggtgacttggcttcaccgtttgctgtcacagaactattccgtggaggatttcataagtagtgagggagaggtggaagacccggctgaaaataaagtgggagcagcgggtcgtgatctgttggtggctggggactcgcctagacggaagaaacacggaatctctactaaggctgtggaaggcgtcagggcaaacctcagactcctctcactggacgcgttcgcgccacctgtcagacgggaggagccgccagggattgagagggtagggaaggggtgtccggggccccggaaagcggctgcgggtcgcaggtctccgcccgagaggcgctgggaatggggctgggagtggtgggggcggcgtgctacataccgaggagacttcacgtggtctctagagccctgctaggggacccgggacgctaccgcgcgcccctcccctgaggtctcagctcctcctcccaggcacgtgatcgcagccggctggtaactgcgctcctgcagcgtagctcgctctgtttcttccctcccgccgcggtgcccttcttctcccccgttcccatccctccgccttcccccgcctctccccccacgccccaatcgcggcttgagattagaagcgcccgcccctccacccttttcttcgcttgctcattggctgaagtctcaaggacgcgtcccgagggcgggtggcagccattggtgggatgagcaatccgagttcccggatgagggaacattctgcagtataaagggagcagggaaggcgggagacagcgcagtttgaatcgcggtgcgacgaaggagtaggtggtgggatctcaccgtgggtccgattagccttttctctgccttgcttgcttgagcttcagcggaattcgaaatggtaaacttcgca

SEQ ID NO: 32476 - DNA, 2300 bp, Homo sapien
tttttaaaaaatcagttctgtttaaccttgtgaagatgcaaactggtgatagaatggattttctacgcttttaagtagataaaaaaggacattcttaattattccaggtatgtgttttacctcaatcattccttatgccctgtatgtcctgagagcaaggcccattcagccaagaagatattatttgaagtcttttgtacataagtaaattgttttctgaagtcaaatcccaaagggctttgcaaaatttcatttagtcaggtgggccaagagcaactactactttctgtaagttccaataatctttctggccctatgggggcatttactctatgaattatgcctaaataccctaaggaaattgaaacgagtaatttctttatttcgctagtattggttcagaccactcattatattaattctaaaaatcctccttggaggcaggttaagtggcagcctcattagtaatgctgcccagacaaggacaagaggctctgtggcctgcccagggactgactgtcaggcggctggcatccaactcctgaccatgggcccatccattggtcctgaacaccctagccactgaaaccgctttttaattggcttaaatgggcttgtttattttccacttttctgtttattgaagtagaagtggaaactggccttcaaagaccagtctatcagcatctccttccttggctcgcctgaccttcaggcagtgcagctgcctgaactgagttaaaaatggactgtcaagctggctttaatttctgctgctctgcgtccgaatgtcctcccactgatctgtttatcacaccctctataccccttctgttgttgtttttctaagagttttatgccaggacagctgaaactgcctttcaaggttctaacctgcaaatccttctacacataatcctagagggcctgggagccaacactgggatctctactgtaggaacaaccttctccctccaggcatcccctaacgcaccccaagctgactctctgaacagatcatctcctactggcacaccaaagcgagaaaaccgtggcttaataactttggaagaaaaaaatcaggtttggcttcttgctcatgggctatgcgggcatgttgcctctttccagggctcctctgcctctctgtgtgttcctgtgcaggaccgcacggagccctcacagggattatctgctgatccccagcagaatataaaactctttatcttcagtctctgaaacctcttcaaaatatcccaaaccaaagatcctcccaacagggctcgccagaaacttctgcctccggaaatgacagttgctctcgatgcacggatagaggagtacctaagatcctactaatggtattgtgtgtttcttggcaaactcccgctcaattcaagctccccgcgctctggggcaaggtctaattagaagagtgccaggctcacccttcctgcgaagaaaacgcattagccacagatgtaagtgcacgaagaatgccagggagccacggagtgcgtggggtcattaaggcccttcttaaaatgctggcgagccttcgatgcgggaaaggaaaactagatctgaccgcttgcagcagaggaggatacagaaaccctgggaggcagagtagagttgactgggttagaggccagaaataagtgcataaatgatgctcagtggacgttgcaacagatttaagccaagtgttcaggatgacacagcaaagccccaggacaaggaaatgcacagatcgcttaaagcttcccgctgccgggagcagcctgagtgtgaaagcgcggacgctcggggaggggtcgcactgaacaatcaggttcaggctttgacgagtcgtgcacccggaattgcggtcccagtggcccgagatctaccctggaagcaacaggtgtccgctctaccacaggcttatcctcaactccctgtggctaggctcgggctccctggaagtgtagaggttgaaaggggaccagactctggaggggaggggcggggcgctggccggggaggggcggtgcaggtgggcgggcctgagcagggtggggactggacctataaagttctcgctgccccggaggctatgctactgcgaggagccggcgcagggtggcccgggaggggtgagcagggtgccgctggctgctggggtctgcaggtcaccgagtccccaggagaggggactcctaagaagccacctgcctgtgtttacccggcagcgagcgcgcaggcccccgcgaactcctggcaggtgagcgaagctgcggccttggtgggggcagcgg

SEQ ID NO: 32477 - DNA, 2300 bp, Homo sapien
gcaagatcagaagcagagaagtcagaggctattgcaatattccactggaaaaagataaaggcttaagctagggagctgcagtatggaggaagatgaagaggcagaatagaatagagaaaaatgtctggaggttaaaaatttcatgatgtggtgattgattggatgtggccaatggggagtgaggaagaataggactatagacaatacccacactcccagcctgggtgcctgaatgcatcatggaggaaataccaaagattgagattgtgaagtgaggggaacaggtttgggaaagaaaacgagcttttcttttcagatatgtcaagtttgaagagcttgagagacagtcaagtgattctactaggtggaaaaaatggagctagtgacaaccatttcttactaagaaatggactcccccagcatctctatttcttcttcgctttcttggaatctgaactttgttgttgttgttgttgttgttgttgttgctcacaggcttaatcttcagcttctatgcaccaagcgtggaaaaggagaaagtcctgcagaatcaatcccgacttccatacctgctgctggactgtaccagacgtctgtcccagtaaagtgatgtccagctgacatgcaataatttgatggaatcaaaaagaaccccggggctctcctgttctctcacatttaaaaattccattactccatttacaggagcgttcctaggaaaaggaattttaggaggagaatttgtgagcagtgaatctgacagcccaggaggtgggctcgctgataggcatgactttccttaatgtttaaagttttccgggccaagaatttttatccatgaagactttcctacttttctcagtgttcttatattacctactgttagtatttattgtttaccactatgttaatgcagggaaaagttgcacgtgtattattaaatattaggtagaaatcataccatgctactttgtacatataagtattttattcctgctttcgtgttacttttaataaataactactgtactcaatactctaaaaatactataacatgactgtgaaaatggcaatgttattgtcttcctataattatgaatatttttggatggattattagaatacatgaactcactaatgaaaggcatttgtaataagtcagaaagggacatacgattcacatatcagactgttagggggagagtaatttatcagttctttggtctttctatttgtcattcatactatgtgatgaagatgtaagtgcaagggcatttataacactatactgcattcattaagataataggatcatgatttttcattaactcatttgattgatattatctccatgcattttttatttcttttagaaatgtaattatttgctctagcaatcattgctaacctctagtttgtagaaaatcaacactttataaatacataattatgatattatttttcattgtatcactgttctaaaaataccatatgattatagctgccactccatcaggagcaaattcttctgttaaaagctaactgatcaaccttgaccacttttttgacatgtgagatcaaagtgtcaagttggctgaggttttttggaaagctttagaactaataagctgctggtggcagctttgtaacgtatgattatctaagctgattttgatgctaaattatcttagtgatctaaggggcagtttagtgaagatggaatcttgtatttaaaatagccttttaaaatttgttttgtggtgatgtattttgacaacttccatctttaggagttatataatcaccttgattttagtttcctgatgtttggactatttataatcaaggacaccaagcaagcataagcatatctatatttctgactggtgtctctttgagaaggatgggaagtagaaaaaaaaaaaagaaagaaaggaaaggaagagaggagagaagaaggcagggatctccactatgtatgttttcactttagaactgttgagcccatgcttaattttaatctagaagtctttaaatggtgagacagtgactggagcatgccaatcagagagcatttgtcttcagaaaaaaaaaaaatctgagtttgagactagcctggccaacatgttgaaaccccatatctactaaaaatacaaaaattagcctggtgtggtggcgcacgcctgtagtcccagctactctggagcctgaggaacgtgaatcgcttgaacccagaagacagaggttgcagtgagctgagatggcactattgcactccagcctgggtgacacagcaagac

SEQ ID NO: 32478 - DNA, 2300 bp, Homo sapien
ttgaaggagaggccttgtctgcaatcatccttctaatcatggtacttaagctataccatgctctggcatgtgctcgactgcctagcagccacagatgctctgggaagaagtcacggatatcctgttctacaatcctttccttatcctaagacttgacatggatacctgtagctgctacccgcaggccatagccgccaatgtcctgctttcccccatgtaaagcaacagttcggccatccctatcaaagaacttgccttcaccaaccaaaccaggaaagagctggttacaggtctccgccacttgtaccactccccacaccccaccacacacaccatatcatgctctccccagaacctagcaaaccaccaacactgccatcagcaacacaacaccacctaatctctgccagtttgggccactacccttttcgtacttgggacatagaagtctccatctcttgctcttttatagaccaatatcgaaagttgttcctacactgcagagaaaaatgcaaaatactaaaccaaaggcttggctacctttcctatgaagaagtggcaaatggtattcattcattctttcttctgatgcctattcattcttctccctgatgagtagaaagcagcaaagctttaaagttgcccataaattttttaattactcacattgtcaccccaagcaacagatcttgaactgtatcccatcagtgatagggtacagttaaggactttaatcagaaaaggaatatgagatttgtgcttgatatacaccagtgtgtgtttaatttggaagactcattcaagaagagcaagatcagaagcagagaagtcagaggctattgcaatattccactggaaaaagataaaggcttaagctagggagctgcagtatggaggaagatgaagaggcagaatagaatagagaaaaatgtctggaggttaaaaatttcatgatgtggtgattgattggatgtggccaatggggagtgaggaagaataggactatagacaatacccacactcccagcctgggtgcctgaatgcatcatggaggaaataccaaagattgagattgtgaagtgaggggaacaggtttgggaaagaaaacgagcttttcttttcagatatgtcaagtttgaagagcttgagagacagtcaagtgattctactaggtggaaaaaatggagctagtgacaaccatttcttactaagaaatggactcccccagcatctctatttcttcttcgctttcttggaatctgaactttgttgttgttgttgttgttgttgttgttgctcacaggcttaatcttcagcttctatgcaccaagcgtggaaaaggagaaagtcctgcagaatcaatcccgacttccatacctgctgctggactgtaccagacgtctgtcccagtaaagtgatgtccagctgacatgcaataatttgatggaatcaaaaagaaccccggggctctcctgttctctcacatttaaaaattccattactccatttacaggagcgttcctaggaaaaggaattttaggaggagaatttgtgagcagtgaatctgacagcccaggaggtgggctcgctgataggcatgactttccttaatgtttaaagttttccgggccaagaatttttatccatgaagactttcctacttttctcagtgttcttatattacctactgttagtatttattgtttaccactatgttaatgcagggaaaagttgcacgtgtattattaaatattaggtagaaatcataccatgctactttgtacatataagtattttattcctgctttcgtgttacttttaataaataactactgtactcaatactctaaaaatactataacatgactgtgaaaatggcaatgttattgtcttcctataattatgaatatttttggatggattattagaatacatgaactcactaatgaaaggcatttgtaataagtcagaaagggacatacgattcacatatcagactgttagggggagagtaatttatcagttctttggtctttctatttgtcattcatactatgtgatgaagatgtaagtgcaagggcatttataacactatactgcattcattaagataataggatcatgatttttcattaactcatttgattgatattatctccatgcattttttatttcttttagaaatgtaattatttgctctagcaatcattgctaacctctagtttgtagaaaatcaacactttataaatacataattatgatattatttttcattgtatcactgttctaaaaataccata

SEQ ID NO: 32479 - DNA, 2300 bp, Homo sapien
tattttaaacttaaacctttaacatataagattaacatgtaagatttggtattttaagtaaaacagacacttaattttaaaattttcttagatggttaacacattgtcaaaaaaatcccacagtaaatatataccctattcatcacagtcactacatgttaaactcacctatatttaatctctctctctatatatacatgcatatacacacaagcatgcatatgcaaacacatatctgtaaatatatctgcgtgtatatttatgtagatagaaacaaatataaatatttctgtgtctgtactttctattctatgccactgatctgtttgtctcctctggcaatcattgctgttttaattaaatattttaccttaaaaatatcttctgatttagtaaagcaaggctgacccctcccctcattattactccttttttttttttcttttctgttcttatattctaaattttttttggctagcattttaagatgtttcttagtttttgtttttcatcaacaggccctttgtcttttaagtagccttaatattctactgtcaagcattcttagaataggtatctagtgtactaaatggaaatgcatagcacttagtgctgaggagtccaaatgccatggaatccctgaagaaattattgtgaccagcatcagtggtgactctgagtactgacaacttgagtacagaaggagcaggaagtgaggcaatgtgagggttcgactgtgatttcacatggccacaccccaatttatttatggaaagtgcatgtgacatctattcacatatgttcctatctttatattctccaggatatgccaaataaagtaacaacgccaaaggcagtctgttttagaaaatcaattagaagagggtaaaatgcaatcttatgcacaaaatagaaacttagctcttctgacccctggtataacgttggataaaacaagctaacgtttttaagtgttttgagcagttgactcagtctaactcgttttgtatgaagtattttccagcatggtgcagcagtgaaactgtgtgcccttcttgcaaacaggtaaaggtataatttttgaacagtttttgtttttttgtttgtttgttttttttgtggggaaaatgaatctacaccgattcattgacaatgttgtccagtaaagcctcatgagtaaaggtacgtaaaaggatgatcagctaaaatgagacatgaagcctgtggctgaagaaaaatataatgtcattggcacacacggggcttgtacccaggactatggcagtgttatcaccacgttttaatcagtcacaactgacatcaacgtgacccctgctatatagattatccagcctggttggcattccagtcttaaagagtcaacctctcccagcttcactgatgtgtgatggcatttcacccactgccattccaaccctgtcccctaaagaagagcattcatgaggtgttataagtaattgttccttattcatcatcaaagttctttagtaaaaaccaggagtgaccaatagacattcacatgtctttgcttaattctattaaaaaagactgaaaaacttctctgtacaccctttggaagtctttttgcttactcaagagcagagcataatctatttaatacaatttttcacttatatccaaaaggtggccttctctaatctggctttcaagttggaaagagaaaagttaagttgattcctgatggattttgctctaaaatttaaccctcgggcagtgaaagcctctttatcccaactgagtagctgctaaatgaggcccctttataaccacttcagaatgcactttcaaaacaaaagttagaaggccctatgatccattctcaagaaggatctgtttctgttcaaaaccagtcccgacctttctgttgaagaagaacaaaataatgtagtaacaaaaacacaagtggctgccaaaggaagagagagaaaaaaaaagagttcctgtaagggactgaaacaataaatctcctctctgctgaactcccaaagggagtgtgtgtatttcctcccgttctttatcagagcccccaaaataagtaggaatgggcagtggctattcacattcactacaccttttccatttgctaataaggccctgccaggctgggagggaattgtccctgcctgcttctggagaaagaagatattgacaccatctacgggcaccatggaactgcttcaagtgaccattctttttcttctgcccagtatttgcagcagtaacagcacaggtatttttgtctcttattcctctggtgg

SEQ ID NO: 32480 - DNA, 2300 bp, Homo sapien
cgatagattcccgtgcgacagagtgatcaaccacagcctgtccccttcctcactccgcacatcccagtttctctttgccagcaacctcagtgcatccttgccaggagtttatcatcccgtaggcggcgaagaggaggcaataataggaatccaacagcccgttacaaaaaggatgccagggcacggaggaagcaggcggaatgaggttatcacttgggaggtgtgcacgagtggagaaccctttaagagcaatgacaggtcggcgggggacagccggggatggcaagagaggctggagaagtggttttcgtgtctctccccggggcgtgcgggggaaatcccggggcggcaacggctggtgctctcaggtcgttccccgcctcccgcgccccccgcggccaccctccagccagcgaccgcccccgcccccgccccgcgcggaaggaagcgccgggctccccccacgctctcccgctctctcgcgagtcctgtgcaggcccttccagggggagggggagggggaggggggcgcggagggaattgctgcaatggagctccaagacaaccctgcccaagtgaggcagtcggtggaaagccacggccacataaaaatgccgtattaatttttaaaaagccatcaatcacccctccctctgcagaagaaaaccataaacccgatcccatgcaagcctgtgagcagagccacccacttcctatttctgtcacagcagctacaccctaccagcaaccaccccccgggcgccccctcccaccaccgccacccccgccgccacctccccgcggctcagccatttgccaactgacgcccccgtcaataaaaatgccccaagtgaggctgggtgggacgcgtgggggaagggcgccgcgggggcggggggttcgcggggttcgcgggttgcacaatatcctagaaggtccgcggctggagcggacagaggagaacctggggcgggggaggggaggaaaggcgaggcgaggcaagctgccctggcgcctgcggcacacggtgcacccaggccaccgcggcgctccgcttacctttcaccaccctgtcggtcgtcgacaacttgggatcaattgccttgggctcggacatctccagctgccggaggacagcgacgcgctgctcgtccgtccgactgcacaccccgaccggaccggcgggccagacactcaacgccgccgccgccgccgccgccgccgcgctgcaaaccgctcggctggaggtctaggctctgagctggctttaaagttgctgccttttccgcgcgtccctcctccgccgccgccgccttcactcctcctccgccgctgccgccagccccgccgactcgctccgggctgcgcgtgtgtggtggttatttatttattttctgagcacgcctcccggttcttcttttattcttgggggaagggggatggggaggagaagcgcacacacgagcacccaccccggcacggagacccagcaccgcggaatggagccccacgcgcgcacacacggccaggattaagaccgatcacatggggaaggccgggggcgagggaggagaggcagggccgccgatgtcagtgccaccagccgcaccttggcgtccccggcggcggagaggcggccgccgctgctgccgctgctgctgccgctgccgctgttgctgctgccgctgcccctgcttctccacacagagcgccgccgctggtgccgcggccgccggagacgtcccgccgccgcgatcgcccgcgctcgcctctgcctccccgcgccgctcctccactcaccaaggcacagccgccgagctcggcagacacagtcccgggcacaacctacccccctccgccgccgccgccgccgccaacaccgcgcccgcctccgcctcctccccttcctcctcccggcccccgcctcttgcgcgcctgcagcctcctcctccccactgagcccgcccccgacctcccgccccgacgccggagttcctcgcgttcattggctagagggcgcatcactcagtgccaggtggcggcctccccgcttgtcccgcctcccgctcctcctcattgtccccgccccttgctctgttttcttccagctgccggaccagcgggcctgccgcctctacggaccagtccctgctcaggtgtcacttttgctggcaggccgagattagggcaggagagtgggcaaggcgtcgcggccaggaggagaagggctctaccacgccaccctcctttggcctccgaacgcggaccccgcacacacacacccgcgcctctttggcaag

SEQ ID NO: 32481 - DNA, 2300 bp, Homo sapien
ccagtatcctggggttggaaattgggcagcagaatctcagtgccagtggcagcctccctatcttggtgggacacaccctgcgtctgctccttttgctaggcctccacagaggtatctagtgtgtgtttctattccgtgcagtccacatcaaagtcacgctgcagcacaatcagtctcttactcaaaattgattttcaagtttgagctttaatctaatccttgtctccaaaacatttcttttggcttcatctcccagctccctaaacttttttttttgtttttgttttctttgtgtgtgtgtgtgtgtgtgtgtgtgtgtgtgtgtattttaaaccttttattggacccgtggtccaattgaggaaataggaaaaacctgatactgaaggactttggaaataaaacaggaaacatgaagggtgagaaatttattcagatttcttcataattccccccaaaagctccaaccacgttgccagtccttgggtgctgcagttggtcggggagaggggctgtgtggaggtcaccttctggtagacggagacccgcttttcagactctgtggcgcagcaggcgggccaggaacatttgggccactattgctcttagccctgccgcgcctgactttctctcctctactttccttccgaccgtagggacaagtgtggggatccgctttgggctccaaggccctgcccgcactggcagcaccaagcgggtgtagaatgactggaaggagcagggaaggaagatgggtgtcaactgtcccggccagtggctgcgtgcatgtgtgtgtgaacagggaaaaggccaccctctcccatgtttctcccgtctcctcggttctcctcggagacccgcagggctgcccgaggtagctccgagttgccctgggtcgctggggcttggtccgcatcctcctccgctagtccgctcccgcgttccacagcgccccgccgctcggtgtgcacgcctgggtgggacacagtaacagcccctaagccgccaacgcaaaagcaaaaacaaccgtacaccgcatcgcagtcgtagctcttctccgcaaggtaagttgtttattcgtcgccgttttggcgatcctccctggacagctgcggcagcgacggcagctgcgccgcgggcgccgagctcccagcctcttccttcctccgccctctcagggctgcctctcacccccaccctcttccctcctatccccgccttctctcttcttgccctcttgtgggccacgcacacacccggagacaccctctgcacttggctactcacactgcggcttaacccagccgacaaggcacgcttgccaaagaggcgcgggtgtgtgtgtgcggggtccgcgttcggaggccaaaggagggtggcgtggtagagcccttctcctcctggccgcgacgccttgcccactctcctgccctaatctcggcctgccagcaaaagtgacacctgagcagggactggtccgtagaggcggcaggcccgctggtccggcagctggaagaaaacagagcaaggggcggggacaatgaggaggagcgggaggcgggacaagcggggaggccgccacctggcactgagtgatgcgccctctagccaatgaacgcgaggaactccggcgtcggggcgggaggtcgggggcgggctcagtggggaggaggaggctgcaggcgcgcaagaggcgggggccgggaggaggaaggggaggaggcggaggcgggcgcggtgttggcggcggcggcggcggcggaggggggtaggttgtgcccgggactgtgtctgccgagctcggcggctgtgccttggtgagtggaggagcggcgcggggaggcagaggcgagcgcgggcgatcgcggcggcgggacgtctccggcggccgcggcaccagcggcggcgctctgtgtggagaagcaggggcagcggcagcagcaacagcggcagcggcagcagcagcggcagcagcggcggccgcctctccgccgccggggacgccaaggtgcggctggtggcactgacatcggcggccctgcctctcctccctcgcccccggccttccccatgtgatcggtcttaatcctggccgtgtgtgcgcgcgtggggctccattccgcggtgctgggtctccgtgccggggtgggtgctcgtgtgtgcgcttctcctccccatcccccttcccccaagaataaaagaagaaccgggaggcgtgctcagaaaataaataaataaccaccacacacgcgcagcccggagcgagtcggcggggctggcggcagcggcggaggaggagt

SEQ ID NO: 32482 - DNA, 2300 bp, Homo sapien
tatacattcgcacatacatatgtactagcagaaataaatgctattctcaatacatcagaggaggtagctttaaatttcttctttccacatttatgtatttttccaagttgtcttctataatgacatatttttaaattatcaataaatatcttggctacatacattttcacatatatatgatgtttgcaaagctcaaagccccaagtttcctatagccctaaatgtttattaacctttcgtaatcagattgatttattgcaaagagaggccccttcaattgtagacaatgttttatcattcaagaaaacagtaagatgtggtacttgggttgacctagccacaggcaggatgtggctgccagaaaagcgctataagtctttgagcaaagagccacatcctcctcccactatttctttttttagctaatggcaactcctaagattctgactttaaccaaagttcacatctttgtattgctctcctactccctttttaagtcagcaactcataataagcttagtatataacacaggttatacaatttaagaaaatactaggcattagggatttcaaataactgagctcatttagccaaaatggtaaaacagggggactcgtgaaaaagatcataatcaaataacgggtattaatgctatattaaaaattgtctgtctttgttatctcaaaaagccaccagaattccttctctggtctaacttgcaactatccagacacacagaaagttcaatctattctactagtacttggacaatgcagtgaatctgacattgtttacaatggtcttaaaagcccttaggtgttggtaacattttatgtcatagaaaatattgtagcatgtacctctttacttgtgtacatcactgaaacaacttccctttgcttcctgctcatggttatatagattgtatgaagattagagggcatccccaactgctggaaactgacagctgccctccattagggtatttagtgcctaaaagtgacatcattcagcttctatgctatgatagctatgatatacttcaccttctggagatcatattggagaaattctgttggcggaaatataattccacaccctaagtaagggcagaatttgctgtgatttggaataatagtgatatattaaagaacagtgatatgttaaaagaagtatccaaaaatcacatattaaagaaaattaaagagcataattttatgtagtgatcttgaaaattaaattcacttattcaacctactcaacagcaacaaaatcttagatttcctggtaactgttattcaaaatgtatggatgtataagtaggagcatgagctgattttggaaacctagatgctgccatctgaatgttatggccatgtcccctggttatattacccaggtcatttttatggcttcctacaaacgcgctttgtatttgactacatttggaaatactcagaaggttttcaaatgaagcctatatgaaagtatagaaactgactgagtcatggaaatcctgaagataaagtgatcttacagaaactagaacaaagttaagtaaaacaagggtctcgataaaaagcccagtcaaaaatgagtaacttaaaacacctgtgttttgtcaacagtggcttggcagctagaataggaaggacagaggaagttaaacccacgctggtttccagaagtcagctacaaaaaatgaacctctaggaccagatggttttatggctttggtaaacaatagatttgcataatgcttcctcaataattctgtcaggaagagtgctgagctaaaaaacaacgtgcaattgtgccttttttgaaagaccagctctctaaatggccaactggtaattaggagaatctaatgctgagaaggacagagtatataaaggactattatcttgaataagtaattgtaaatgccagtatatttggtagtattaggtctccactggtggccacattatacactgattatcaaaggggaatgaaggcgtctctgattttgggcaccacctccctaaagtttctttgtttgttctgctttgtagcttcctttgacttttgtttctaaggcttgcggggggctgccatttggtttctcttcaagaattaacaaaccacttactcttgaattctcttctagttaacacaggcatcactacttccaattgatctcaggatgtgggatcctcatacacattttgaacaaaatcctctgtttcagcaagtgagtgagaaacctcttctaattcatttaaccaactaatttaattggcaacaattatttgta

SEQ ID NO: 32483 - DNA, 2300 bp, Homo sapien
ccttatgtgaccttaaaaggaagcggtggggaggggggcagttataattaagagggcaggctatgaaatcagatctaggattgaattccagctctgccacttacagttttcaacgcccagattcttcatttgtaaaatatggttaaaccttccttgttttgagaaccaaatgacatgaatattgtgaaactcttacatagaacataggatatagaatacttaaaaaaagagtagttgttgactgcaaacagtaaaacaaaagaataaataagtcagtcaatggggtagtcaatggctattttcttattcaaaagaaaagtgaagctagaataattttaatgggagattttaaagattttctaacacataatcttattttttttaaaaaaaaaacagcccacaattttcagcagtttttactttcttttttctatttactagcatcatttgacataagtagtggaaatgagcttctgaaaatatacttaattttcatattataaatcttattttctatagttttattaggagacagtgttataacattttatatctggcagaaactcgaatacagtaattttaatttattcattaataatgaataaattagatgagatacgcaaggctcagaaatattaagaattgctccaaacacccagatattgtggagcagagtcaggatggcagctgcaaccttctgacttccaatccagggctcttcatacaagaaggctgtcctgtatatgtgacagatacaagttcctatctgaacactgtctttattaacaagttttcgtgtgcataaatgggtgcctttgaagatctggatacttaattggggagcatcatctggagtgttcatgttggctaaagtagctcttgtcaggaatacgtataccagcagatgcatcagttagaatattcttttctccaatgggtttaagacatactttcctaagaattgagtttctgaaacactgaacaacacccaaaccctgcaatccaaatttgtttttgcctattacactgaagtctctctgttaacaggcatatatagaagacaaccatttttttcaatataatatttcataagttagatgaaatcttttgttccattatataaagttcagaaaatcaacataaaattaataatgatgttaaagaaactactggaaaccagataaatacaatacaatctataattgttttcaagttttttggacatttcgcatacttctccaagttttctacattatgttataaagttctaataagttcatttatgtgaaaaaattaactttttttgatacttgatatttatattattactaaaaagcacttcatccgagagaaagtttcaaagaaagccttccttttataggaagaggagaggaacatttaaactatgtattattaccaaattgatattcaaaaaatatattcaacttcaaaaggcaaatgactagtttagacatgcttgagagagagacattcactttaaggttctgggacaactcctttgatatatctccatcttaaaaacaagcaaacaaactcttgtttggagagggtatttagagccataaataattttttactgggtctatttttgagttggagcaggagtaagaaatacattttatatggaattttaaatcacttttcaatttatgaacctagcctagaaagtctgtgtaaaatgaaatattttaaaagttacagtattatctgtatcttcatttctatatgtatgtatctatcatctgtgtacctactcatctatctatctaattattctttctttccagcaaatgttcacttctggtttccctacgtctgcctggaagtgggggcagtatggcagtatggaagacctagaaagggacaaggagagctacaataacagcggtctaaatatatcctaggatgaaaaggtgaggaaggaaacaggcgcagaagtgttataagaaaccaaagcggccttttgagaagggatgtaagagcaggcccctgagcagtttcacttcctctgggcgcccagcagagcggagccctggccttgcgggcatgagccccggggctgcgtttcctgagacctggccgcagcctccgcgggtggcaagcgggctggggagagccgagggccaaaggaagagaaaatcgcggggagtctctggccgggagagtccaggtagcgctcggcgggcagcagtgcgcaggcccctcggcttcaaccgccacaatgctgccagcagcgccaggcaaggggcttgggagcccggaccccgccccctgcggcc

SEQ ID NO: 32484 - DNA, 2300 bp, Homo sapien
cttttacatgaaccctgggataaataagataagaagattccttcaccacaggtcttaatgagatattagaataaactactttgtgttaaagtaatttatagaagtccatttcctttttataatatgcaagtttttttaagggcaggaattgggctttataatcttttatctcttaaagtctgaaaaattgttctttataataatcattaaataactattacataaacatataaacaaaagtttaagtgattagagaattaatattgaggttttttatcaacattataatacttatgaatgattatggtaagttatcttgttgaattttaaaatacctggtctgaaaattccagtgatgtgtgagaactaaaaaatgttaaggtaatgaagattagagtcatagatgggtaaagaagattattctgtgaaatataactggaattagtaagaagttccaaagaataaactgtatctttaattatatatatttttaagtgtctgttgctgattttcaactttgattacaattataaagtacattaacataaaggaatatcttcaagttcaagtggtgaaatgttaaaataatagtatcttatttttacaaactcagattaaaaaatctagggaaacatttaatatttggattgctatttctctacactatatttaaaggtaaataattaagcagtgagattcattaaataaaatgaattactaaaatttaagaataaatgtaaaacgtttatttttatatattcttgacatagctctatctttaagacatttatatgatgtagagcttcggtttttgatgatactattctatgcattttaataggagagaagaaaatataaatgattggaatatttctccctggttcttcatattctaaaatcattttttagaggttcacattttttattaaaattatgcctagatattattatattgcatacttctaagtgtcaaatattaatcaaagcaaccccaccaggaatttccaatgcttcattatttcagttcagaaaagagtttggtattcaatcttgtacaaaatgttacccagggacaaaaataattgaacattaatttttttaactttggcttttgtaaacaggttagtgcctaaattctgaactgtgaattttcctaatatgacacctggaatgtgggaattaataatagtaaaaaagtaatctttgttaaagttagtatgaatttaaatactctttaaaaattgcttttatttaatcacatactgtattataaacacccccctgaatcaccattgatattattttttatagttttggataaacatcatatttgtatttatatacaatattcacttcagaattgcaatctaagttttagatacataatgttaaatattgtgttctttgtccgtaaatagatgatttggccctcatctaacaaaaatcactttggtgaattaaggtagattttgggcaagttaatgattttagtgaatttaataagtcacatgtatttggttccttaataaataacatttgagctatttcaatttattttcctcaaagaaaaaatcctaaaatatttattttcttttttcacattagcaaaacttgagaaataaaaaaaattgtgactgtaatcatctactatgatactggaaatactgtcagtataaaaaagccactatggtgattctcaaacttgagtggacttaagaattaccaaagtgcttagttacttgataatcctttcctgaaccccaattctggaaattctgatttgatcaagtgcccaaaagtggttctgatgggtgtgcgtccttgaccgcattatgtaaagacaatgtcactctaggagaaatgtagtcgtgaccaagtgctgcagcagaactgaggattgttttagagttacctagaatttttagcccttgctatcttgtaaactccatgcagaagttatgtttactgtgaacataggccgcaggaggccttggggagcttctgcgggtggtaggagacacactttgctaggtctgcaatttcccttctggccaacaagggctgcagaggatgcacacatcaggaagagggtgggggactacttgcttgctggttttgcttgcatctgatgagtagaaattcagcctattctttgttttggtatgtatatatcttctagtatatagctatttctaagatattttaccattgatacgtatgatataaattttgagatgatatttctttagaggggtttgctaaagttatgttttaatcagttatgtttccaaagtgtgaca

SEQ ID NO: 32485 - DNA, 2300 bp, Homo sapien
gatgtgttacctacccctcctgaaataatacaaaaagtatgttgcacttaatggaaatatgtaaatgagaaggtacaaactcaaatgagttccagcagccaggcaggtagcagacatgtgttgtcatccaggaactctaacgtgtggcaaggattgcagtaacctagagagtacatagcatccttaaagtcatgcaggcctatttatgtctttaaacaccatggcagacaagggaaacactgagttcacccatggtctgccagtttgctaccactgtgcctcaagccaggccacaaattccttttgtgctgagcaaataatacatagcatgctccaaaataaactcttttgaaaaggaagcatttcactacaaaatgaccaattatttatttaaaatctttcagaaataaattttcaaatgatcctaagccttttgtgacatttggatgttggttaacgtctcctttcccaaagatagaaagactgtttattctaaagatatttattgttagtattaatgttaacatttatctagcttactgtgtggcaggcactatgctaagtattttgtgcacgtgatctctgataaacctcagaaacagaagacaaaattggcactgccatcaactagcgaagtatataacctttgctactgccctttctctccttgtccttttctgtcttagtaatgagacacttttttttcacccataagactagtttccaggcacctccatccttagaaagaaactcattaaaagtgtgctggtttattctttaactgctcatagagagttaagaagaagctactccaatggcttatttgtagagtgcttttgttcccagttgtctacacctggactttctgttaatgcaccctccccttgtattttagacagagctcggatagagagtccagccttttctactctcaggggctgtctaactgatggtcaggaagaactcatcctcctgcaggagaaagtaaagaatgggaaaatgtctatggatgaagctctggagaaatttaaacactggcagatgggaaaaagtggcctggaaatgattcagcaggtaatattggcccagtgttttctgggacattccctcacttgtggagcccctagtttgttaatgtttaattttcatgaggaatacaggtaactgttctttcatttttaactagccactaaggaagatacttcaagaaatcaaataatgtttgaaaatatccagatattatgttcaccagccattggtgaagtcaatcctctaacccagtataccaaagctaatacctaatcagcttataatacctgtctttagtagagtgagtgttttttgaatcttgttgctgaaattaaggtaaagcatctttacactgaagggtgtattatgtatgccaggcttaaaaggaaaggggagtgagacaatgattaaaatcacactaagcaacagtcctaaataaaatgcaataagtatttatcttctttctccttaaacatttatttttatatacgtacacatacacacatttacatatatatgttcaaatattaagttaaaataagctcatcttctgtaaatataacttacctcctgagatgggattggaggacatggttctgagatgagaatgaaaacaaaatataccacacacaccccttgatattccttagtgagagataacacggtcatattcccatattccatctttcactccaaaaatattttaacaatttttttcttcttatcacagaaatcccattgcttcagaacccagttctagatagctgtttgattaaacacatttaataagcaaatttaggccaaagtataaataattgataatagcttaatattgtaactttcccaagagataatttttgtttaaaagacgatgcttaggaaaacatttttaaacaataaaaaagaatcaaaatagagaaatttcacacaatatagtagatgggccaggggactttcccagtacatctgagatcatgccttgttagaaaccacctgtctctaagggcagttatggttgtgggttggtggctgaacctcatccagattttgtgacactaagcaaaggcagttgttatgttgccaaataaatgctaaagaatactgattgtagagttctgcaactcttcattgttcatgatcagaattacaatattgcttctcaatcatgtcaatgtcatcaccaatacacatgtgtttaggtgcagacctacaaatcactttcctagcaatgttagattttatagattttgttgaagtaagtcaattgtatt

SEQ ID NO: 32486 - DNA, 2300 bp, Homo sapien
tacagagaagaattcccatccccgatatgtgtgtagtagtaaagcactgttgccaaaaatgcccattcactctttttttgtatctctgggtaagtttaccaacctttttgtgctttaatttcctcaactataaaatgatggtaacagttgtactttcctcatagaattgttccaaatgaattcggtatttgaagtgcttagaacagtgcctagcacattataaatgctatgtgcctttgctgttactatttctactacgaccacattggtgatgacaatgatgatgaatcctattactaacagtttcccattcatttcatattaattaaaaaaatatttgctccaaatgcttttatctgtgcctacaaacaaacaaaaatccaaaggtgcagatttgccactaacgaaatagtaaagagatgtattgcaggatctaaggctgattctgaaagtgttggtccccaaagtgtttggagtggtgaagtgatattggagtaactgtaaaacctcttagatggttgctctgaagtaagcccctctctgttggatatatattgcatgttttttttttaatgtatccatatatattatgacttgtttctccaatgtaaatacacttcttgaagacagaagctgtgttttccatttctgtgtatttcctatagcattcaacagagtgttttacaaatttcagaagttcaataaatgtaatgattagctgcttaggtagaggtgagaggaggagaattaggaataaaatgttctccagttaattgcaaagtgcttttgtacttaaaaatgaatttgcattttatctttttctacaacttctggaaagtgttttagttggcatttgtcatttgattttgtacaattttgtaaattttctggaaatctaaattcctacaaagagtccatcacaggattttctattttttaattgtttctacatgaaaggaagtgttagtgtaaaggctagcctgttccatttacacttcatgcaatttgttaagaaaataattaagctttggagctggtagagaccatattgttacagcctaaaccctccacagggtacctggaacagaatggaaactcaataagttgttgataaataaatgaatcatttagtacaatgtcttcatttcacagttgaaggaactctgtgataacttgctccctgtcacatggtggcataggaggggttagaacaaatgttgctgatgtcattcatcatgctctagttgtggatttcacatttaaattgtaacataaaaaagactttaagtttagtctttgaataacttccttcattttaaatcttgtgtataaataaatttcttaggttaatatctgctacattttagaaaggcagtaggaagaagtttatacaagtcaaaagaattgttttaaagggaaagtaaaggaaaatatctgttagtggcttattcgaggtgtgtcagttgatgaatttcctttctctcaaccataagttttctttgctctgttatatattattagggtttcctagttactctaaaagactttctgttggaacaatttgtttttctcaagcacaacccatctccaacttgtctgtatttctgagactttcaagaaatgttggttatcattttaattgattttctgctaggatggaaaaaaagagccaagttcatgtacctgtttgaaggggcccaaactgtcagaaatagggacgattgcctggatgataacgctctgcgatgccctccacaatttcatcgatggcctggcgattggggcttcctgcaccttgtctctccttcagggactcagtacttccatagcaatcctatgtgaggagtttccccacgagttaggtaaggagctctgttcatattgtaaaagtctgcttacttcttgatttcagtggaatgagacttttcaggtgacatgctcttaaaatccttctgatgcactaaaatgaagaccttgttggacattgatgattatctttgatatcatccagaaataaaaaaaaaactattcacttgatattttcttcttcttcttctaggagactttgtgatcctactcaatgcagggatgagcactcgacaagccttgctattcaacttcctttctgcatgttcctgctatgttgggctagcttttggcattttggtgggcaacaatttcgctccaaatattatatttgcacttgctggaggcatgttcctctatatttctctggcagatatggtaagaagcttaaaatttgtattttcttttaatttaaaatttggaaatgagtatct

SEQ ID NO: 32487 - DNA, 2300 bp, Homo sapien
attttttgtagttttagtagagacggggtttcaccgtgttagccaggatggtctcgatctcctgaccttgtgatctgcccgcctcggcctcccaaagtgctgggattacaggcgtgagccaccgcacccggccaaggtgcactcatttcttgtggcaactccccagccctgagttgaagaagcagcatgccctccacactttatcctcagaaggactgagtgggaaacccttggtgtacatcaaggaaacaaaggcttttgatcttggcaaaatgggataatgcccatgggattccctagcagatgatgggaagtagggtggcctctgccccctgaagacatgtcaggggtgggaagcgaaggatctagattgggtgtctgtgctctgacaccacaccacacttttaggagtctaaaagaacaccttctcttttcaagacaagacctcgaaaagctgaatatggaatggggtagggctgggaaacttgtccatcactatgacaaagacagaaaatgttgtaaacctcttttaaaaagattgttgtagctttcaacattctttctttttctttagtaaaatctctaagaattccagcctgccttttgtttaggggaacctggaaaaagagattttaaacaaacaaaacatgacttaattttatttttcttaaaagaaactgaaatacaagtacattgttaaaaactttggcagatataaagaagcagaaaggaaaaaaaataaaaccacacataattttaccactcagagataaacactgttaacatttggagcacagatttatccttatttatagcagcattctctatatattgtttcataataatctttttatccctagcagtgcatcataaaacaaggcatctttatcctttaaattgtatattcaggaaaagcgttcttcatcttcccttcaaaaagagttttgagagtgaacgtaagtgtgtgtgtatgtatgtgtatgcatgtgagtgtgtgtgtatatgagtgtgagtgtgcatgtatgtgagagtgcatgtgtgttggtggcatcagtgccagagtgacttcagtaagaagtgtaagaaaacctgaggaaaaatggaaaaattaatcttggggaaacagagttggggtcacttgactggccacctcttaaacctagagattatttttatagagtgttcttggcttaaaccttagaaaactgtcttttatcttgatagaataataatgagtaaactttgaagaggactttaaagaggggaaaacttcaagagaaggtggagagagagattcagcgtgtgtatatatgtatacatatatatatgtatatataagtatgtatgtatatatcagggagatttggaagtgaaacttgagtgccttgtaattgaggcagtttcattattgcaggaagaacaaatctggaagcaatttcctcagtcactcgtgctttgaatgttcctgctgtgagtgtggaacatgtaagtcaccaattccattgttcagtgagccctaaaaggataaattaatgggacggttcacttgtttcaagggtcagaagtggtctcccaattgttaaattcaaactaccattttaaatgtatgtatttcaattgctctcttgggatctttggccagttgccatattcaaaacacttttaggtatcccaatgattatttaatgggaaagaaacctctggaatcctggaattcatatctactttagtatttattaagatgattactaatattgctatgtacctggcatgcagtagtgctcggtaaatatgtgttgaatgtatgaatgagtaaataaatgaatgaatctctcacttgtcttcacagcatttttggagccaactgcaaaaatggtttaagttcatagctgcaaactaaacaaaattatgaaaaagcaaaagaaatgaagtgcagaaagcgaagtatacctaaaattctcactctggtgagaaaagttggctgatgtttgaactgtaggatttttttttttctttcttgagccggagtcttggtttgtcaccaggctggagtgtagtggcactatctcggctcactgcagcctccgccttctgggttcaagcgattctcctgcctcagccttccgagtagctgggattacaggcatgcaccaacacgctcaggtaatttttatatttttagtatagacggggtttcaccatgttggccaggatggtcttgatctcttgacctcatgatctgcccgcctcggcctcccaaagtgctgggattacaggtgtgagccactgcagctggccgg

SEQ ID NO: 32488 - DNA, 2300 bp, Homo sapien
agtagacacagggtttttacatgttggccaggttggtctgaactcctgatctcaagctatctgcccaccttattctcccaaagtgctgagattacaggcgtgagccacagtgcccagccaagatttgtatttttaaaaaccttttatatttgttaaaatctaacactttatggacaaatttagttttagaaaagctggaaataaacaacttgctgggtatagattagccatttagagcattcattaatttccaaaaatcattttgcatcacggaggtccaaaggaaaaataggcaacaaactatattttaaaatccaatgaaaggcttgaagagtcccacgagctgagtgatttaagaggacaactgtgatattaacttacttctggcccttagatgaaatatttgcccttttagcatcaacataattctgtaaattattattaacaaatacgtagattttataattggaaagagcacagtattaagatcatttagttcatctcccttcaggcatgaatcctcctaccacctactaaaggcggtcacccaggatctgttgatttgaatcacttttgatcatggagaaatcactatcttccaaggcagccatgccttataattccacagaaaccttcctctgggtgactttgccccatgactgctgccttctgtcctctgaagttagatataatatagttaaaccttcttccatatgacaatccttcagcttcgtctgcctagatccttagcctctgggaatgttctctacctgtctctttcttctgcagttatgtctttaggttcctcttctaagattaagattttttccctttccccatcttttcccctttgtctagacttaatgtctctttaaaatgtgctattttaggaggctgtgcattctcctgatgaaaggcaagaacggcatcttgtattctttttattgtccttagtcacgtgaatgcaaaatgtctgagacaggtctcagtcaatttagaaagtttattttggcaaggttaaggatgtgcccctgacacagcctcaggaagtcctgagacatgtgcccaaggtggtcgggggtacagtttgcttttatatattttagagagacatgagacatcaatcaatatgtgtaagatgtacattggttcagtccagtaaggtgagacaattggaagtgggggcttccaggttagaagtataatagacaagagacaaaaggttgcattcttttgaggccatgatcagccttccactcaatagacagtttagtctggcccagtgaatctgcattttttgcataaacgatggagaagagaaagcaatcagatatgcatttgtctcaggtgagcctcagagggatgaatttgaatagaatggcaggcaggtttgccctaagctggtcccttcttgatgtttccctttagcttggtgattttgaagtctcaagatttattttcctttcacagccatctaacagtgaagcatggtttcactttacacttgaaccactatatccaccagatacaaactttgcctcaaacaccacactcactttacacaaacctgttgacatcacacctaagtcagcttttcttgagctcccatatgaacaaataaacattcctctgatctgcggatatcccgccaggaagggccggcttgggcagtgctggctcagctagcccgccaccgctaccattggatttcctctttctcctctgattttaagaagtgagaaaaaaaagcaattcctgttaattatgtagacaatgcaagggtctccaggctccatttcagcaagttggtttcatcaagatcacgaaaagatgcatgcgtccccgagaccagagaggagttagggaccccgacacggaggtggcatcaggtaaccctcaggagtgagggtggggaagagggcatggctgatgctgggaatgagcagcgcccgcggagggaaggccggcggtcctgcgccccggcgtggacgcgcgcgggagttcaggctggggaaatgggtcaccacgtgctacggaggcggggacagggccctcctccccttatttgtaaagagcgccggagcggatcgcggagtttcaccgcggacctgtcagagatacagaggttgtgggggcgggagacagaaagagagagagatccagagaccgagtcttacgttgacacgcagagagaaagacgcagagacagacaaacaaacagataggagaggtgagaggccagcgagtgcttccgattaacttgccaagctcagagaagatccggggagagggagggtccc

SEQ ID NO: 32489 - DNA, 2300 bp, Homo sapien
acagaatggagtgttgcagccaagccaagaatggcaaggattgctggagctaccagaagctaggaggaggcaaaggattcttccctagagccttcagagggatcatggccttaatggcaccttgagttcagaattttaggctccaggactgtgacagaataaattcccgttgtaagctgttcagtcggtggtaaatttttacagcagccccaggaaaatatgcctgctcaacaccctaccctgaattttaagttcattttatggaatcattttgagtttggagtttgatttaatccttttcagtaattaacgctcttcattttttactcccaaatatgtcacactggctctactcttataacaattgtatttatctatcttttggtaatggggctgccaccccttgcagaatgaaaagtagagtgtgtatgctcacacctccctccctccctccctctctccctccctctctctttctttctttctcagagtatcgctctgtctcgcccaggctggagtgcagtggcgcaatcttggctcactgcaacctctgcctccagggttcaagcgattctcctgcctcagcctctggagtagctgggattacaggcgcccgccaccacgcccggctaatttttttgtattgttagtagagatggggtttcaccatattggtcaggctggtctcaaactcctgacctcaggggatccacccgccttggcctcccaaagtgctgggattacaggtgtgagccaccgcacccggctcacagaatttcttaaaaagtcattgtgttcagtctttatggatcctctaaattccagctgctcagcctcccggagctaaatgagatcacttaaaggtcgactgttggggcctccaaggtcgcctcggagactcacctcataggcaatcaaatggatcgctgggtttttgtgtgtgtgggttttttttgtttattttttttttccagaaaaacactccaccaagaaggtttttataacctactggaggaggaggatggagagtgggcacgaaaggactaggatgaacatgccataagcaatctaaatgccactgcaatattgcctggtgaggacctgattactgatgttttaaagctaagctttcagttgtcactccacccagtagtgaaacaatgagctctaaaatatatatttcggctcaagctttcttatgtggggaggtaatccacccgaaggtatccccagcctgtacctaatacagtgcccagcactaaagcagctcagatgccagtgaatggtggccactgggaggcctgtcagtgggtgccagtagcggtctcttcagagaaaaagaaaactcccctctgccagatcagtattttatgagctgtgaaccaaaaccattgctaccaccatcactataattctatccacagtaattatcataaaggcctaacaatgccttgtagatgaacattctgagtaactgctctataaccaggagatttaagaccgcaccaaaaaccagtagagggttatactttactgggcacaagtcgtttatgataacgaaattgtagtttaatctgtgaagagatgtgaatgtaactgagacacgcttaaatggaatatacagatgagctttatttttatatctggcatgcttggatccatgccgaccctccagctgctcgggcctgcccttaggggctatggaccgcatgactctatcagcggcactgccaccgccgccgcctccgtgctgcctgcgttccccgaccattgattgggcccggcaggcgcttcctgggggcttccctaccggctccagcccttgggattcgggagcgccctgctaggaagccagagccccgcaggggccgcggcgtccaggccgcctaacgcgcgcccctcgcccggcgccccgaagcggccccgaggggcgggagccgaggcgagcggcaaggccgggccgggggcgcacagcgcccctagaagtgcgggcttcccccacccccggcagcgaccctacctcccgcccccgctgcgtgcgcgcgtgtgtccgtctgtctgtatgctctctcgacgtcagtgggaatttccagccaggaagtgagagagtgagcgagacagaaagagagagaagtgcaccagcgagccggggcaggaagaggaggtttcgccaccggagcggcccggcgacgcgctgacagcttcccctgcccttcccgtcggtcgggccgccagccgccgcagccctcggcctgcacgcagccaccggccccgctcccggagcccagcgccgccgaggc

SEQ ID NO: 32490 - DNA, 2300 bp, Homo sapien
ccacgcccggctaatttttttgtattgttagtagagatggggtttcaccatattggtcaggctggtctcaaactcctgacctcaggggatccacccgccttggcctcccaaagtgctgggattacaggtgtgagccaccgcacccggctcacagaatttcttaaaaagtcattgtgttcagtctttatggatcctctaaattccagctgctcagcctcccggagctaaatgagatcacttaaaggtcgactgttggggcctccaaggtcgcctcggagactcacctcataggcaatcaaatggatcgctgggtttttgtgtgtgtgggttttttttgtttattttttttttccagaaaaacactccaccaagaaggtttttataacctactggaggaggaggatggagagtgggcacgaaaggactaggatgaacatgccataagcaatctaaatgccactgcaatattgcctggtgaggacctgattactgatgttttaaagctaagctttcagttgtcactccacccagtagtgaaacaatgagctctaaaatatatatttcggctcaagctttcttatgtggggaggtaatccacccgaaggtatccccagcctgtacctaatacagtgcccagcactaaagcagctcagatgccagtgaatggtggccactgggaggcctgtcagtgggtgccagtagcggtctcttcagagaaaaagaaaactcccctctgccagatcagtattttatgagctgtgaaccaaaaccattgctaccaccatcactataattctatccacagtaattatcataaaggcctaacaatgccttgtagatgaacattctgagtaactgctctataaccaggagatttaagaccgcaccaaaaaccagtagagggttatactttactgggcacaagtcgtttatgataacgaaattgtagtttaatctgtgaagagatgtgaatgtaactgagacacgcttaaatggaatatacagatgagctttatttttatatctggcatgcttggatccatgccgaccctccagctgctcgggcctgcccttaggggctatggaccgcatgactctatcagcggcactgccaccgccgccgcctccgtgctgcctgcgttccccgaccattgattgggcccggcaggcgcttcctgggggcttccctaccggctccagcccttgggattcgggagcgccctgctaggaagccagagccccgcaggggccgcggcgtccaggccgcctaacgcgcgcccctcgcccggcgccccgaagcggccccgaggggcgggagccgaggcgagcggcaaggccgggccgggggcgcacagcgcccctagaagtgcgggcttcccccacccccggcagcgaccctacctcccgcccccgctgcgtgcgcgcgtgtgtccgtctgtctgtatgctctctcgacgtcagtgggaatttccagccaggaagtgagagagtgagcgagacagaaagagagagaagtgcaccagcgagccggggcaggaagaggaggtttcgccaccggagcggcccggcgacgcgctgacagcttcccctgcccttcccgtcggtcgggccgccagccgccgcagccctcggcctgcacgcagccaccggccccgctcccggagcccagcgccgccgaggccgcagccgcccggccagtaaggcggcgccgccgcccggccaccgcgcgccctgcgcttccctccgcccgcgctgcggccatggcgcggcgctgactggcctggcccggccccgccgcgctcccgctcgccccgacccgcactcgggcccgcccgggctccggcctgccgccgcctcttccttctccagccggcaggcccgcgccgcttaggagggagagcccacccgcgccaggaggccgaacgcggactcgccacccgggtaagccaaactcgggcgagtgggggcccggcaggggacgcgtggcccaagtcctgccgcccagccctccgcaccccctccagccccactcggacttcctcattcctgcgctaaccgctgggctagaccgtgggaggaggttgacagtagctgagaggcacatgggattagcgacagcggggaaagacacatccggacctcgcaggggctagtcggccgaagggccgcggccgcccggcggtcatttctcttcacgtccctccgcggggcgggaacgcgaaccgaaggggaactcttacaaacttttaaaatccccaaccccagccccacctgggggatggtgagaaggttggagtgcg

SEQ ID NO: 32491 - DNA, 2300 bp, Homo sapien
cttactgttccttttgccacattcatcattcatatgttcatgtcttccccatcgcttccttcaagtttttgctcagttgtcatctttttactgagtgtccttcctgacctctccctactttaaaatgttatgcttttttctactacctctcctgttcctcattcctaccttatttttctggataacacttattgccttctaaattgtatcgtataatttacttctttgtttcttctccgttgtcacactagcatataaattcagtgaaggtagagattcttttactgctgacaaaagcatctaggacatttcctggcactgataaggatctgcataaatatttgttgagtgaatgaatctccttggtaaagtccttttttgtttgcctgttatatttattgaatagacttctttgtttcatgtactttaatttcaaaagtgaatggctggaacattttatatattttcttataaatcattttcattgctttttaagcttatcacatattttgttttataaatatgtagccttcgtgagataaaagattctccatccctgtttacgtgtatacttagatgacaactctaatggtcataaataattccaaccttatagataactcaggagaagatgagattataagtagactttaaatcccattcagaaacccaaggacaattcaaaaggaaaataatcattccaaatataatattcttcttattcttaagaagttgttagtattttgaattttgaatttttaatacagctcccatagaaaatactttaaaatgaacccggtaagacttcctcattaagacatatagacacatatgctcccactcccgtaatcaaatttggaagtcaaataagctctgaaaaccaaaacattcttccaagtttattgcagactcatttggtagtaaaaaccaatctgacctgatgtgtagctgtttatagtctttatttttccatttggtgagtccaattatatatttcgctgaggaaatactaacatgtttgactacattgtgtgccccagacctgcttagagtattatgtaatatgcagtataggccatatattgcctttttaacatcaaaaataccctaaattctgaaatgcatgtagccccaagagatttgtataaagcattgagggcctgtgtatttttttttaatttacaagtgaagccagattccctagacattaagtgcctaacttttggttgttgttgctgctgctgttactgttttttctccagcttcgcaaacctgggtatacttcatgtgacaaagaaaaaagtatttgaaacactggaagcacgaatgacagaggcgtgtataaggggctataatcctggactcttggtgcaccctgaccttgcctatttgcaagcagaaggtggaggggaccggcagctgggaggtaagcatcattttcctggccttgatcctccaaggggtccaggctttggttttcatctgtatgaattatatgttcatctgcatcccttccagtctctaccccacactgctgtcaccttttccttgctcagaaacctttgatggcatcctgctacttctaggataaaaactatagctccatagcctgtcatacaaagccctgcttctctggccccagcaactttcagcctcatctccagcccaccttgcatcctcctctcgccatctctgctctctgaataactgaggcatatttatacctttgtatgtgtcttcctttaccaaaaacaccccaccgtttccatttcaccctctcgaaaaccaatgcagaaatcaagactttgtctaaagaacacctctgttttaccttccccaactcaccttattataaggcatttttctttctttgggctctgcagacacattataaactattatctttatcataaaaattgtatgattttccattttcttgccttttctcaaatttttttttcaaccccattccctgtcccaccacatgccccatttctacttttgtattttgtcctttactctggccgtccagtcgtcatctgatactcatgtgattcaaaaccgattatcagttttccactaaatatactccatcttctgatacccagactcaaaaccttcccatcctcactgactccccctcctcgcctgtgctgcgaggctgtggtccagccattccgtgctctctggcattccacactacattccattttcattgttccacttatagtagtcttctccctggtctctgtccctccccacttctaatcaagtttacatcttgtagccagatagatatt

SEQ ID NO: 32492 - DNA, 2300 bp, Homo sapien
cccatccctcagtgaactcctaaaaggttttccccaaactcctagaacactgatctgcaccatgaatttaatgtatgtcctgttatagtgctgtctcactaagtctttcccccactatcttaaaattatgttggagggttcttggcagcaaagacattatgtcatgcttttttttatttccagcatttagctcattgtagatgcataataaatgttaactttttaacatgagttattttgtgtgaccaagcaaaagggtcaataattttttaattcagcatcttcaggatctttttgatggataatcaaatatttcactagttttaacaacactggggacttaagaaactgttgtagagtggatttgggtgtgtactgctctgtggtctctctggagctaactttcagccttcatacccattggaataaatataacgcttcttgaaatttaccatctcttcctctttgagtgctttctatttccctttaagatgtttaaaaataccattagaatcagtggtctttctgtggctagtggtgggaccaaatcaatcttttctcctctggtttctcttcctttaaatacagataaagaagaagtgcagaggaaacgtcagaagctcatgcccaatttttcggatagtttcggcggtggtagtggtgctggagctggaggcggaggcatgtttggtagtggcggtggaggagggggcactggaagtacaggtccaggtacaaaaatacttattcttcctaaaactttttcatattggagagggtagaattttcttttctttggtttctgagcatgtctgtgagttgagtggctatgatattattgagtatattaattaaaatttcctgacaaatgtaaatttatttttcaaagaaatccatgttcattttacaatatgtaggtaatctcaaaagtcattaagaagaaaaaaaagtaccccaaagccagttatttaatgaataccttcctaaagattttggtatatttctcttttacattttttgacatagttgtcttgtttttgtttggaaacattgaaaagattgtatattatcatactacaatatagctatatattaaacatctctatatactacattgtagaaactttgaaaatacataaaatctgccatcaaaggttaactactactatttttatgtatatgttatagtatatatttgtaaattttaccctgaatacagctgtgatcatcattatgcattttattttaatccatttatttgcaatactattttactatcatttgcaccatgactgtgtgtatagagtcataggtgcaacgtttacctgagatgttaacataaacatttcctccagtaatatgaactttaagcataaattttaagcatcattttaatgactcatttcctcaagtgaacaaaccatagtataacttacttacatgtagtttcctgttttctatataaaatgctatactgaacctctgtccacctaacttttcacttattccagattacttttgtaaattagagtctttgtagtaaaattactacgtcagagggcatgacatctaatgccatctgttttcccaaagagttgtaccagtttatgcttccaccaaaaatgcctaagaatgaacagtggtggccatttttccattgaggagtcagtatgtttttctgtgctttgtttgattaagtttttttcctcaaggggttattttaatgtcttctacataggcaagtctgagtttggttggtgaccctcactattagcctctccccttcacataggagtgaaggctttctccattacaacccctccccaaatctggggtgctgtcagagttgccaacatgtaaactttaccaaagtggaattctgatagtcccatgacccccaccatgtgtcttagtcccaacagaaaaaccatgtgtgggcacaatactgtcctgtcacaccaaaggctgtgctcacctgagagacagacactaagttgtgctgagtctttgtaaaatatcttcatgatgtttcatttgttttacttgccgtttcagggtatagcttcccacactatggatttcctacttatggtgggattactttccatcctggaactactaaatctaatgctgggatgaagcatggtaagtaatgctttgttcttaataccaagaaaggaaaaaaataattaatgctaaaaagggtttttaaaatcattacttatcacaacagtattatcatcttgacaaataattgatgaatgcaaataaactaagaagatacttttcccaaaagatat

SEQ ID NO: 32493 - DNA, 2300 bp, Homo sapien
tggacaaaaattatcctataacaaaatgaaaacatcatgtcatctgtgccaattgcaattttaggaagagtacttattagggctttgattattctttgatgttctctgttgtcaaagtgaagtaacctaaatgatgttatgcttgcatcctggaatgaaaggaggaatgagaatcttctattattgtttttctaaaaattatatttcttaagtatttcttaataaacagaatatatccatatgtatcatcaaggatgaattttcctctgatttggcttaatgaaatctctgggaattatgaaaaaattcctttgccgctcttgttgccataaaccttgtgttatcagtgttgcacagaccatggctagccatttaatgccgtgaattatggcatataatttgaattgagagctttgtttctatcaaaggtaaaaatgcttctggagtgagtgaggaaggctttgaagcagtgagagcgtttcccctatagcatcattgggctctgacagtaggaccttgaagaggagggttctaatcctgtctgccactatgtgacaggcaagtcacctgatctttttttttttttttttttttttttagagtctttctctatagcccaggctggagtgcagtagtgccatctcggcttactgcaacctctgcttcctgggttcaagcggttctcctgcctcagtgtcccgagcacctgcgactacaggcacgtgccaccacgcgcccagctaatttttgtatttttaatagagacagggtttcaccatgttggccaggctggcctcgaactcctgacctcaagtgatccacccgcctcggcctcccagaagtgctgggattacagacgtgagccaccgcgcctggccccgatctctttgaactcagttccctcatctgtaaagccagcggcttgggttggataatccatactgtcctttaagccaagatattcagggcttgtaaataatgctgactttgcaaagtaagatattgcccggtgtctgcagaatcaggcaattccaaggccattgtaaggcgaaacaaagctcagatttgatgagagaaaatttcttttcaaggacttcttccgaagcataaatatacggcagatagcgtcaacacaggagaaaggcagtctattttatgcaatgtaaaattccgtcttaacttctaggattactgttacatcctattgcaaaaatgggactcaggtagaccatttgactacaagacccgaaataagtcagtggtatttcttgggtactctggcattgttagggacgatcacatatgtttactcattttatacttataacaccttgaaaacttcaagaaacggagatggagattttgcggcttgcccaggtcccacagctagtgagtgcagaggattttaaactcagctgcgcgcctagtgcaagttccagaacctcagaaacctccgtggggctttatgaaacataaggacgcaggccgctagtaacaatagctaacgtgaatgccttctctgggccaggctccatgctgcatgctatagtcgcattttcttggttagccctcagaacaaccttctgatggagatactgctagtacttgtttactctttgaagggcggggtaggctctgagacccgcgagttgagctgcagcggggtgagtgttacgctaccaggtagacgagggtctgtgtaaatttggcggaagggaagtggtgggttgtctcccagtttgggttctctgaaggagtgaggggactctccagctatggtctccacgtacagtcggtctctgatctcccgaggctttgtgccactgcgcgcccagggatctttctgtcccaattaccgtgcaagattcttgcctccagttgtatgtactgaggcggcgggaagaagcgccgagggaaggctcagaccgcaatgccccccagcctgtagctattctcgggggctgcagctcccgcacccgcgacgcccggctttcagcgggtgcaggcgcagcctcctcgttcccctcccgcccgcggctgcgcccggagagcgctcagctgacctaggggcggggccggggcggggacctaaagcctcggctacttccgagggggtgagtggcttcaccgccggtcccttgcagcgctgcctttcgatctctccacatctcggtggcgcgggatctcaagatgcgcctccacctgctcctgctgctcgcgctgtgcggtgcaggcaccaccgccgcggagctcagttacagcttgcgtggcaactggagcatctgcaatgggaacggctc

SEQ ID NO: 32494 - DNA, 2300 bp, Homo sapien
ctactggttctgtttctctggagaatcttgactaatatgccatatgatccagtatttggattccttggtatttacacaaaggagctgaaaatatatatccatccaaaaacctgcacatggatgtttataagagctttagccataattgccaaaatctggaagcaaccaagatttccttcagtaggtgaatggataaaccaggtgtctggtacatccagacaatggaatattattcagcacttaaaaaatgggctcagtcgctcacacctgtaatcccagcactttgggagtctgagacaggcagatcacctgaggtcaggagtttgagaccaatctgaccaacatagcgaaacctcatctctactaaaaatacaaaaattagccaggtgtggtgatgcatgctgtaatcccagctacttggaaggatgagacagaagaattgcttgaacccgggagacgaaggttgcagtgagccgagattgcgccactgcactccagactgggtgacagagcaagactccatctcaaaaaaaaaaaaaaaaaaaaaaaaaagagggctatccaggcgtggtggcccatgcctgtagttgcagctactttggaagctgaggcgggagaattgcttgaacctgggaggcagaggttgcagtgacccaagattgcaccactacactccggctttaagtgcatattactaagtgaaagcagcctatctgaaagtctacatactgtatgattccaactatatgacaatctgggaaaggcaaaactatgggagacaataaaaacatcagtagttgccaaaaattgcagggaggaagggatgaacaggtggagcacagaggatttttagggaagtgaaaatactctgtgatactagaatggtggatacatgtcattataatttgtccaaatccatagaatgtaaaacaccaagagagaaatctaatgttaactatggactttgggtgataatgatacatcaatgcaggttcataaattgtaacacatgtattactctgctaaggatgttgattaagaagcaggcggtgggggagcagagtctgcatgtgctgagcagggtgtgtactggaattatgtactatccactcagttttgctgggaatctaagattgctctataaagtttttttttaaatgagcaaatgatttggataaatatttatccaaagaaaacatatacatggctactaagcacataaaaagatgctcaacattattagttattaggctccttggtccattcaggctgctataacaaaataccataaactggatagcttataaacaaaagaaatttatttctcacagttctggagtgtgggaagtctaagatcaaggcaccagcagattcagtgggtggtgagagcccactttctgcttcatcgatggcaccttcttatggtgtcctcacatgatggaggggacaaaggagcacttctcaggcttcctttataagggcgctattaccattcatagggtagagccctcataacctaatcatatctcaaaggctttccaacccctaataataccaccttaggtattagaatttcaacatattaatattggggtcagggagtgggagcagatcataacattagggaaatgccaatcaaaaccacaatgacataccatttcacacccactaggatggctataataaaaaatatggtcaataacaggtgtttgcgaggatgtagaaaaactagaattcttgtacatcactggtagaaatgtaaaatggtatggcttttgtgcaaaagaggttggtggttcctcaaaaaattaaatgtggagttactatatgacccagaactttcaatcctacatatatacccaaaagaattaaacatataggctcacacaacaagttgcgcacagatcttcacagcagtattatttataatagccaaaaagtagaaacagcccaaatgtctattaattggctcatgtataaacaaaatgtgatatatgcatgcaatggaatattattcagccattaaaagaaatagaatgctgataatgacatcatattgtatgattccatttataggaaatgtacagaataagcaaatccatagaaacagaaaagagataagtgcttgccagtggttgggtattggaggaatgggaatggctgctaattggtacggtgtttataatgtgatgaaatgttttggaaagagatactggagatgattgcccaacctcgtgaatatattaacatcgactgaattgtaccctttaaaatggtagacttcatggtatgtgaattat

SEQ ID NO: 32495 - DNA, 2300 bp, Homo sapien
gagtgaaactccatctccaaaaaaaagaaaattacgctaaatatttttgttcagccattttaacatatattaaatgtaaaatctagtatgtttattgagttaattatgagtaaataaatgtaaaacttggattgtgttgtcagctttttaaactcttatttcagtattaggtatattcagatgcttacaaagacatttttagacaactgagcatcaggatttatcacataggtcaaaaatttaaataaacaagtggctatattatgtggcccatgtgtggagcagttttgcttttgttcagtaacagatgaattaagagccttgcccaggaatcttggttcaggatgggtggtctacacatggtctgcttgttaagtaccagtccattatgtgccaggtagtgattcctatttcagagatgagaagagaaccatgagaaaaagtaggcctgtgtaagattaaaagtaagactgcaggcctggtgcagtggttcacacctgtattcctagcactttgggaggccgaggcaggcggatcacttgaggtcaggatttcgagatcagcctggccatggtgaaaccccatctctagtaaaactacaaaaaaaaaaaaaaaaaagaatagccaggtgtggtggcatgtgcctgtaattccagctactcaggaggctgaggcaggagagtcacttgaacctgggaggaggaggttgcagtgaaccaagatcacaccactgcactccagcctggatgacagagggagactccatctcaaaaaaaaagtcattttcttaatagtggataatttaagttgcaaaaaaaaaaaagcttctgaaatactgatttggttcagttaatattttctgttacaattttttgaaggccaaaagccatgtagtttcttttacagattgttgaactgcgatatgaatttctgtaattcccactgatcagaatcaatagtatttggaatgaattttcttccatttctgaatatgtggaagacatgagggtatatctatacagacaagcatataaagggtgtgtgatatacagtcttaaaattgtgaatcttgggatctctggcaaccttgtaagtagttgtgatgagtttccaaagtgaattggcacagcatatcaggacaattctccttgtctactctatttttgttgtttgttttatggcattaatctagactgaccattcccgaacaactggccattttctgaagtgtattttgaatataagaggcaaatatttgcctcttaattttcctgcagtgttgtttattgtgacaaagcctttcttcacattctttatttctttttaacttttcaggttactggccaaggttccctttcttagcgttaaattagtccagtgttaactcctaggaccttctgttccaggagtgctctcaccaagttgaatggctataaacatcatttgtttattaatgatactttgtatttgttcccagcctgttctcaacttgtatatatacttttcgaattgagtctttacttacattatcctattttacttactttatctctacatctgcccacaagcttcacctgtaagttgaccattttacttaatgccaatctcatgctttgctcaggccaaaaatcttagcgtcaccttttcttcccacatggagtcaatcaacaaaattcattgtttaattttacaattaaaaatgtacatttattgttcaacaaattgctgtacatagtgatgcgtacctgcaactccagctgcttaagaggctgacgcaagaggatcccttgagcccaggagttctgggctatagtgccttatgattgtgattccgcctgtgaatagccactgtagtccggcttgggcaacatagtgagattcccatcacttttttaaaaggggagaggattggtggacttttaactaaacaactttaatcaaaacttcattttttaaaaaagatactattagagcagttaaaactttgtgttgatcatcttaacatttttaaaggtagtacaattattcttagtccgatttgtgtactctagtttcctagccctgtttctcagtgctgttttgctaatatctctaatagtcttacttaatcttgttgaaagtagcacttttgaggttaataaggtttaaattaataacccccattgactgtagtctataatactataattttttaaatggcaaaatgccctctgggagctaaggtgtcttaaaagcttagagcaaatcctgttaaatgggacaaagtctcaattcttttttaataagacaaaaacacttta

SEQ ID NO: 32496 - DNA, 2300 bp, Homo sapien
tctctcctccgagttttctttcttacccctagaaggcctagataaccttgatctcacaactaaactaagttttcaagcaccaagaataggaagcgccatgacatctgctggagcgtctctccgcaattcggacccccaaaaaaactccttcttaagcagcaaaaaaataaaataataaaggcgccttaagtcactctcctccacccctaatttgcaccgattccactgaagcactcaggataacacctcacttgccacaagtgttctccgtttcctagctttaaacttcatttcttcaagaagtatatctgcgttctccatccccccatggaagaagtgatccaagaggtattttcagaattatgcttccttcccacccccacgctttcctcttggcccgagccttccttttctcctaccaccccatgcccttgtccccgcgggttaccttattaatccgtttcagcgccatagtgtgtgcttgtcgtctggctcctcactctctcggtgtatgctcaaaggtccggccaaaactcttgattatcccggcggcggggcaggattgtctcgtctcacaccagctctgccagacacaggcgccttttgcaaaaacggagcagatcagcactcgcacaggccccgaagagcccctgatgaatccaggtcccttaagacagccgcgatccggggtgggtggggtggcgtggcaaagccaccaacagcctctgtaccgtgctttcggcccgaagtgggggcgagggtgacgggaagagcggaggtggtggctacaagtttaacttcccggcctctagaaaggaagagacccgggtgggagaggaagaggcgtaggagaaaggggtgggtgcggggcagggtccggagcccagcagaggaggagccggggcctagtcggcgctataccggcgtcactagggcaaagaaaggcaaggggggagggggaagcataagactccggacggacgccgggctgctttcggtttctgtccaaaggtgcggccgggaaaaggaaagaaataaaggaagggagacttgatgtgtattgctatcctcgcagcgagctattctgtgtcacccctgacgccaccgtacactcactccgccttccagcgcgctcccgcgcgcgcccgcccagccacctccaccacgcgcccgcgctgtccctgaggctccggcttaggcgcgaggacgcgcccattccccctcctcctccagcaggagaggccgcggcttccccaaccttcccaccctaacccaccgcacccaataggctggccgctcaagccgcccaggtcccgcactgcccctcttacccggccggccactgggccggcctcccttccctgccctagccgtccacacccacgcgtacagaggggccggggcctccctcaagctgcggcctcggcctcctccccgcgcggcagctggtgcctccccggccctacggggctcacgcgcacgacacagccacaagatgtccgctctgacggaactactgccagctgccacgctccgcccctccccctcctcctgcctcttcaccgccgcggatcagtccgccaacgccgccgtcccgagcacaggaccgatgtgaggccgaagccagacggcttgcttcccacgtccggggccgagtgaatacgtgtcaagcccttttccttctccttctcggaacagcaccttcttactaaacagatcggagattggaccaggagggcgggggagggaggaagatcatgagctggggggagggtgaacgagtggcggaaacccttaggctcagagaagcatcgagaaccggaaggagaccatgggaggaaggtaaaggaagcagccgctgcgcgatccagccccacgcccctccccacagcgtcccccagtttcctcacttggtatcgaggagacgactctcgcgagaacttcgtggctggctaaccgaagcggtagctctgcaatgacttaagagcagttttgtgcgcttttcctgacggggttccgcctccaaaatgcataagttctcgcgagacgcagtaaggcaccggctcgaactggggcgggccactgccaggaaagcaacgcccctgaatgcttatgccggtggttggtagaggaaatggaattccccagactggtaagagcgcgcgcagacacagccttgtctcacgcgcccaatcaggagcgtgtggtgggaggtgccaaggattaattaccagatacctttagtctagctcgagccgggattttgaggtttccggtggagcaggtgagcagtatttact

SEQ ID NO: 32497 - DNA, 2300 bp, Homo sapien
actactatacatttgtttcacactatggccagttaatgtctgactggttactttaataactgacatttatacagcactgtagagtctccagtgtcctttcacatatattatgacactttaaccacacaatcaccctgtgagaaaggacagtcattattacttactttagcggtgaagaaacggggttagaagataactaaccaggccaatatcaagcaaatgggaagcaataactaatctgggttcctccctccatcttcatgcctagtcctgtgcttttagtatatctggctagctatgagagagaacacagattattcagggaggagggaggggccagaggtgttactgaggtgagcctcatgagcagttaggccatgaggtaagcacttcagtgctttgctactcacggggtggttcagacgagaaaaatctgtatcacctgggagctagttagaaatgtaggctctcaggctccaccactgccctaccaaatcaaagtcgtattttcaacaaaaccccaggtggttcctatggacactagtttgagaaacactgcttcactagtgacactacatggtcacttgaacagtatacattagactacttatattcatcattgttgacgtgttaagtttttattaggtaaaactttctgcaacagttttcaaattaagtgtatttttaaaacaagtttatttttccaagtaattgaagatctccacttcggtaactggggtcattaaggaatgttaaaaaaccttaagctggtcagtgcttacccacttttaaattcctcataaaaattaaggtctttcttttgcctgaaggatacactagagagcataactgccgtctccatactttaaacccttgactaaaacaggccaatcctactgaggtaaatcccacctcccaacttggatatttcaggaagtattgtattgtttttctgactctaaactctacctaattaactaattagtctcaacactttctggctcaagaactgaaacacagcaacagaagctaaagtttgagaatttaagcttgttcccacatctacaccttggcggacggcagcgactgattacggagaccagtgaaaaccctgcccctaactctctctgtcctagccccatccactcaattgagcttgactcagcctgctccctgctgttctcagtattgctcccttagggtcagacgtgcactagacttcagcacgtgggagcgctgatgagcggccaacctgggtctatttaaaactactattcccatctcgaggggcgcctcctcccacaccataaccagcccaggagggcaggcgagtaaatactgctcacctgctccaccggaaacctcaaaatcccggctcgagctagactaaaggtatctggtaattaatccttggcacctcccaccacacgctcctgattgggcgcgtgagacaaggctgtgtctgcgcgcgctcttaccagtctggggaattccatttcctctaccaaccaccggcataagcattcaggggcgttgctttcctggcagtggcccgccccagttcgagccggtgccttactgcgtctcgcgagaacttatgcattttggaggcggaaccccgtcaggaaaagcgcacaaaactgctcttaagtcattgcagagctaccgcttcggttagccagccacgaagttctcgcgagagtcgtctcctcgataccaagtgaggaaactgggggacgctgtggggaggggcgtggggctggatcgcgcagcggctgcttcctttaccttcctcccatggtctccttccggttctcgatgcttctctgagcctaagggtttccgccactcgttcaccctccccccagctcatgatcttcctccctcccccgccctcctggtccaatctccgatctgtttagtaagaaggtgctgttccgagaaggagaaggaaaagggcttgacacgtattcactcggccccggacgtgggaagcaagccgtctggcttcggcctcacatcggtcctgtgctcgggacggcggcgttggcggactgatccgcggcggtgaagaggcaggaggagggggaggggcggagcgtggcagctggcagtagttccgtcagagcggacatcttgtggctgtgtcgtgcgcgtgagccccgtagggccggggaggcaccagctgccgcgcggggaggaggccgaggccgcagcttgagggaggccccggcccctctgtacgcgtgggtgtggacggctagggcagggaagggaggccggcccagtggccggccggg

SEQ ID NO: 32498 - DNA, 2300 bp, Homo sapien
tttatttgcaactgtaaagtgggctctctgtaacaacaggtacatgaataatgttttaaaatttaacttaatcttagcctgctttatcctaaggcatcaaaatgcttctaggctatgtttcttttgattttaaccatggcaaaatataagcagaaacgtaagtccacttatgcaaatacaaacttgtaaacagaaagcccaatcaaccaatgaatttacttcactgcctaacaataatgagtttgtgattacacaatcacttgcctttataagcttggataatctagaactccatatatattagttttgttttttgttcttgtttttttttgagacagggtctcactctgtcgcagtgatcttggcccaccgcaacctccgccttccaggctcaagcgattctccggcctcagcctcccaagcagctgggattacaggcgcccgccactacgcccagctaattttttgtatttttagtagagatggggtttcactgttttggccaggctggtctcgaactcctgatctcatatgatccacccgtctcagcctcccaaagtgctgggattacaggcgtggccactattactactatacatttgtttcacactatggccagttaatgtctgactggttactttaataactgacatttatacagcactgtagagtctccagtgtcctttcacatatattatgacactttaaccacacaatcaccctgtgagaaaggacagtcattattacttactttagcggtgaagaaacggggttagaagataactaaccaggccaatatcaagcaaatgggaagcaataactaatctgggttcctccctccatcttcatgcctagtcctgtgcttttagtatatctggctagctatgagagagaacacagattattcagggaggagggaggggccagaggtgttactgaggtgagcctcatgagcagttaggccatgaggtaagcacttcagtgctttgctactcacggggtggttcagacgagaaaaatctgtatcacctgggagctagttagaaatgtaggctctcaggctccaccactgccctaccaaatcaaagtcgtattttcaacaaaaccccaggtggttcctatggacactagtttgagaaacactgcttcactagtgacactacatggtcacttgaacagtatacattagactacttatattcatcattgttgacgtgttaagtttttattaggtaaaactttctgcaacagttttcaaattaagtgtatttttaaaacaagtttatttttccaagtaattgaagatctccacttcggtaactggggtcattaaggaatgttaaaaaaccttaagctggtcagtgcttacccacttttaaattcctcataaaaattaaggtctttcttttgcctgaaggatacactagagagcataactgccgtctccatactttaaacccttgactaaaacaggccaatcctactgaggtaaatcccacctcccaacttggatatttcaggaagtattgtattgtttttctgactctaaactctacctaattaactaattagtctcaacactttctggctcaagaactgaaacacagcaacagaagctaaagtttgagaatttaagcttgttcccacatctacaccttggcggacggcagcgactgattacggagaccagtgaaaaccctgcccctaactctctctgtcctagccccatccactcaattgagcttgactcagcctgctccctgctgttctcagtattgctcccttagggtcagacgtgcactagacttcagcacgtgggagcgctgatgagcggccaacctgggtctatttaaaactactattcccatctcgaggggcgcctcctcccacaccataaccagcccaggagggcaggcgagtaaatactgctcacctgctccaccggaaacctcaaaatcccggctcgagctagactaaaggtatctggtaattaatccttggcacctcccaccacacgctcctgattgggcgcgtgagacaaggctgtgtctgcgcgcgctcttaccagtctggggaattccatttcctctaccaaccaccggcataagcattcaggggcgttgctttcctggcagtggcccgccccagttcgagccggtgccttactgcgtctcgcgagaacttatgcattttggaggcggaaccccgtcaggaaaagcgcacaaaactgctcttaagtcattgcagagctaccgcttcggttagccagccacgaagttctcgcgagagtcgtctcctcg

SEQ ID NO: 32499 - DNA, 2300 bp, Homo sapien
aacagaatagtccagaggacaaggatattcaagttccatcatcttcaggataaaaaagctccagggtttacctccaaactctctctaaaggaaatcccatcaaccttttaaacatcactttgtatacaccatcttctgtactgccctagctcaaaaacatgaacctgtatctaaacgtgtttgtagaatttccattgtaagttttactttaacaattttgaacaattataatgatagaaaattatttaatctagattttggtcaactctattactgatattcttttttagtgaaggacaatcacaaacactaaatttatacagtccagagaatgaaagattgctttaaaaaattccttccttttctcactgtaaaataaaaataccaaggggaaaaatggaaagtatttattataactggctgttacactgtcatacacaatgaaatactggaccattagcagttcgttattatatgttgttaagtgtagaactgtaaataatgaggcatattattaagatatcacacacattatccaatcagcaagtgcacaacttcggacattttgacttcagccaaaatatgaaacaaagtcatagcaagaaagttatttcaagggagtgaaattttctcctcttacccttcaaatcttttagagatattaataaaaacaactatccagcctgggcgatataatgggactccatctacatacacacaaaaatttttaaaattcgttgggtgtggcagcacacgcctgtaaacccagctacttggaaggctgaggcagaaggatcccttaagccggagttagagtctgcggtgagctatgatctgaccactgcactacagcctgggcgatagagcgaaaccttgtaacaacaacaacaacaacaaaattaaaaccttcaagatcaagcttgcccaacaggatggctttgaatgccactcaatgcaaatctgtaaactttcttaaaactttatgaaaaaaaatttttttttagctcattagctaccattagtgttagtgtatttatgtgtggcccaagacaattcttcttccagtgtggcctagggaagccataaggaccccctgcgctagacttcagcagaagccttgtaacataaagaaaaccatacataaggctttagattctttttttttttttttttttttgtgacggagtcttgctctgtctcccaggctagagtgcagtggcacattctcggctcactgcaacctccgcctccctggttcaagcgattctcctgcctcagtctcccgagtagctgggacaggcacctgccaccgcgcccggctaatttttctatttttagtagagacggggtttcaccatcttgacctggctggcctcgaactcctgacctcgtgatccacccgcctcggcctccctaagtgctgggattacagacgtgagccaccgcgcccggccagctttggattcttttaccactttcccgaaggaaaaggaactgaaaatatctaaggaaggactactacgaatcttctctgagtggcaaaaaccagaggtttttggagctagggctgcagttaagttgccaaggggcagagatgtaaacagttcctggtttagttaaaatattttaatttttatttttttaagcctggcctttgggtgaaggagtaaaattaggcactggggtctgggtagggggaggatactcatgggcgagtatgcaaccctagggccacagcaaccaaactgtaggggaagaggcggggcgagaggggacgaagtagagacagcaagagactcacttttgaaaggcactttcggttagaaagcattctcacatgcttatctcatcgcacacagtatcctttctgctggtctccagcatctacagacgttaaaggcccaagaggagggccaccttcacacgagattccgaggagggcctcgctacccgccagttcccgcgcctcggcagtccgccgcgagcgtacgtcactcgcccgccgccaatcggcgcccggcaggtcacctctcctcccagggcccgccgccccgcccgccgcccaggccgaggccgccagtgcccgccggccgcttccgctcccggcgcaggcgctgcagcttggccagagcggagggggctcgggagaggagtggacgccgctggccaggatggtgctggagagcgtggcccgtatcgtgaaggtgcagctccctgcatatctgaagcggctcccagtccctgaaagcattaccgggttcgctaggctcacaggtaatcctcccccatcagccagtccc

SEQ ID NO: 32500 - DNA, 2300 bp, Homo sapien
tatttaagtgaagacatccaaaagggagaaatatgacaactggtatttgcttacttgccaatgaactattacataatgaattttaaaaaatagaaacatttctaatttccagttgtaagggaatgaatggttaggcccattgtgatgttaaaactaaaataagtatttagttgttagggaaaaaatgaggattatattaaaatatgtaaagtacttaagtaaaagaagtggggaaagccaaaattttatggaattgctgcaattctgtcagagtaaactggtaggatcaaaagatctgatgtttataaacacttgatgtgaaacgtttttcattttattttacttttgcattgcttctgatgtttaatgttcctttttaatgtttattattgttaccatgctttctattcaattgcatgttttctactaaaactcttaatatttaaaaaatattaaaatctcacaatccactcaacagagcgtctgtctgaccataattcaatgaatctctagatttggaagagaatttgtcatctagtttatcccttctaaatctatcgaccacccaccaccagagtctttttgtttgtttttttcatctttgagaggggctatcactgaagcaccacatttgtttggggaaagcattctttaatttaaaaaaaaatcttccttagactgaaattcacctcccaataaccttcactaatttggttaatttgttatcagttctatattttagtctacacaaatcttatttttcttctaccagacagctgtgcgattgctgtattttaggtcaggtactacagatctttagaacgttcccggcgaagcaaccctatttacctcagaattatcttaattcatgtttgcactccctgataacctaggacataggagttcaatacttgctgattccttcaccatcctactcggtctgagttccgtttagaaatatcccccttacaatgaaatgctcataactcaacacaatctcccaagtgttgactgcattctggagattttcatcctttagatgtgaaatcctcatgagttgtgtgggttaagtgagggtccttaagtatagaacgttacatatattcactaaatttcattttctaagatttcactcctcataccggccttcgaatactttcttgggtaaggtatctttcttccaacttaagttaccgcagcgggccccgggaccgtagaaacggagatgacctcaaatgccacctatgataggtcaattctaacctgagggaatggaggttatctcctaatttcgttactaaataaaacggtcatatacgtgttacgtgtaagtctatatttctctcccacacactcccacccacatgctgagggtacaacccagccggtagctggggctgcctgttacatgaggccttagataacgacgacttagcccgctttaaaataaacaagtacgctacagagagcgatgagcaggacaggagatgaaagagactggcctgttcccaactcagcaccttctctgcaaaaacctggtatcttgccacggaatgacaccggagacaactccgaggacaaaagaccctggggcatcaagcacccggagactgcctcacaggcgttccccaggcagctgcgtcggcgcgcgcccaccttcctctgcgcgcggggatcacgtgccaggcgccgagctccgtcccgccccttggccctaggatttttacgcctccttcccccgcttggcgaacgtgcaaggatggggactggctgatgggggaggattacctgtgagcctagcgaacccggtaatgctttcagggactgggagccgcttcagatatgcagggagctgcaccttcacgatacgggccacgctctccagcaccatcctggccagcggcgtccactcctctcccgagccccctccgctctggccaagctgcagcgcctgcgccgggagcggaagcggccggcgggcactggcggcctcggcctgggcggcgggcggggcggcgggccctgggaggagaggtgacctgccgggcgccgattggcggcgggcgagtgacgtacgctcgcggcggactgccgaggcgcgggaactggcgggtagcgaggccctcctcggaatctcgtgtgaaggtggccctcctcttgggcctttaacgtctgtagatgctggagaccagcagaaaggatactgtgtgcgatgagataagcatgtgagaatgctttctaaccgaaagtgcctttcaaaagtgagtctcttgctgtctctacttcgtcccctctcgccc

SEQ ID NO: 32501 - DNA, 2300 bp, Homo sapien
gcctggagcatagaaagtgattggcacttgagattgatgaagagaattagagataagactagaaaagaaagttggcactgaaatcatactaaatagatcattggctaaatatttttattgaagtactttcagaagtatgaaactatgtagaaagtgttaaaactttttttatcatgtcatgtatagttttaaaaaattgctctcagttaagattctccttattcctcaaaagcttttgctttccatgactttgttgcaaatataatcaatttacttatttttaaaacttaatttttataagaaaggttatcagatgattgtttaaatgttttttattagtaaattttcattatattgtctcccaaagaaccactgtatttttttaatgtctcagaacattatatttttatatgaatcatttatgtacctctctgtaacaagtgggaattgcttcatggcatttggggagtacgtaatattatatttatagttgactgactcaaatccagcctgagccctctggcctggtgagaattccaaaactccatttgttgatgtgcgctccatcttccttacatggaccctaaagcacttacctctccaggagcccattccttctagagcataagagtagtgccttggaggcaaacagactcctagcaaaggtcttccttcccaggtttaccatttgtcccaactcccattatctttagggatctacctgcttttcctgtgagtacaaaacatttccttttcatgagtacaaaacatttccttaaccctataatcatgaaaccctgtctactctcctgaaacgaggaagaaaaataaatccttgctgagatgtctataacacgttgaaggagggaaggtgttaaaaacaataaaaagggcagggctgtggtggctcacgcttgtaatcccagtactgtgggaagccaagacgggcagatcacttaagtccaggagttcaagtcctcctgggcaatatgtgaaactcctctctactaaaaatacaaaaattagccgggggtagtggtgcccacctgtagtcccagctactcaggaggcaggaggatcgcttgaaccaaggaggaggaggctgcagggagcctagatcgcactgcactccagccggggtaatagagtgagaccctgtctcaacaacgtcaacaaaaccaataaaaagataatttcgtatttaagttacccaagaaggaacggtaatttggatcagatcttagatgatgactaagaaaaagaacactccggtagaggaattaactttacagaacgcactgaggcaaaaaggaatacagtgttcaagagtaaacattgagtgtcaggagaaacattagataggaaagggcagtttgtctttctaagaagtttacactttctccaataacagttgtttttgtcttttataggaagcgcggattctattactggaaactttgggactgaaaggccaaagcttctgggcccaccatcaacgcagctccgctttcatttctttcacatacaactttccacataagatttcatgcggaaaaaaaaaaaaaactcacaaaggttttatactgataacagtatattaagtgtttactttgtacacagcgtctttgttccagacacttgccatgtctcatttattctcacaccaccaccacagcgtcctttacagatgagaagacaacctcagggagacgatgtatttgcctaggtcccatagctagcaagtgacagcgctgcagtttaagctcaggccgtcttggggagagaccgtgctcttctaccattgcactttaagctgactttaggggaaacacaatctgagttttgacaagtttacttctggcacatgcagtcccgagcactgctttttggctaaaatgcccagtgatgtcaactctgtccctggatttctacaacccgatgagtcaatattcagaagagacgtcgaaaggaaagggttcaatagacagaaaacacaccagacagtcccagaaaccccagaaccctcgcctctgccggcgcggacagccaagacgtcacttaaacgcgctgccgcctcctcgccccgccccgcccctgcgcggaagtctatccgggctttcgcgtcaccaccctgcccacctgggtggcgcgtggcttacgcaacggtcactgggctcctgggccgctcccgggccagcgagggctgcgaaagaagttgtaggtacggcccatttttcttaacgccgcccttccaagccctttggcgctagtcccgggtctgccgcgatcgtttccttgcg

SEQ ID NO: 32502 - DNA, 2300 bp, Homo sapien
gttgaaaacaaggaaaaagaattcctttaaaaagctgaaatcaggctcttcaaaaccagaaaaccaaggaatagtattttcaaggaatggagaaacaataacactcaacctagaatttaacataaaactgaggtatacctagaaaaactatcctttaagaatgagaataaagataattccagatgatacaactaagaatttactgtaacagattctcctgagaaatacaacatgctgtgatacagagtgtttctatgtcatgaattagctcatatgcaatggtaaatagaattttgttagagtgtatggaatttgcagttttgtgtataatttttcctggcccataatattttgtatcgtcaagcaatagcaagtgaaggcaaagtgaactggggaagaaaagaccaaatatatgctttcttacaattaaagataaagccttccctgcatgaggaccttttaaaggacgaaatctctgtggaagtgctgacttttcatgcaattagtagctggtttaggggcttcaaggactcaaacattctacaacattaagctatctaataaaacacatgtggatgaagcggctgagagtataagctgaggtaaagaagctgccaacgcttttccttttgttgaaatttattgtattgaggcagagggctaaaatatggatcagattttgatggaactgctctctgtttaaagaaaataccctcaagaatttccatcttgaagtaggaaatgggaggccaggtttaagtctgtaaagaacagactgcctgtatgggacacaaatgtcagtgtgtagattcatctgtgctaagactcttattaggattgttttggtttttcttagtgctttggccaccagttttgagtggtctgccccaactctctttttcccataaacttttcaatttttagtgcacagttttgtaaaacacaagttttcaaatggaaacatttcactttttttttggcagggtatcgctgtgtaacacaggctggagtgcagtggtgcaatcgtagcacactgcatcctcaaacttctgggctcaagggatcctcctgcctcagcttcccgagtagctgggattacagatgcccaccaccatacccagataatttttatattttatatttagtagagacaaggtctcactatgttgctcaggctggtttcgaactcctgagctcaagcaatcctcctgccttgacctcctaaagtgatgggacaggcataaaccaccatgcctggcctatttcacattcttatagaaatgcttttcctaaaggaaatgctttaggcagcaggataattgtcccagatgaaaaatttgaggctggatgaggaggttcacaccagtaatcccagcactttggaaggctgagacaggaggatcacttgagctcaagactttaagaccagcctgggtaacaagatgaaaccctgtctccactaaaaaatttttaagaaattagccaggcatggtggtacacacctgtagtcccagctacatgagaggctgaggcaggatgatcacttgagcctgggaggttgaggctgtagtgagccatgattgtgctactgcactccagcctgggctacagagggagaccctgtttcaaaacaaaaagaaagaaaagtttgagatgccataatgaatgatgatttcaaaaaaggtaccttagtaggtaattctaaacaaatattgactataaaaaaagtaacaataatgtctaattcaagacagaactaaatttgtgttaaaattataaagaaaaaagtgaatggtgaagaaagtcaaaataatggttccttctggcagtataaagggagatggatggggaggggcacataggcagattcaaaagtactggtaatatccgatttcttaagatgttggcagttacccagttggtcatcttactgatactctttacagattaaacatgattataaatatttgcattttcattcagtatttatttttacaaattattttagattttgtcaaaacctccatgtgacaacttattgatagtaactagtattcctggtttatttcagttaccatcattgttcttctgtgggctgtagtttggtcaattactggcagtgaatgtcttcctggaggaaacctatttggaattataatcctattctattgtgccatcattggtggtaaacttttggggcttattaagttacctacattgcctccactgccttctcttcttggtaagtgctaaatgtttcctgttctatccagagtaaactatatttttaagataatagt

SEQ ID NO: 32503 - DNA, 2300 bp, Homo sapien
taaggcaggaggattacttgagcccaagagtttgaggctgcagtgagctgtaatcatgccactgcactccagggtgacagagcaagaccctgtacctaaataataataataatttccacttcatttttcaatattcaaatatttttatataattctgcattgttctgtatgtagatcctaattttaaaattttacaccatcataaatgaacaaaggtaggaaggagtttggcttcaatagcttacagtaaaaggagtaaaggagttcagcctcaaaacgatattgttgacctgttatgttatgaaaaataatccagtgtttatacttaacggatgccatcccttattatttactattttcttagtctaactaaacaatctttattaaaataagcaatgatatttgacatgggcctaagaaatatatagttagctaacaatattgtcagttagagggatttcttttctaaattaagtacagatttcttcaccaaactccaggataacagaaaagaggacataaaatttggacatagtttctggataaataaatgtaaatttaaatataaattatgtaacaggaaacaaacgaaattaaagaaaataaatttttcaagaaaagtaaatttatggatgttaattctgtaacattgtcagggcaaagttttttgtttttattttaatttaagggttttatgtttgttttttacttgttgcaacctcaaatgaccaaatggtatgatgcacactgagatactcaataaatgtgcagtgattcttagccttttttcctagaactttaatattaacatggaaaattctgaaatggacaacaaaaagataacactttgtgtatggggaagaatatcatgcagttgatgacggtacattaaaattcacacaaaaggacattttgactagcattcagaaagagtccattgattataagattatctatgaggttttggaccgggcactacactaccgaattatggctaactttggtttgtgatctagaccaagtcacccaatctatcttggattttagttttctggtttatgaaattaaggagttaagctaaatgacttgggtttcttttcgtgtatcataatcaaaatgctgtaacttctctagtgaattcatagaacactgactcttacaagtatgtcatgaaatactttatgctgtgagcaggtatacatgtataatatatgtatagctatgaacaaataaattttaaataaatgcacaacgaattctacaaaatgggctccaacattaacaaatgatctgagttagtctttctcacagccgaccataaactataaaacatttttataaacactatcagcaataaaaacgaagtaaaatctagccaaaaaattcaatgttctccaaagtcatgttaatcaaatcaggtgatatattaatgaagtacatatgactaaaaggaaaaatatatgtcattcctgtggtaagaggaagctgaatgtcactagaaatttttacaagctttaggagaggaagagttccgtttaggaaaataatcatttcagatgatctgaagaagggtattggatggaacctatccaataggttcatcacaaaagaggacctgagagacaagaatgaatggtttctgactggtggagaaatttgaggataatctcccttgcttgaaaagcggtgattaagattggcacttgcttacaggagtgaaaaacaggtaaggggtgcgcgcgtcttaacacacacaagaggaaatacagagaaaaggaagacacaaacatgaaatgagaattaaatgaaatagaatcacactgctgatagaagggttaaaaatctaaaatacaacaagaagggcaggtgttaagcgataaaggggggcagaacaagtcttttatccggccatttaattggtcaccttaagaaagaatcctatcttcccaccgcagctgagaagacacttctaagaggtacagctaaaaggtggaggactgatagacaacttagaggttggtttcgggaacgataaaacaagtaacgggctgcccggcctgcgccgcggagtcccgaggagcctgcgctgtgctcctctcgcggtgtctcgtcatctccgggaagactcggcgcctgggtccgcgctctctgggtaagctttccgggaagctttcccgggagctcgctggtcctggccccagaagcctgcggacccgcccagggaggataagcagctgaaagaccgcgcggtgccgctccgaggccccgggacgtgggcccatggtcggcctggcgccacc

SEQ ID NO: 32504 - DNA, 2300 bp, Homo sapien
taccagctctctggggatccgtaaatccagtcaagttgacacctaaaattaattatcacaaacattgtcttgagagcctggcagaattatattcaggaaacttattaagaaactgccattcactcagcaaatatttaatgagcatctactatctgccaattactgttttaggcactgaaaggcactaccaatgtggaactcatattgtagataagaaaacaagtaactaatactcttttaatacgagctaatcacaatgtaaaggtgtaaaacatagtccccacccttgaagaaatttagtctgctgagaatactaatgggtaagcaagtatttgcaataccatgtgacttaggctgttatcaagtaagcattgttgctgaagattacagagggatgctgaagaaagctacatcaagaagcattggagttggctttgattagagaactctcataaagtctgttccaaaagcctcaaaagtcaaagggcattattagtaaagcaggaacaaagctagatgtgattacagattgttagagccagcattagaagttgctgaaacaatgaacaaggagggacaattttaccatagacctcatatagacacatgcagaaactaagtccagtttttaaaagaacattaaaaagcgcaacttttaccatccattataattaaatttctccaacaatgtcttcatcataagaatcactaacatgtattaagcacctgtgtggcaaacattgtgctgatggattcacaggcttagtcgttcctcctcaccacatccctgaggtaggtgctattttaccttcattttacagatgagaaacataagaggttcagagatttaagtgatttactcacttagctagtgagagagagatatgggacttgctctagtcttactgacgccacagtctttgttcttatcccctgtgactgttagaaatcacttagctccatgtaacaaaaaacgtgaaaaacactaaagtttattgtcctcacataagaagtccagaggagttgttgccttgaggctgtcatcagggccgcaggctccttctcttgctggtccctgtcgttaatgtgtgcctctggcctcagatgaactcactaaatggctgctctgtcccacggcatcctatcttcattccaggcaaaaagaaagggaggagcaaaagctaaaagcctttcagaagggcttacttttctatttaagaaggaggccctcctcagaaattcccacctgcatttcattggcaacatctatgctgcttggccacccctagcagcaaacaaggctatgaagtagagacttttgttttccagctttgacaagtgaaaaaaggggaaagtgagttggatgggtgctgaggaaaccaatttatacagtacatgtacaagtagcctacacaatcactctgctcactggcactacagataaagcacatgttgctatcctaacctagagggctcatgagatctagtcctttctttttgaccttatatctctgttctcttcagccaaactggggtttttcgctgttaacatgttcccttttaagcctccaccctgtcatccaagtttcacgttctccccaaccccattcccagtgtagtaaaaggctcctggcattctgccactaaatgtgcattagtgttagaatattctgagcatgaaaaaataaaaatcacaactgtatctcaaacaaaaaggatttttttttttatttctctcccttaaaacaatccaggccaagtgacaggaaggctccagaattttcagtgacctgggttccctctattttgttgctctgctatcttccacacgcagtttccagctcagccaatctcgtctaccctggcaccgcatatagtaggcataaacaaaacagagaagtggagagactgaagtgaaggaaatgatttccgcatcctaagtaagctctaaggtgcttttccacttttcaccttccacttggaattcatagttctacctgaattccactagatggcagcacatacatttataaagtgtatggatggagccactaaactctgaaagcagggaaactacaaatcccagcatgcattattaagcgcttgacttgcttccagacaaaggttgtctcaagtttgttgctcaaaccgagttctggagaacgccatcagctcgctgcttaaagtaagatttcctaatacttttgaaatgaaactttagaacggaaagaggggaggtttaatttttagatgttgtttttttctgcacgttgcctgtttcaaaattaatctgagcagtt

SEQ ID NO: 32505 - DNA, 2300 bp, Homo sapien
taagagaatagcaactctacaacaacaggtactgtgtctattctatttactgttgtgcttcctgaccttagaaccgtatctggcacataacagttgttcaatgaatatttcttgatgaacaatttggaaagtcagatgaaaaaattggatagagagcatataatagagagcctggcatatagtaaatcttcaataaatgtcacctgctgtgatgataaaaaaagacagtcatagcaacgatcataagcacaactatgaaaggctgatgacttctctttactcgtgaaccaatctcctcttgtctcattagaaattttgattaatcacatctcccttcttcttcataggttccttgccttcagctgtctcatatttgcccacaattaaaacaaaaacaacagttaaaatataccttccttaactctgtattttcttactagatacaaccaagtatctttacagtctagcaataaaaaagagttgtttatactacctcacagctagttaaccaaaacaaatcttgaatgaatagactcatttttctttactgttcttatctataaactagtttctttaaattgaaagaaactactttcatctaactcagtctaccatctaactcagtcctcactctgcaaggaaattaggcatattctgtgtatctttccaaaaattatgtatgtatatccagacatattctgtgtacataaccgtgcaccttgaatttctcttaataaatgaaacatcttggatagctttctaaagtacacataaaaagctaggccaggcacgatggctcatgcttgtaatcccagcactttgggaggccaaggcaaggaggattgcttgagcctaggagttcaagacctgcctaggcaacactgtgagaccccactccctaccctaatccccccaccaccccgtctctacaaaaaaatttaaaaattatctgggcttgtgatgtgcctgtaatccaagctactcaggaggttaaggtgggaaccccacttgggctgaggccaggagttgagcctgcagtgagctgtgttcagcctactgcactctagcctaggtgacaaagcaagaactcatgtttatttaaaaaaaaaaaaaaaaaaaaaagagagagagagaagaaagggaaaataagcattatttttgggaaaaaatcactgtatttagaatagctttccctcttagttaataaaagtaacaaaccaggccaggagcggtggctcacgcctttaatcccagcacttttggagaccgaggcaagtggatcacctgaggtcaggactttgagaccagccttgccaacatggcgaagccccgtctctactaaaaatacaaaaattacctgggcgtggtggcgggcaccttgtaatcccagctactggggaggctgaggcaggagaatcacttgaatgcaggaggtggaggctgcaatgagcagagataagcaccactgcactccagcctggggtgacagagcgagactccgtttccaaaaaaaagaagaaaaaaaaagtatcaacccattactcaatgagtttttcagtcctcggtatttattttccctaattcaacctctgaggaagccacagctaatggaaacgagttacagagagagagaaacaggagaaaagcctaaactcagattttctaaggcgcacaacaggcttgtcacgtttctggactggacagcgaatttcaactcttgctgttgaaagtttattttaaactgttggtgcagtttctttaaaagacggcaattctgtttgggtagtgaaaaatacatgtatctctacctagtttcgtctacaggttccaaactttttaaggatggggtggaggatgacgttcgctagcttttggcagataatagtattctggtattccaggaccaccactctctgcccactcctgggagcccctcccttcggccctctcctccgactctctgctgggccctttaaatcccctctcctgtttagcagtggtcacgccgcccgccttgcgtcccccgcgctgctccgcacgtggaatggcccatgacgtcacgaggccacggctcaatcagatgcggcgtttgggaaattttaaatttaaaggcggggcggcctgtgagccctgaagtgccggccgcggagggtcctggccattttcctgggaccagttcagcctgataggatggcggaggaaggagccgtggccgtctgcgtgcgagtgcggccgctgaacagcaggtaggggggccacaccacggcccggtgcccgctgggcctgcggcgccgccctga

SEQ ID NO: 32506 - DNA, 2300 bp, Homo sapien
tatgatttatcacatattttcacaggcctctcagaagaaaagggaaataacatttgataatcatcatggtctgcatgcatttactttgaagcaggattgtgtcaaggctgtgataataactatcaggttgcttaaaatcattgttatacactagccatttagtcataataactgtaagaaggaaaacactatttatcactacacaccttaagtccacttgtccaatcatcacagcaggttctttgaagagtatattttaaactggaaaactaaagaaggcagaagggccagacacagtggctcatgcctgtaatcccagcattgctggaggtccagccttttgggaggccgagctgggaagattgcttaaggccaggagttggagaccaggctgaacaacatcgccagaccatgtcgcaacaacaacaacaacaaaaaatttaaattagctgggtgtggtggcactggtggcacatgcctgtagtactagctactcaggaagctgaggtggggaaggatcacttgagccaggagttgaaggctgcagtgagctatgattgcaccactgcattccagcctgggtgacagaactaggaaaaaaaaaaaaaaaaaaagaaaaggaaaaagcagaatatgtacaaatcacaagttaccttctcttgttaaacttgttgatcaaatccctttcacctaaacatgtttagatgtaatacacaatgataactagagggaagagtgtttcctccggcctgctgttgttgagggaagtctgtagaaactatcatataattatactgtaaatgagatttctttaaaaactcatttttaaatgacaagagaggttcaaacagttcacgtatatccagtaggttgctaaatatatatttaaccctaaatttatacacatgcccccaggatgctaacaaaggagtttcggctctggaacctcttgctaaatttcctgagattggtctaagcacagactatgtccttccagcttgcaatccaccgagcactttagctcacttattctcaagcaaagctcagaaatcaggtcctgcctgtcttcccggaaaacccaagtatttgttcagttacggtattctcatcagtgtgtcctcatggtcaagccctgaaaactaaggcaccatatatccagaaccctgtaaccaagagcgtgtattcacagtgcttactggctacgttcaacccagggaaatgtagagatctgtctcgttgtcgtgtttcaagaaaatgtactccttgggatttgcgatttacccttagtgtgctatgacattccaacctgagcagaatcctccaggagaatccagagtctccagctgcctgctgggaatggggtcagagggacggatttctagtgatagaggtacaggaagagagaaaatgggtggatatggaaagtgggagcgagaggaaaaggaatctgagatgagagaatataaacaccagagcagaaaagttgaatgaaattcaaaacccagggacacctaaaaacgtttgcggctgactgtgcccacagcctgcagcagtctacactcatgcactctccgaaaaatcaacaggatcttgcccttgcctcatgagtgaatggttaatttgtgcaggaaggaatggtccccaatacatgtttgagaacagggacctcagcaagatatcctgaagttaaaagaaggcaaacaatcttggaaagattttaattacagctgagggagtgcagccctcccttgcgcgggtcagcttgccaagctccagctgcttgcagcgaatgaatgaaatgcgaagggcgggatggagggagcgagtgcaatcacagccagcgaaggggatagtcagctccgcggcccctgcaacgtcaccgaagcgtgggaccccatgagtataaagagagcctgtagcgcaggacgctcagttctccagcctgtgccgggcagctggcaccctccctacgtgtgatgtgactcgataacccttaatctcgggaggatctcattctttctgcctgccagagccgcaagcgcctctgagaaagtgcagctgttgccccttagccccagctgcatcccctaaccagcagggattgcagtatctttcagcttccagtcttatctgaagactccggcaccaaagtgaccaggaggcagagaagaacttcagaggagtctcgtcttgggctgcccgtgggtgagtgggagggtccgggactgcagaccggtggcgatggccactctcccagcagcagaaacctggatagacgggggtggaggcgtgggtgcaga

SEQ ID NO: 32507 - DNA, 2300 bp, Homo sapien
tcttaaattgggatgcaagtagtgccacgagtctagctaaagatgaggcctaacagcagaaccaaatttataattctagatactacatttcaagaggaaaaataaaagccatgttgtccttatcagctgggaatagagaatttcagtatgaactgaattttaatttcccatagtccttagaagttacaataaattaatccggcaaagaagattcaaaagctattttttgccacctaagaaaatacatggacctgcattatagttgctattatatttgcacaaagaaagttgccaaagaaaatgtaataaaccatccaggagtaaagttaaactttccaaaaagagctgatttatcttataaagaagaataaatgcaatattttgatgaaactgatcatacccaataatgacatcaacataattctgatatttttagaatcctagagggctatctcatttgatttacacaattaaaggttaaaaaaaaaactgtatcttctttgtgttcaaacctgtaccaaagatctttaacccttctctttattcttttaaagactgcttcccagttcataaagcaaactcctctaagcagtactcacaatttttaaaagaatgtacagataaccctaagataacttgtgagagccactctcatcctgcaactcactccacagaatattaaaatgttaaagcacagaatgctaaacccaccacctacagtctcatgtatatatgaacatctaattatctaccctgtaaattttatcgagactaactataagtacttgtccagatttctttgtttaatataccaccaaagtcatttacctgtgatttttcatttttccccatttttgttttgatcaggacacaatacaaaatttttatcaaaggtatcaatctctgtatttagcataattcataacctaatttaacaattactttagtgagcatctgtacaatatctgttttaaagacctataggtaaaagaaactattattgaccatataaggtatcaaccaaaactgtgcttggtgtatacaccaactttgtaaccacaaaatggttactttgtccaatgcagagcccaggggaaatactttttttgtaactgagttttagaaattattcattctaaaaccacataaaataatttttaaacaaaatcactcttatctgccctgaaattaactaattgtatccctttattctaagtcacatctcctcaaaatttgcaggtagaaatccgcttcctacacagtttcagctttctccaaaaatatcagatacgcagaaaataaaatagaaaacattctgccttgatgagtagaaaaatgattctagaaaagggtaggaaatccccttctgaatccaggtgtttcaacttcattgaatactgctgtgtggtttgttaccggttttttaatgagaacaggcttgtgtaccacaaactgtgtcctcactgttataaatgggccactaacttagccagtaaacttgtataggatgtgatgtgtccagtcctttgggcaagatgccccaccctttttaatgaggaggagggggcattttaaaccaccaagggaaaatattgagcatattgaatgtgaaacttctgattcttcaattacattatttttcccccagggataaaaaggagggcactctctctatcagaagggcggtgtcacgtgaagtgcagctggtgcgggtggtggagaggccaagcctttcgcaaaccacctacaactcttaccacctgaatgaagcttctgagaaggggtactgcatcttgaagccagacaagaatccctgaaggggagagggagtgaggagggaaggggggagactgggaaacaagaaatcatctcctctgacctctagtgaagtgccaggttttttctttagctcttcacattttctaaatttgcagatctggtgtcccgttttgcggttcctgcaactgctgcagacgccacagttgatgagcctcttgcagggcacgcagaccccacaccttttcctcttcttcttggctgggttggctccgccagctccccctgaggaggacgaggaggaggaggaatgattctgcgggcagtctgccagattggcaatttgaaacgcactgtctgtgacggctgctgaggctgctgcgggggagtgaagggctgtcatgacgatgacccctggaggtaatgagatgccccctaaagccgggatagcggaaaaagtccccacgcgctcggggagattcattatctctgcttcagcagcgccgcatttgagcttgttcatg

SEQ ID NO: 32508 - DNA, 2300 bp, Homo sapien
gagacggagactattgggcccccatgtagaattccctgaactctgcattctagaccaatctatgggcttcaaaagatgtcacaaaaagatattctggccaaaaaatctggaaacaaagaaactggttttttaagtgaatatacactttatgcctttgctttgcttcttaaaaggctgtgatgtacttctccctctgtaataaacaactaaaatacctcttcctaaagcataataatggcctgtaagcaaggagattaatgcaaatacccagttaacattaaactttcctcttaaaaagagcaaaattaaaaaataattttgttatttttctctggcaaagaacacgttaaagccccccccccttttactcaatgtaaaaatcagtgattgtgagatatccttttcaaaaagtcccatgctttcctcttgtcttcggaagagacagcaatctccattaggaatgattaggaatattcttatagaggctgcaggcacttggtttaaaacctgagacattgctgatataaataaatatgtatatatgtaattatctggcttatctttattttctaccttaaaaaaaatcaagtagaacaccaccctcttacccccaccaagacccaccaccaaatggcttgtacaattgagacctgtccttggtccattgaattaagaccctaacagagccagctgtgctgggattcaaactaatgaccgcagacacagaaggatactgtggcagctggtagttcttttttccctgcctctttagttcagattgtatgtgggcagtctcttagctctcagttgtattgtgtttgcttacagtttatactcggatgtattgtagactttttcagtacttcatttgctaatttcctgttcattttcctcatagggccattgctgttttctactttacagcatttgcatgcccaggcagcacttgttcacacatttcataatgtttaaatgccctctgcttataggtagtatcgccctcccacccatgatttgcatgtctttagcactccaattgcccttttccttaggcgtttgtcacccccgtcttccttctttccctgggtatcctggctattaatacattttctcaggagggttataagaataggggggaggagctgtggtttgctgtggggagggagggagcgggggttgggagagttgggggggatgggctggggggggtcacgtcttgatgattcttatgcaaacgacctgatggaagaatgtgggagctttcggtgtctgcggtgggttagtgagggaggttgtttatttttaatctttttcctcgtgcagctcgttggaatgactttctttattttagttgtaacagttggaggataatgcaaaggaagacgctgcctgggaattcaccgtctgtggaaatgagccccagagaggaataaagcagccctcaccttgctctccccacccgaacccactttccccacccgcctcggcccccaccccaacaccaccatcactcccttccctcccccccacctttcccccttttccacccaggtgtcggaccaggcggtccccacttccaccctgcaccccttcttccccccctgcaccatgaacaccaatgtctgcgtggagcccgggccgagcccggaggccccgggcttgcccaaggaaagccacttgcccgagggggctctgaacagccttgtggattacaactcggaaatggagcgctaccgctcctttgccacctccttctacaagaccaacgggggcgccttcccacaggcggccaagatcgcgcgcatcaccacccccatcttccccagcagcgccgccgccgccgcggccgccgcgcgcatcggcatgtccccctggaactgcgacaacgcggccaccgccgccgccgccaccgccatgctctggggcagcggcgggggcgggggcggcggcggggggggtggcggcggcggcggcggcggcggaggcgggggcgggggtggtgggggcggcaggaaatcctcctccgccgccgcctcctcctccgcctcctcctcctcggcgatcctccccgccggcggtggcggcggcggcggcggcggcggcagcaggaccagcatgcaccaccgaaacgactcccagaggctggggaaagctggctgcccgccagagccgtcgttgcaaatggcaaatactaatttcctctccaccttatcccctgaacactgcagacctttggcgggggaatgcatgaacaagctcaaatgcggcgctgctgaagcagagataatgaatctccccga

SEQ ID NO: 32509 - DNA, 2300 bp, Homo sapien
cattggaatttagaacatattttctctcacgtgtttaagatttcattttgaaagtaagcttgaagagtcccaaaaaggaaagcatgagaaaaggaatttccaaaaaggaaaatttccagaaaagaaaatttggcaaaagaaagcatgatgtctttatttgattaaaaacattgcttatttataaacttcaaaatttctaacattggactgatattttaaatattgtgaaaagatgtttaagaatctatcatttttctagcatgttttcactcattaaaaagtgaccacattttcctgataaatttcctatgaagctgagctaaaacaaaataatcaaatggaaaatttccttttttgcttttataatgcattagcacaagaataaaaatatcttattaacttgaataattattaaccctccagttattttgtctatagatgtcaaataaccggtaataatcaaacagcttatgctttaaaaaaattacaaaacatgtatattaatcaatgagtcacaaaatacacctgtttcctattgcaatagtagcccactcttgaaataacaccttcatttaggcatacacacaccacagtttcaaacttgttatcaacaatttatcctccatagttggtaatgtcttgatatggtcaaagtctatcttttgaaaattcaaatacaaaatggtttaaaatgtcttttcagcttttttttcttattaaagaaacaaaacattatattttcctcacttatctgaacaattaatattgcattactctagaataaacacttaattttaatacaaaacttgtactctgcttgataacaccaatttaaataatcttaagttttttctttcctactctataacttaccttagccactgttttgctcttagaaaaaaaattattcaaaagtattcataattctgtatcttataactatttccactagagtatactttaatagtaggatagcatgtgtccacaaatattttatttgaggcagcagtgaagaggttaatttacagctgcatttatgaacgagttttatttatatttgacgtgccgtacaatatttatgtttcaattcataaactatgttttcccaagtggcaagaagtgaaatgttaattacatactattctaaaatagactgaaagacaaaagtttttgtttaagtaaagtttgaaattaaaaaatagggcagtgagttaaaaatctgatttattctttggaactaccagatggaatagtaaaagaggattttgggaggagagagagaagagtagagaagagagacagagattgagatggattttgaaattggccaagcatcatatcaccgattttttacattctggcataatagtacttcgagggtctgaagaaccacaccggtccgttttcccttactttaaagatctaaatggtatttttttttaaagtcttcctgggtacaccaggaaatttatttaaaaccatgccattgggtacgaactaagagcattcttcaaacaaacatgaccttttctctgtttcttgtattgctcttctcaacccagccagaaatcccagacaagtttatttacacacacacccgcacacgcacgcacacacacaccccacacgcagagtggcggaaacgccctctttccaacccttccaaacaattatctccgagagcaaaagaaaataatcaacagccctgtgtgctgggctgagccggagagccgggcgcgaggagggagggcgatccgcaggcgagcagggaaaacgtggctcctctgccgaggagaggatttgtgaaaaggagcgctggcccgcgtgcgcctcttgttccccgtgtaatttgcagccaatcatcagtaggtgtccacgtccctgcgtcctcctcacctcggcgccaatcacccccacccccgcgcccccgcccccagcctccacacctcctccctcgcctttctctgtggctcccctcccccagcaaccgcacactcgcacacacacaaacagagagagaaggggggagggtgagagagaggggaagagagagagagagagagaggggagagagagaggagagactccccggctccctccctccctcgcacacagcgactggagacggacggagagcaacgcgctgggagaggagagaccaccgacaacagacccgcgctctcacacatacactcacactcgactctttcctctccccccacctcctcctccttccacccccaccactaacaccatctcctcctccttctctctgcaacaagaaaaaaaagccatttaca

SEQ ID NO: 32510 - DNA, 2300 bp, Homo sapien
tttaaacacagattgtccacacctgtaggaggaggaatctcaagaatgcacacaattaataaaagctggttctgaattacccatacaagtgcgcactgcgttcagtaaacaactgatttgcaaactatatcctttctttcccagaaatagcaggaggaagtttttcaaatcaaaaaaaaaatctaactaaaatattttatacgtgaaggcctgcagaattttacttccttttgctgttgaaaaatcacaatagccaagaggagtaatgtattttattttaacttttaaaaagtcatgatggttaagggtagagtggaggtgcagagaaagaagttggcaagaaaatgttcagggcctgttgtaaaaccaactgcaacccaaacatgattccaaataggtaagaacaccctgttacaacagagagcagttttcaaagaagaaatgagagggaggtgacctgaaagatcatttcccagttataactaaaggaacctacggatacttttatattaaacacatgctaatataatattttccacatattattaaatgtaagaagatatataattatatacttctatagtcagaaacaaaataactcctagaagtaaatggtttgttactgtagtagtagtaactacctgggcacttacctagtgctcttattaaaaactcaccacaactctgctgtcttacaggttgttgaacagattgaaagaaaccgataccgagagagttaagtaaaatgcacaaggtcacactggaaaagatagagttaagagtcactcagctctgtaaaactccaaagcccatgtttcaacaactctgcaatactgtgcactgtataaatgtatgttgtggtcttgagagaactttatttcctggacttgaaaaatacatcacaagccgggcgcggtggctcacgcctgtaatcccagcactctgggaggtcaggagttccagaccagcctggccaatatggtgaaaccccgtctctattaaaaatacaaaaaatagctgggcgtggtggcgcacgcctgtagtcccagctactccggaggctgaggcagaagaatcgcttgaacccggaaggccgaggttgcagtgagccgagatcgcgccactgcactccagcctgggtgacagagagaggctgtctcaagaaagaaagaaaaggaaagaaaagaaagaaagaaataaagatcacaaagaactttcaaacagcttagattttaaagtgcattaacaatttccaagacctaagtgacgctttagtgtacagctagaaaacatggaatgtcattcccacctgaaatgtttaagggaaaatgtactatttccttagtttgtgcaaaatctgaaatctgagtcaactttgtttcaaaatggaataaacaaagtttgattggacccactaaacattcttcttagcaacaatgcgacacttgcaaggagttccctttttcacactcttcaaagaggaaatattccgatttcgtaaaattagggcttcgcttttaaaaaaaattacagaccaaaaaaagtgtggttacacaatataactagtattgacttaagggtactgtgatcaccatgcagtgatcccataaaagatgtgaccaaaatacccacttaaaatttgaacgtcagtcatgtaagaacatgtaaaagatgaagggaatatttcaaaaacgactatctgacgtaatatgatacttactatgactcatatgggctttgttcttcatctcatcttcaaataaaaagttgatgattagaaaaaggagcattagaagggggaagtaacactactcggcaatagagaaaaactccggtcaaaggaagagcatagttacagagctccgaatgtcagggaaaatcaagcatccgtcattcggaattagctctgtatcggtcggtttcttcattacttaattgtacggggggaaactacttcaaagtaagggctcttacgagaggcaacttaagcatttgaaagtgcaggtttatttcctcctagcgagaagtagggggtcactagtgagaaacctatttcaatctgtgagacgcccccttctactcagcccacgtggctaaagtaaacagaaggtgggccggggcggggagaaacagaactcggtcaatttcccagtttgtcgggtctttaaaaatacaggcccctaaagcactaagggcatgccctcggtgaaacaggggagcgcttctgctgaatgagattaaagcgacagaaaagggaaaggagagcgcgggcaacgggatctaaagggagatagagacgc

SEQ ID NO: 32511 - DNA, 2300 bp, Homo sapien
aatacaaaaaatagctgggcgtggtggcgcacgcctgtagtcccagctactccggaggctgaggcagaagaatcgcttgaacccggaaggccgaggttgcagtgagccgagatcgcgccactgcactccagcctgggtgacagagagaggctgtctcaagaaagaaagaaaaggaaagaaaagaaagaaagaaataaagatcacaaagaactttcaaacagcttagattttaaagtgcattaacaatttccaagacctaagtgacgctttagtgtacagctagaaaacatggaatgtcattcccacctgaaatgtttaagggaaaatgtactatttccttagtttgtgcaaaatctgaaatctgagtcaactttgtttcaaaatggaataaacaaagtttgattggacccactaaacattcttcttagcaacaatgcgacacttgcaaggagttccctttttcacactcttcaaagaggaaatattccgatttcgtaaaattagggcttcgcttttaaaaaaaattacagaccaaaaaaagtgtggttacacaatataactagtattgacttaagggtactgtgatcaccatgcagtgatcccataaaagatgtgaccaaaatacccacttaaaatttgaacgtcagtcatgtaagaacatgtaaaagatgaagggaatatttcaaaaacgactatctgacgtaatatgatacttactatgactcatatgggctttgttcttcatctcatcttcaaataaaaagttgatgattagaaaaaggagcattagaagggggaagtaacactactcggcaatagagaaaaactccggtcaaaggaagagcatagttacagagctccgaatgtcagggaaaatcaagcatccgtcattcggaattagctctgtatcggtcggtttcttcattacttaattgtacggggggaaactacttcaaagtaagggctcttacgagaggcaacttaagcatttgaaagtgcaggtttatttcctcctagcgagaagtagggggtcactagtgagaaacctatttcaatctgtgagacgcccccttctactcagcccacgtggctaaagtaaacagaaggtgggccggggcggggagaaacagaactcggtcaatttcccagtttgtcgggtctttaaaaatacaggcccctaaagcactaagggcatgccctcggtgaaacaggggagcgcttctgctgaatgagattaaagcgacagaaaagggaaaggagagcgcgggcaacgggatctaaagggagatagagacgcgggcctctgagggtaaggtgggcgcaagcggaggtgtggtgcggggagaggtgccagtgggtggaggcgggggccagagcgagggcacgtgcgggtacactccggaggaggtgggtgcgcgcgggggcgtgtgcgcgggacctcgaagtggtggtggagtgcagaccagcaaaaagtttcaaagggaaatcttagatgtcacgtctttgtccaggcacccgtgccatcccaacctcccacctcgcccccaaccttcgcgcttgctctgcttcttctcccaggggtggagacccgccgaggtccccggggttcccgagggctgcacccttccccgcgctcgccagccctggcccctactccgcgctggtccgggcgcaccactccccccgcgccactgcacggcgtgagggcagcccaggtctccactgcgcgccccgctgtacggccccaggtgccgccggcctttgtgctggacgcccggtgcggggggctaattccctgggagccggggctgagggccccagggcggcggcgcaggccggggcggagcgggaggaggccggggcggagcaggaggaggcccgggcggaggaggagagccggcggtagcggcagtggcagcggcgagagcttgggcggccgccgccgcctcctcgcgagcgccgcgcgcccgggtcccgctcgcatgcaagtcacgtccgccccctcggcgcggccgccccgagacgccggccccgctgagtgatgagaacagacgtcaaactgccttatgaatattgatgcggaggctaggctgctttcgtagagaagcagaaggaagcaagatggctgccctttaggatttgttagaaaggagacccgactgcaactgctggattgctgcaaggctgagggacgagaacgaggtcagagcgcttctcttatgccgcgaaactctccctttcttctccccttcgctttttctcgggcttccagggactggggagcaaaccctgtagtgtca

SEQ ID NO: 32512 - DNA, 2300 bp, Homo sapien
atgggtctggattgactattcttatttgcaaaacagcaattaaatgttatagggaagtaggaagaaaaaggggtatccttgacaataaaccaagcaatattctgggggtgggatagagcaggaaattttatttttaatcttttaaaatccaagtaataggtaggcttccagttagctttaaatgttttttttttccagctcaaaaaattggattgtagttgatactacatataatacattctaattccctcactgtattctttgtttagtttcatttatttggtttaaaataattttttatcccatatctgaaatgtaatatatttttatccaacaaccagcatgtacatatacttaattatgtggcacattttctaatagatcagtccatcaatctactcattttaaagaaaaaaaaattttaaagtcacttttagagcccttaatgtgtagttgggggttaagctttgtggatgtagcctttatatttagtataattgaggtctaaaataataatcttctattatctcaacagagcaaattattgaaaaagatgaaggtcctttttatacccatctaggagcaggtcctaatgtggcagctattagagaaatcatggaagaaaggtaattaacgcaaaggcacagggcagattaacgtttatccttttgtatatgtcagaatttttccagccttcacacacaaagcagtaaacaattgtaaattgagtaattattagtaggcttagctattctagggttgccaacactacacactgtgctattcaccagagagtcacaatatttgacaggactaatagtctgctagctggcacaggctgcccactttgcgatggatgccagaaaacccaggcatgaacaggaatcggccagccaggctgccagccacaaggtactggcacaggctccaacgagaggtcccactctggctttcccacctgataataaagtgtcaaagcagaaagactggtaaagtgtggtataagaaaagaaccactgaattaaattcacctagtgttgcaaatgagtacttatctctaagttttcttttaccataaaaagagagcaagtgtgatatgttgaatagaaagagaaacatactatttacagctgcctttttttttttttttcgctatcaatcacaggtatacaagtacttgcctttactcctgcatgtagaagactcttatgagcgagataatgcagagaaggcctttcatataaatttatacagctctgagctgttcttcttctagggtgccttttcattaagaggtaggcagtattattattaaagtacttaggatacattggggcagctaggacatattcagtatcattcttgctccatttccaaattattcatttctaaattagcatgtagaagttcactaaataatcatctagtggcctggcagaaatagtgaatttccctaagtgccttttttttgttgtttttttgttttgttttttaaacaagcagtaggtggtgctttggtcataagggaagatatagtctatttctaggactattccatattttccatgtggctggatactaactatttgccagcctccttttctaaattgtgagacattcttggaggaacagttctaactaaaatctattatgactccccaagttttaaaatagctaaatttagtaagggaaaaaatagtttatgttttagaagactgaacttagcaaactaacctgaattttgtgctttgtgaaattttatatcgaaatgagctttcccattttcacccacatgtaatttacaaaatagttcattacaattatctgtacattttgatattgaggaaaaacaaggcttaaaaaccattatccagtttgcttggcgtagacctgtttaaaaaataataaaccgttcatttctcaggatgtggtcatagaataaagttatgctcaaatgttcaaatattttgattgcctcttgaattcatttgctaattgtatgtgtgtgtgtttctgtgggtttctttaaggtttggacagaagggtaaagctattaggattgaaagagtcatctatactggtaaagaaggcaaaagttctcagggatgtcctattgctaagtgggtaagtgtgacttgataaagcctttggtcttaaatcttgggcattttgatttgtaaatctgaccctgagaattgggttacccagatcaaagactcatgccagttaaaaagaacattacctgtattttttatcatgtgttatctcttaagaagaggcagattagttctaaaatcaac

SEQ ID NO: 32513 - DNA, 2300 bp, Homo sapien
tgtctaaaaatgcataagcaacaatagatatacctcttgttggatatacatccagtaagaatatctaaggaaaacttgctttataattccaaagcagaaagttctttagagttttttcccaaaaattgttgtttgttttccttaaggagagtccttactggttagttcaaagtagctcctttcttcttcaatgataactaaactcattatgataataaagaaactaaagaatcttgggaactgaggtacagtaataatgggaaatttatcctctgaaaagagaatttctctcgggtctacgattgcctgcgatggaggacgacttatatcttaatgagatagtgttgggcgggaatctcacttcagatacaggacaagaaatctaatacattatctgattatgtaaggatagatttttaatcaaattatttggataagtgtgattatttagaaccaatttcaatacttgtttaaaggagtggcaagaaaaacccacaataaaagaaaggagccatctttccaaccatgttaaagaggcacaaatcaattcttgagttataccctgctatggtttgaggggatttgtcctctcaaatctcatgttcaaatttgatccgcagtgttggaagtgaggcctaatgggaggtgtatggataatgggggtggatccctcatgaatggcttggtgcctcctcagagtaatgagtgagttcttgctgttagttcccacaagaactgattgttaaaaagagcctgggcaccttccacctctctcacttgcttcctctctcaccctgtggcatgcctgctcccccttcatcttttggcatgactggaagctttctgaggttcttaccagaagcagatgccagcaccatgcttctggtatagcctgtaggactgtgagctaaataaaccttttctttataaattacccagcctcagcagttctttcatagcaatactaagggcactaaggctctatattttaaatagcagtagtaaaaagcaatgcataaaacaattattttctggtgaagttgtataaatgacctcatctttatacagaaaagaattactatttgttaaaaacaaacaaaaaaaaactacctcattctttacaaattcgtgacttggcagacttaccctgaggcaaaaataccatataggtttaaaatttcaattatctcaataataaaatgaaaatttttaaaagaaaaataatgtataaattttcaatcctttaagataatttaatctaaaataataattttatatttacatttaataatcccagacaaagccctcaagatttgaaggattcttttaatgtgctttcaaaaaaacactgagtccagcaatcaattcttttacagcaaaatacccattataaattttaagttttcattaacatgccttatttcacttataaaacatacttactggtatccacttaaaagttggtttcaaatattcaatttacctagtggtaataactttaaaaaaaattccatgctttagactttaactctttggtctattctctccatctgtgtcatattagagatactttgtggtaactcagtggtattctaatagaaaaatcctatgacagtaagataattcaggtgtcctttcaattgttaagcagcttagttccgtcgtggtagaatgaacacttaggagggagtcccctatggatttacattaagggtgagtaactttctcctccacaaaacagtaaatagaaagtttttctatgtacacaatttgcaaaattagtctgatcatgaaattccttcattttccaagacgtaggagctatagacacatagatggaaatatatatttttcagccttgttgattcacttagatcttctgaaacagaatttaaataataaaataatgtttttaaatatgtaagttagtaaaaagcacttttttaaccatgctatatatacatattcacataagaaacttcccaagtgaaacgaatattgtacaggtatcaggaggtacattttaaaataaagattctcatcttcaccttgtttttgaattctccattaaaagcaaactggttttctggttttccatctggtaccttatataatctaaaccaattaagagtagcttccaggtaacccggtttgaacttcttaacatcatcaatatctgtaaagaaaaaaacaaaaagatgttttgttaagaaccaaaattaattccctttagtggcagagcattggactgagggagccaggaaacatggggcccagtctaaccagaagcacaattgatt

SEQ ID NO: 32514 - DNA, 2300 bp, Homo sapien
tatcatcaatattatgataataaaactaactcaaagattcctaccatatattcaatagtgaaatgctgaaagcctttcctctaagatttggaaaaagaaaaggatgcccacttttgccacttttattcaacatagtattggacatcctagccagagcaattaggcaagagaaaacagtaaaaggcatccaaagtaggaaagaaagaagtgaaactgtcactgtttgctgatgatatgatcttatatatagacaactctagagactccatcaaaaaacattggaaataatatataatcaacctaagtgtccatcaacagattaatggataaagaaaatgtggtatatatacataataaaatagcacttggccttaaaaaaagcagaacattctgtcatttgtggcaacatggatgaaactggagaacattatggcaagtgaaataagccaggcacagaaagacaaatatctcatgttctcacctatatgtggaatctaaaaaattgaactcataaaagcagagagtggaattatagttacagaggctaagggtagggggaatagggaaatgatagtcaaaggatacaaaatctcagacatgaagaataagatgttttattgttgagacaacacaacttgatgagtatagttaataacgtacatttcaaaattgctaagagtaaatttcaaatgttctcaccacaaaaaatggtaagtatttgatgtgacagatatattatttagcttaagttattccatactgtattcataagtcataatgtcactttgtaccctataaatatatacgattataacttgtcaatatacaataaagttaaaaaatcaccaaaaaagagattctcaccaactgattttatttcaaagttagttttcttttttctttttttttttttttgagacagagtttcattctgtcacccaggctggagtgcagtggtgtgatctcagctcactgcaacctctgcctcctggaagcaagcaaatctcatgcctcagtctcctaaatagctgggattacagacatgcaccaccatgcaaaaatttgtgcccagctaatttttgtatatttagtagagatggggttttgccatgttggccaggctggtctcaaactcctggcctcaagtgatctgcccgccttggtttctcaatgggctgggattacaggtgttagccactgcactcggcctcaaagttagttttctatcatgtatattcacattgctatctttaaaacctatgtatataggaaacaaaaaaataagccatgttgaatgaagaaacactgcttaagttaggtagattctcatagatccttgcatcctccacctaactgaggtagactagcaagaatgatgaaacattatacatgaaacaacaccaaaagaataatctaatatctttaccttttcctactaaagtgttaacaaaaaatactgccaggacctggtgatagtactgacaattctcttccaaatataaattctgaaaaatatacacctacataataatgcctaatttaaatacttaaaataatatttgctatcacacccaaagttatagaaggtttatataactaaacaaagtaacgtaaattaaatttcacttagaactataaggaagcttatatataagcttctatagctaactgaagaaagaacaagaaaattctgaatagcaaaaaggaagttcttataggttcatttcccggaaaaatttaaaaaaaaaaaaaaagctaaccagaaaaatagcagatgctctgtgatagtcataaattgagttaaccaggaaatgatttatttcctggtagaataaaatctaaaggagaattgagtcctaataaattaaaattgccatcagccccaaataaaagtttcagttccatctatgaaccaaatatatctcagaatctacttaaacaacctttaaaagtatttgccattttcaaaggagaaaaaaagaaaattaatatgtatataacaaactgacaggcaaaattgaaaaaaaaactctctataaaactataacgtatatacttagctttgagtatttttctgaactatctcaaatttaaaatattggccgggcgcggtggctcacgcctgtaatcccagcactttgggaggccgaggcgggcggatcacgaggtcaggagatcgagaccatcccggctaaaacggtgaaaccccgtctctactaaaactacaaaaaatagccgggcgtagtggcgggcgcctgtagtcctagctacttgggaggctgaggcaggagaatggcgtg

SEQ ID NO: 32515 - DNA, 2300 bp, Homo sapien
tatttcctatcatttatattatgcatttttaattttgattctcaaatattccagtaaactgtagagaatgaaagatggaaatttaagtgattaaaaataaatgtaaacctacttaacaaaagtcagcgttttcttttctgaatgcatgataacttggtaacattttacaatgcaatttacaaaataacaagttagtgtcaagatttcattttaagtaaacatttatattcagaaacgtttagtatctttgttggtttcttcaaatcaggatgcatataacttgttgtcagttactaataaaatatgttgccagagttaagaaaagctattagcaagagggacctcagaactttatgctggattatctcaatagataacttttttttttttttaaacagggtgtggctctgctgcagaagctggagtgcaatggcatgattttggcttcactgcaacctccgcctcttaggctcaaaccatcctcctatctcagcctcccaagtggctggaactacaggcgtgtgccaccccgcctggccgatttttgtactttttatggagatgggttttaccatgttgcccagactgctggtctcaaactcctgggatcaagtgatcctcccaccttggcctcccaaagtgctagaattacaagcatgagccaccacgcccagcctggatactttaagtatccacagatcattagaaattagcctacaaccctgcctccataggaatttgtcttatttaaatatctaatcttcaaaagttaatagaaaaattaagctttttttcaacataaacaaaaaaattatacaactctgtgatatatgcacagaagagattttctctcctttttatgggagcatttgccttatagttatgcctattcaagttgacacattacaaaggtaccactgttgacaaaaacattttaggatctataatcttagtagagtgtctctaagtagctagtcacaatatctcctaggaatcctttctggaacttgggtagaccagtatctcaattttaatgatcacacgataattggagatgctgaaagaacctgggtgcccagtaggaaagtagcctagatgatgatagtcccaaagaagatggactagaaaaaaataaaatgacacgtggcagactactggttgttctacaatatccattctcctggatactggcccaaaccatcctcctatctcagcctcccaagtagctggaactacaggcgtgtgtgccaccccgcctggccgatgcgcggtggctcacgcctgtaatcccaggactttgggaggccaacgcaggcggatcaatggaggtcgggagttcgagaccagtctgaccaacatggggaaactgtctctactaaaaatacaaaaattagctaggcgtcgtgacgcatgcctgtaatcccagttactcaggaggctaaggcaggagaatagcttgaacccaggaggcggaggttgcagtgagccgagattgtaccattgcattccagcccaggcaacagtgtgagactccgtctcaaaaacaaaacaacaacaaaaaataataaaataaaagaaagaataaataatctctactgggttaggaaatggccttatggagaagatggcatttgagtaagctacttagggttttttgctctgtaagtcggtgtcaacgtcccgttttcacgtggtggcctgatcattttgtcttatagtgatgtctttgcgtgcatgtgcgctcatctcctatattggacagggtctagagcagttcctggcacagagtaatcactcaatattacatcactatactaaaaaatcatgatagtaattcttgacgggataaatgaaggcatgaataaatgtatgaattaacgagtggcagtgagctcttcaggggtggtgggtcttgtctcactcgtctttgagctgcggcctcgctgagggcatagtgcgcacaactggctggtgttccagattccactggcagggaccaggatcgcagcccgagcgccggggcgggagggatgactccggacggtagggggcaccggcgtgcggcccggccgagcccccaggtagctccgcgcgcacagcaggaccgtcattgacgccatgagcgcgctgctgcggctgctgcgcacgggtgccccagccgctgcgtgcctgcggttggggaccagtgcagggaccgggtcgcgccgtgctatggccctgtaccacactgaggagcgcggccagccctgctcgcagaattaccgcctcttctttagtaagtagctcccggaggttcgccg

SEQ ID NO: 32516 - DNA, 2300 bp, Homo sapien
attagattttgttcaggacctattattaccaatttagtagctcaacccttgaattgaagtactatatttataatattacaagggatttatacggtatcatttggagctgaaatttctcatgattattttagcctagaagcagtaatactacttaatcaagtaaaacattctgtttttttcatgtcgtttaacaatgcatagtaaatcatatgtgattcttctatgacagataaattttatgtctaatttcatcaatatctagaaagactaaaagcttaagaccaaatatattcttcatgtcatttggacttagttgaaatcaacataattgtattctttcctatttccaaggagtatatgggcctcaggacatgagcttattttcacatagaaaaaatcaatcagaaaagaaaattctacatgacaaccactccttttatttttcagacaaggggtaataaaattaatttctcatttttcaaccaattaagtttctattctctaggtcagtctgtttcttggaccatttgtttcattgaaatttggatcaaaatttattttaaaataaggaggaaaaatgttgttagataagaagtaaaggatagtgctcacttcagcagcacatatactaaaattggaaagaagtaaaggatagatctctttaatcatgacagtcttaaagaggaatccaatgcaccaacatagttgctttttgttttgtttcatttgcatcaccctgcattattctcctatttagctctgcttaaccacttctgccaaggtattcctaagggcaaaggaaaaagaatgtatgccccttctgtttgctaggtgtttgtgattctgaggcagagtttcgggggtcagtgaacctggattttatttaaaagattacatttttattttcactaacttctaactaaaatatagcatttatgaatgtaggcaacaaaccctgtagcagtgttaatattatagtgcctatgatttgtgcctccaacagaaatggcatgtaatccagatgttgcagatgactctatcatttacacccatcactacttcaaaattatggtagttatacctgctgctagatctagtcatttaggtcctcagtgaagaagcatgttattagatcacaaaattattttctaaaatctttttgtaaatataattcaatatcatgagtttcttcttcatataatttatggatttacaaacggcattttgagaagggtttcataggcctaataaggctgcccatgggatgcatgaaacaaaagtcatcaagaaccataaagcagttattttcaaccttattagacctaactttctcctctttaaaaaattgaggtgaaattcacatcatatacaatcaactattttcgagtgtactatttagtggtacttagcatagtcacaatattgtacaactgccacttccttctagtttcaaaacattttcatcatcccagaagaatacctcatatcctttaagtaatcacttcctgttcccccctgccacccgctgacatccactaatcagcttgcctattttggatatttcacataagaggaatcatatgacatgcggctttttgtgtctagtgtctttcacttagcataatgcttttggtgtccatccacattctagaatatatgaaaccttcattcctttttatgcctgaataatatttcattgtatatcattgtacgttatgatttgtttatcacactcaacaataaaaaggcaacctacagaatgggagaaaatttttgcaatctagccatctgacaaagagttaatatccagaatctacaaagaacttaaacaaatttacaagaaaaaacagacaaccccatcaaaaagtgggtgaaggatatgaacagacacttctcaagacacttacgcagccaacaaatatatgagaacagacacttctcaaaagaagacatttatgaggtcaaaaaacattaaaaagagctcatcatcactggtcattgagaaatgcaagtcaaaaccacaatgagataccatctcacgccagttagaatgacgatcattaaaaagtcaggaaacttttttgtttttttctcaatgggtttgccaccagaacacaggtatcgtgaaaactacccctacctataagccagaacgagaaaggaaaagactcatatcaacactgtgatcatcggacacgtagattcgggcaagtccaccactactggccatctgatctacaaatgcggtggcgtcgacaaaagaaccatcgaaaaatttgagaaggaggctgctgagatgg

SEQ ID NO: 32517 - DNA, 2300 bp, Homo sapien
tgaagctattacaataagttctgctataacacttgttttgaaaatacaaatttgttccaacaagattgacatattagggaattgtttgaacataacacaatttcgcatttgtttgtgtgtgattttgtctacttgaaacactagtcgaatgcagaaaactacccagatgacctgagccacataagaatacacaaaactcacacaggtacaatcctcaaaccttaccagtgacctcagttcactgcctgagttatgagccacacccatccacatctggtgtaataaatttcccccgatttcaaataatgcttcttctgccatttcacaacccttaagctgtgacctttctgaggcccatttccacaagcaaatgccgtgtctttttcaagataaagggttatatttgctgtagtatttatgcatttcttaagcatttatcatgtgtaaattcttgctaccatttttattaggtcttgatctgatttttatggtccattgacaaagtttctgagtgctctgtcctaaacctcatgttacccattaagtcctgtagttttaattgaactttttttttcagtgataccgtatctaaataaatccctggtggttaccaggtgaatataaataagtgtgtatatgcatacatacattcatacatatataatattcgaacacaattgaggcattttgacataaatccaaaaaattccttttatattttagaggtaaataagcctttaaaagtatttattaaatgtacttgggaggatttattcaaaaaagactatcaattatattaaataaaagccattcaatacgccaagctatatatagatgtctccatagtgggtgaagatgtgtcatttatcttttaagataattatgcaaactatattgagcacacacatcctgagctgggaaatgacttttacatctttctcctcatttataaatcttttccaacagaagttatgcaagattcagactggtcagcacagagctggattttggtggtccctttacaataggagagaatccattttcctccttagggtctttcttttctttaacgaaggcatacagagcactcagcacattcccagagcttcttagaatttttcccttgagagatctcaggaaatatgaggaaaaacaacttcaaaaaaattaatgaaaggcctatcactgtctgcctttctctcttttaatccctgccctatcctttctactttctagaagtgtagtgccccttcagtttcaaacatttttcctctccttaaattcccaaggtgggatgcccttttctggcactccgtctatgaaagggacagggaaaagatcttatagaaactgaaccctgacacggggcttattttcctaaggaccaaaacataaaaggacagggtgggaccatggaaggattaatttcaggcaagggcagcctgtggagagtgagaaatctgaaaaggctctaggcttctatgggcattcccctccacttcttctgcctgctgccagatgactctcacatgtgaatccttatttcctcaggaatgcggatcagggtttggcaagtatgttttcagtaaataattgctgaatgttcaacgcttaaaggcagaagcataactttgagtgtgcacagtaatcactgaaaatgattctgtactcaccgttttgatgcaaatgcaaattctcatagcccctgcactgactccgtgggtcacctgtgagtaactctagccaaaagccacgcacaagccctggtctgcctccaggcagcagaccacaacacagtgccctgagtgcacctgcacacacccatgggcacacattaaacccataaacggcgggttatgctaacgtgtacttccttcctcactgcctcaccttgttcattttcctttttccccacccctcaccccatacaataggatttttgtttgcttcagtagcatgtgacagcacagtccctgctttgcctagctctgtgctgcaagtctctcaggtaacaggtggcagcttcccctgttggattctaggtttaaaaaagaatgacctcatgtgggtggagctctgggacttcgtagaggtggtggcagtcacagccaggtaaccctggagtgaagcggtttagttagaagggagcagataaactcgtcactctagtagctttaaccctcaccctgaggcaccttagcaatcagccattgcctgcaagcctccaaagcttgtctttgcctaatatggagcccaaagaagccactgggaaagaaaacatggtcaccaagaaaaagaat

SEQ ID NO: 32518 - DNA, 2300 bp, Homo sapien
tggaaaaggtgtggctagttctttatgtattttctgcatttaattatagagagcacacattctagaagtctttaaaggtttgctctttagcttagttccaatacattaagttaatatatatttattgagtaccacctgaaagtgtgatatgtagcttctccctcagcaagcatgctccagactttgatggaaagaagccagaagtgtcctgcataccttgcataaaaccacaagatgattaattaggctaagttaaaaaaattgtgagaaggctcaatataaaagtaacttttatggataacatatatagaactctttttaaaaatcaaatattaagaactcaaaatctgtctaaaggcagagcagttattcttatctaaccatgagtaatacatatctacacttttttaggacaaaataataaagtctaattcttatttgttctaacaacaattcctaagtaaaggtgaatcattttgtgtctgtgagtcactggatatatatatatatataatactgtaattagattacctgtagaatccagtcaagtcacaaacatagtaatttatcccagatacagtaaatagattctttgtttatcaagggactcattaaacagtctctaggtgtatattgactatctcataagctagacatcaaatttaatttgtgttggctattgctggtgccaataagagattggtttccctctcccctagatttcccatgagttcagaccaacttaccaggggccatttaagttaattaatacaagctgctgctcagatactgattccctaggatagctttcgggttacaaaagagaaacctacttccaaattatcataaaatatcatataagcatatatgataaagggtaaagtagggcagtcagcaaatgtaaaacagaagagaaatagaagaaattaaatctaggatgatcaggttatgtcatgaagttgggcagttctatgaagttcattttcaatgactcaggccaaaaagtgtaaacaatttaagacacagaaacagcatcagcttaatcctttaatgtatttaaaacagaatgtgtaggccaaggtgagaggattgcttgagcctaagtgctcaagaccatcttgggcaatagagtgagaccgtatctctaccaaaaattttaaaaattagccaagcgtggtgatacattcctgtagtcctagctattcgggaggctgaggtgggaggatggcttgagcagaggctgcagtgagctgagaaagtgccactgcactccagcctgggcgacagagtgagaccctgtctcaaaattaattaattaattaaaaataaaacaagttacaactctgtggtcatttctgtttcaagattaaaatacctttattaaggggttactatctgtataggggatataattccactatcaaacataagcctccagggtagccagggatttggggctgatatgggaagaatagggtacagtctcctatgggatgaactatattccttttgctgccagcagaaggtgggagcgatatggtgaatcttttacacagtcttggtagtcaaaggctagagattcccccctaccctcaagtgctggctctgggatgagaaaggaggggaatgagaaagtgttgaaggagatgacaatgacaaaaccaaagactgtagagaaaaaagtggagttatattttgggtgagcaggctttaacttttgtattcctcttcctgctcactttttaggttcaatgttacaacctagagctcctgttttaagtctttgaataggtttagccagacacaaaatgatcagatcctcttttaatctgggtaggtgctttcctgttttcttttgtgcttctcgtgggggaaaaggtaaacctatggatagcagaactggacaaggtatgggctgatcctctctctgaaatgggctcattttttcttttggcaggcatctcacttacagagactcatcctgacccccttgtcagccctgctgtccttattcccagggcctcacaagctcatccagaaacgctatgacaaactgctggattgcaacagctacctgcagcgatcaacgggagaggagtcagacttggccaaaaaggagtatgaggccctcaacgcccagcttgtggaggagctccaggcattcaaccaggctgctcggaagattctgttgaactgtctatgcagcttcattaccctccttagggacctgatgctcgtggcacagcaggcttactccacacttgtgccggtaagcacagcaccaacacctagctagctac

SEQ ID NO: 32519 - DNA, 2300 bp, Homo sapien
taaatgacacaactttcttttagtcaggtttgagaccaaagtctttccttcactgagtctttccctactccttatattcaaataatcagaattcctgtggattctgacggcaatatttttcacacttgtcctacttttcacttccactgctactactgaaattcaggttttattagcttacttgaactatggcaataacctcgttattttccttgacttcaacattgttgccatatgaattttcctgaaacccagttttcttctttttcattaaaataaaaaaaaaaattcttgctgagaagttagggctttctaccaccttcgaaataaagaccaaatttcttggcctagcatttaagaagattcagtaactggcacaaaaattatcattcatcatccccagatctgccttatagctagctgaccctgccactcttattttttttgtccaggaagctctttacctatttttatatatctacatcctatcaagaccctattcaaatacttctcatgaagatttgactgacagctgctgtgcccctctccattccaaaccctattaatagtctctccattcaaggatatctcatagtgctttttcatggtattgcaactttctcccttgaagcatttttttttttttttggcacaagtgttatgtcccctacaaaactctgagtactttaagggcagagtctatatttatctttttgcctatctctttgccactttgcaaagtacaacaaaataatggctatagaattactggaattaagtgatcaaagtatagtggtcttatctctccttctacacaattgtagccatttccaaggtcccttcagcaaaaatcacaaaagtaactcacccctgcccccacaaaaaaaactccaaacatcaaaaaagcaaaagcaaagcaatcacctctttcacgactggggacttgtagtacaatgttcctatctgtaaaattctcacaatctttcgcctgtcttgcttaattcattaatcccactggtctgtaaacttgatgacagcaggaacttgttttgttcactgttatttccctagtgcttgaaacttaataagggctcaaaaatatttatcgaatgaacgaactaggttttttgcgtaaatgtcaccttataaggcttctgtgatctctccagtctaaattgggcattcatatataaatataagtatgtgctttctcctagatccatttttcaccctacctggcaatctcaaaagaagtccaaagttgatcatatgcacgtgccccagatgaaggaaacagaaactgttcacatagagtgcagtattatcgttgccatttcataatggctctaaaaaactttgttcttcatgacttcgcaagctcttgcaaccccttccaataaacattattttaaagatgctgcctttttcattcctccactgagttcttggttctggataacactgataccttagggacacctggaatcgcaggagaaaaggctccgattccaaaccaatcaagtggctgaaagctgacagcaaacacttagaaaaggaatgtcaatcctttgatcaaagcatcacacatcgaagtcctagaatgggggatggtccttgacaggggagccaaaagatgagagacaatgagggagctacgtagagaagtcactaaaaccctccgacaaagtccgaggcaggattccaagtcccttgtccctagacctagaaatatgctcggtccgcatgtcccggcccgcaactccctcggaggaagcacagtcctcactgaaaggggagagcagtcagtctagggcacgcaaccgcccgtaaattatgattccccttgaggagcgaggaaactaataccccacgtagctactctcccacctcgctcctggcgcgggggtctcgagcctccaggaggccaggagcagagtcgctcagcataactcaccgttccgccccgccctgccgatccgtctgttcccggtggtcccttcggaaacggttcccgcactggccggctccgaaagcaggaaaacaaaggttcccacagtaggggcgggggaaacgtttggcagtgcgacagtaggaagtgacgttacttccctttttccggtccgccggattatgaatgacggccggcgcgagtattttccacataaggtggctgtcgtttttctcctggcgtctgtggaggcgagtggtctgcgggcagcagctcccagaggcagccttggaattccagctcggactgggcgggaaggcgcaggcggcccaggtcgccgacacgctcacgc

SEQ ID NO: 32520 - DNA, 2300 bp, Homo sapien
cataattaacagtgatcgacagcgcaaatggctaacatgttaccaagtatgaaataaaattactgaattttcacagcaaacaatacctgtgcttgttttaatctaaatggtttcaatatctgcattccaagtatttattctttgttagaaaagctaattggatactcagtatttatttttatttaaaaatcacagatgatgaaacaaaagctacaagtaaaacaagtttaaaaaaacaaaaacaggccgggcgcggtggctcacgcctgtaatcccaccactttgggaagccgaggcgggcggatcatttgaggtcaggagtttgagaccagcctggccaacatggtgaaacccctcctcgactgaaaaaaaaaaaaaaaaaaaaggagccgagtgtgattgtgggcgcctgtaatcccaactactcgggaggctgaggcaggagaattgcttgagcccgggaggcggatgttgccattgcaatccatccccaggcgacagagcaggactccagctcaaaaaaaaaaaaaaaaaaaaaaattgatgggcccactactacagaagctcaagtttgagctgtgtttaaattaaagcaaaaacacgtagaagtgcaaagtatataaaataaaaagaaatgatgattctcaaatctcattgaccttttcagtcttatttttgaagtgagacctcacaaaacgatactttcaggtgtaatacaaacacaatttttagtaatgagtgtgcttaaagcaatcctctcagtggtgtatgctccccatcaggcagttaaaaaaaaagaaaaaaaaacccgcatagcttaatgtttattaaatatgacagcgaatcacttagttgtgttataacagtttattatcatggatttaaatgactatgtttacatgtttaaaattatcacatcactagttcttgctagcttttgcattttctcctgtaaacattgtttttacagataagcttaggtaaaatagaaatacaccaccttctttatcaataatgtagcacacaatatattactaaagctggcattttcttgatattcaagaatttatgacaaggaatgggatcctggcattaagaataaaggggaaaaaaacaagtcatctcatcccaaaaccaggtagaaagttgggatgggaagtacgtgtattagcaaacgtttttgaaaccaaagcaactttcatgcaaattaaactttctatagaagttaaaaacccaagagatactgctgtgatgacaaaacataagcaaatggccccaaatgaagcaagtcctttggagtaaatgttaagtagtattcacatagaactgctttctgcaatcaggaagggctggaatggaaaactcaatgccaaagagagaagagaagttagtgtgacccaagaggtcttgaagtaacacttaacagcaaatatcaaaccaccccaaccaacgcctccaactggaagctgccccatttctccatcagcagaggaagacatgagggactggctagggggaaactgggaaacgcgtactaccgagaagcccagagccctcaacccgcaccttcagcaggagtggccaaaaaggagtttgaggcggccccagggcgggagaaaaatcaggacgatgataccacgcccttgtccttcccacccttcccccgcatcctcagccctgcagacccccgaagaaaagaccagttcttagggggtcgcggaggctgagaagccggcggcccgagcgccctctttacctggtcgcagaggcgcggccaggcagggagggtgcgtgagcgtgtcggcgacctgggccgcctgcgccttcccgcccagtccgagctggaattccaaggctgcctctgggagctgctgcccgcagaccactcgcctccacagacgccaggagaaaaacgacagccaccttatgtggaaaatactcgcgccggccgtcattcataatccggcggaccggaaaaagggaagtaacgtcacttcctactgtcgcactgccaaacgtttcccccgcccctactgtgggaacctttgttttcctgctttcggagccggccagtgcgggaaccgtttccgaagggaccaccgggaacagacggatcggcagggcggggcggaacggtgagttatgctgagcgactctgctcctggcctcctggaggctcgagacccccgcgccaggagcgaggtgggagagtagctacgtggggtattagtttcctcgctcctcaaggggaatcataatttacgggcggttgcgtgccctagactgactgctctcccctt

SEQ ID NO: 32521 - DNA, 2300 bp, Homo sapien
aaagcaggaaaacaaaggttcccacagtaggggcgggggaaacgtttggcagtgcgacagtaggaagtgacgttacttccctttttccggtccgccggattatgaatgacggccggcgcgagtattttccacataaggtggctgtcgtttttctcctggcgtctgtggaggcgagtggtctgcgggcagcagctcccagaggcagccttggaattccagctcggactgggcgggaaggcgcaggcggcccaggtcgccgacacgctcacgcaccctccctgcctggccgcgcctctgcgaccaggtaaagagggcgctcgggccgccggcttctcagcctccgcgaccccctaagaactggtcttttcttcgggggtctgcagggctgaggatgcgggggaagggtgggaaggacaagggcgtggtatcatcgtcctgatttttctcccgccctggggccgcctcaaactcctttttggccactcctgctgaaggtgcgggttgagggctctgggcttctcggtagtacgcgtttcccagtttccccctagccagtccctcatgtcttcctctgctgatggagaaatggggcagcttccagttggaggcgttggttggggtggtttgatatttgctgttaagtgttacttcaagacctcttgggtcacactaacttctcttctctctttggcattgagttttccattccagcccttcctgattgcagaaagcagttctatgtgaatactacttaacatttactccaaaggacttgcttcatttggggccatttgcttatgttttgtcatcacagcagtatctcttgggtttttaacttctatagaaagtttaatttgcatgaaagttgctttggtttcaaaaacgtttgctaatacacgtacttcccatcccaactttctacctggttttgggatgagatgacttgtttttttcccctttattcttaatgccaggatcccattccttgtcataaattcttgaatatcaagaaaatgccagctttagtaatatattgtgtgctacattattgataaagaaggtggtgtatttctattttacctaagcttatctgtaaaaacaatgtttacaggagaaaatgcaaaagctagcaagaactagtgatgtgataattttaaacatgtaaacatagtcatttaaatccatgataataaactgttataacacaactaagtgattcgctgtcatatttaataaacattaagctatgcgggtttttttttctttttttttaactgcctgatggggagcatacaccactgagaggattgctttaagcacactcattactaaaaattgtgtttgtattacacctgaaagtatcgttttgtgaggtctcacttcaaaaataagactgaaaaggtcaatgagatttgagaatcatcatttctttttattttatatactttgcacttctacgtgtttttgctttaatttaaacacagctcaaacttgagcttctgtagtagtgggcccatcaatttttttttttttttttttttttgagctggagtcctgctctgtcgcctggggatggattgcaatggcaacatccgcctcccgggctcaagcaattctcctgcctcagcctcccgagtagttgggattacaggcgcccacaatcacactcggctccttttttttttttttttttttcagtcgaggaggggtttcaccatgttggccaggctggtctcaaactcctgacctcaaatgatccgcccgcctcggcttcccaaagtggtgggattacaggcgtgagccaccgcgcccggcctgtttttgtttttttaaacttgttttacttgtagcttttgtttcatcatctgtgatttttaaataaaaataaatactgagtatccaattagcttttctaacaaagaataaatacttggaatgcagatattgaaaccatttagattaaaacaagcacaggtattgtttgctgtgaaaattcagtaattttatttcatacttggtaacatgttagccatttgcgctgtcgatcactgttaattatgaggtcgggtttagctgaaggcattatgactccatggcaacagatgattccctgattctccagagagattacacacttcgtttgtggctaaggttactgtaagcttttcacttaaaaacttttcctacttctttaccagataagaaaacagctaattttaatcactggcttttgttctctaggacttaactgcatcccatattacgtatttaatgagcttgaaaaaatctcagtgtttttc

SEQ ID NO: 32522 - DNA, 2300 bp, Homo sapien
ctaggccaaagcaaatatatggaaaacaaaagaaagacgcatgtagatggggcattacacttttccctccagttatttatcctgttttcatccaccactcttcgtcttttccttagatctccagttttttagccgtatattaccccctttctctctaatcatccattgcacacagtgaggtttatttgtaaatctaacccaggcaccaactaaccaaccaacaaacaaaaacagctaaggagtagccactggaacctggaaccatgcctacacttacaaaaatttgattttctgcagaaaaaatattttgactcctacatttttggacttcattagaaggacctgaaatggatgacaccaagctgtttgcctaaaataatgtcccaagcctgaattggcatggatctttcttgagattaaaatagaaacttgttttgctaactgaaaacaacttagaaatcaaagagccatttaagttgaaaccattatttttcctttccttgaagaaaattcctgtttttacacacactgaatgatcaggatagtgaatcaccctaccacagaactttccattaaaaatttgaagttgtagaaacctcaaaaagaaaatgaagatggggggaaaacgtttgtaatgtagcaaatgaattgaataaacatttatgagcacctactatgtgccaggcagtgttctaggtgataaagatacctgcctttgtacagcttgcattctagcggaaagaaaacatacaaacaaaaaatatgcaagttatatagtaatataaaagatgagtggtatggagaaaagacaaagtaggacaggccaaggatcatcagaaggagggcaagttagaggtttaaataggatggtcatgactggcctcttcaaagaggtgtgacatttgagcaaagactgaaggaagtgagggcgtgtgccatgtagatatttgcagagggcaagttgcagttttaaataggatgatcatgattggcctcctggaagaggtgacatttgagcaaagactgaaggaagtgagggtgtgagccatgtagatatttgggtccagatagagaaaacagccagttactggccccaaggcaggggcatgcctggaacatgcaagaaaggcaaggaggccatggactggaggaagagaaatgaggacattgagaggtacgggagatgacagatgatcactgcacaaggctgtcattcgaggtaaggttgggaagaggggtgacttgattgggctcatgtacatcttaggataatcatgttttcatttgaacacagtcatttagtacaatactttttactctgcaacaactgaacaatgattacttaaaatggtttctaagtgatcccctcaagatcaggcaccacaacactactaggcagtagcagcccttcctctctggcaggcactcatccctagaggggcagtcctgtcctaatgtgctcgggagttgagctgatagagacagaaacagtctgctcatttcttcttcaaaacccgactggagagccaaatatttcttttggttagttacaaaataaaaaatatgcctttgccaactctgcgggaaaagcaaactcccagagtttgccttcgctaatttgtccaagtcgtgctgtggttttagtaaatgcagacactgctcagctccagccccataaacctctctgctctagggcttctccgccctccggtgaaagctactgctcgcccctgcagtcaccacctgttcgggcggaacctgcggagcgtgcacctacgcctcgggctcctttcctcctccactcccctttcctgctgggcaccctgctttccctctcccagagagggtttgcaacttttctcccaggctggggctcgccctgcttggctaacccccaagagccactgccgtcccgcagcgcccctgcccccgagttgcctgccccgctgggcccccgggaggagcggagcgcgctcacccttcgcccggggctgggagggcggcgagtcgggcgcacgcgcaccccctgcccgcccctggcgcccctccccgcgggcggtgcagctacccctgcagcgcctcccctagctagaagggagcgggagggggctccgggcgccgcgcagcagacctgctccggccgcgcgcctcgccgctgtcctccgggagcggcagcagtagcccgggcggcgagggctgggggttcctcgagactctcagaggggcgcctcccatcggcgcccaccaccccaacctgttcctcgcgcgccactgcgctgcgccccaggacccgctgccca

SEQ ID NO: 32523 - DNA, 2300 bp, Homo sapien
gatgggcaaaagaggagagcattgcaggtagagaaaaaagaatgcacagaagtgaggaaatgaggggaagtaagcaaactcaggggaggcagaaatagtgggaaatggatgaggcagcaaatttcctgtacctaatacttcatggggctgtgtaagagcacagaggcctttccacaccgtgcacacagggagtccttaggttcagaatacctgaactggggagtggtggggcaggttcaagttgtgcacatccctgtggtcccaagacgtggccaggggaggactaaagctgggtggggaagggaggaactaaagtaccaagcaggacccagagcagaggctattggagaattctgaacagcagcttgatcttatcaattttaaatgttagacatgtcactctgatagtagagaagaggactaattgaaggaagaaatgctttggggtaaagagtccagtaagtcttctataagtggagaaagggccagttctgaacagtggggatggaaatggatgaatagagacaggaaatcgtaaggatatagaatcaagaggatcttgtgattttaaaaaattcctatgtatgtgggtgatggtacaaaaaaagaagagagaaatctaggttggccctgtggttttaggcttcatcaagaagcattgctggctgagacttggagtagtggaaagaggtggagaaattggattcagctctgaacttgaactgcctggtggaaacccaagtggagctgcttggaaggaagctgggcaaatgaaccaaggggctgggggtagcagtctggagtggacatactggtttggggtcattagcactttggtggtgggttaaaactatggatgtggatgaatttggctgcaaagaaggtgagtgagacaggaaggccaaaggtggaaacctgaacaatacctgatggagaatggccagaaagataagaaaaagagatacatgggttggagatgtaggaagagaaccaagagattaccctagagtttagttgaggaaggaaagaatggttaggaatgcaaatgctgctgaaagttccagcaatatgaagaatcaagaaattgttattataccagcttaaatgtcacttcccacagagaccttccatgaccattatatactagtgaactggaaatgagaaaacagagaaagaatgagaagactccaatctgtagaaacttggctgtgacggctaaaagagaaagagcaaaaggtacattgtgaagataaggttaaagaggagctttttattgtgctagtttttaggactgtagagatgaatctgtttaaattatgaaagagttggtctcatggaacagaagttaaaggcacatgaaaggaagaataggatccagagtctggtagctggatagcagaaaagaggggatgggctggttctggccctgccgtgagctgcagtggaggagaggagacagtgtagatccagggaaatgtgtgtgggagaaagaagttggaaaaattcaattctaatggtctccaacttccccataaaacaagaagtaggggtggtggcttgaagagaaaaatgatttgtagcctctagaggaataaaagaaggagctagcgagatggtaaacttcttgagggcagggattttttctaccttttcactcctgaatcctcagcatctggaatagtgcttagcacatgagttcacatgaatgaataaacaaatgttgtttgggttatcaattgctgtataacaatcccccctacctgtggggtggtagtggtaggggaagggggaacttagaggcttaaaagaacaatgacctatcatttatcacatttctgtgtatccaccagacagttctctggtgtcacatagtgacagcttgggtgctggaaggtgatggccgaaatagcctcacttaccaggctggctttggatgcagccactggctgggagctcagttgagactgttggctagggcccttggttcccttcttgtgggcctcttcatgtggctgctttgcctcctcagaatggaggctggcttccaaaaatgagtgtcgaacatgtccaagacctccaaacagccatcttgaggatggcagaacagagacctggaaggaagtggcctcccaacacaggacagcctacctcttaacttctcttacatgcaacaaaaataacctgctgtattgttgaagccactgctttttcttgtcaactgaagaacaacgaagttacaaatttggaaaggagagctttatttctcataaagcgttgcagcctgcaggcagccattctga

SEQ ID NO: 32524 - DNA, 2300 bp, Homo sapien
gtctatatcacattttccttatgtgaatgggggtttcaaattcatgagactttgtttacaggtaatggacaagatttaggataattataaaacaacactggaaatgtccatcaatttatcatttctgcccaaaagcctttacatacactgcatgttaaacttagatgtccacccagaaataaatcaatgtatttacagccaactgattcttgacaaagccaccaagaactttcagtaggggaaaggacagtcttttcaataaatggtgctagaaaaactgaatatctatatgcagaaaaatgaaactagacccctatctcttactatatgcaaaaatcagataaagatgaattaaagacttgaatataagacctgaaactataaagctactaggagaaaacattgtggaaatgcttcaggacactggtctgggaaatgattgtttggataagacctcaaaagcacaggcaacagaagcaaaactagacatagaattacaacattctaaaaagcttcttcacagcaaagaaaacaataaactcagtaaagagacaacttgcagaatgggagaaaatatgtgcaaactctccatcagacaagggattaataaccagaatatataaggaactcaatagcaataataaaataatctaatttactaacgggcaaatgatctgaataaacatttctcaagagaaaacatacaaatggccaaaaggtacatggaaaaaaaaatggtcaacaccactaataaagagagaaatgcaaatcaaaaccacaatgtgagaggagccaagatggccgaataggaacagctcgggtctacagctcccagcctgagcgacgcagaagatgggtgatttctgcatttccatctgaggtaccgggttcatctcactagagagtgccagacagtgggcgcaggtaaatgggtgcgcgcaccgtgcgcgagccgaagcagggcaaggcattgcctcactggggaagcgcaaggggtcagggagttccctttccgagtcaaagaaaggggtgactgatgcacctggaaaatcgggtcactcccacccgaatattgcgcttttcggacccccttaaaaaacggcgcaccacgagattatatcccgcacctggctcggagggtcttacgcccacagagtctcgctgattgctagcacagcagtctgagatcaaactgcaaggcggcagcgaggctgggggaggggcgcccaccattgcccaggcttgcttaggtaaacaaagcagctgggaagcttgaactgggtggagcccaccacagctcaaggaggcctgcctgcctctgtaggctccacctctgggggcagggtacagacaaacaaaaagacagtagtaacctctgcagacttaaatgtccctgtctgacagctttgaagagagcagtggttctctcagcacgcagctggagatctgagaaccagcagactgtctcctcaggtgggtccctgacccctgacccccgagcagcctaactgggaggcaccccccagcaggggcacactgacacctcacacggcagggtattctaacagacctgtagctgagggtcctgtctgttagaaggaaaactaacaaacagaaaggacatccacaccaaaaacccatctgtacatcaccatcatcaaagaccaaaagcagataaaaccacaaagatgggaaaaaaacagaacagaaaaactggaaactctaaaacgcagagctcctctcctcctccaaaggaacgcagttcctcaccagcaacggaacaaagctggatggagaatgactttgacaagctgagagaagaaggcttcagacgatcaaattactctgagctacgggaggacattcaaaccaaaggcaaagaagttgaaaactttgaaaaaaagttagaagaatgtataactagaataacccatcagtgtgctgtattcaggaaacccatctcacgtgcagagacacacataggctcaaaataaaaggatggaggaagatctaccaagcaaatggaaaacaaaaaaaggcaggggttgcaatcctagtctctgataaaacagactttaaacaaacaaagatcaaaagagacaaagaaggccattacataatggtaaagggatcaattcaacaagaagagctaactatcctaaatatatatgcacccaatacaggagcacccagattcataaagcaagtcctgagtgacctacaaagagacttagactcccacacattaataatgggagactttaacaccccactgtcaacattagacagatcaacgagac

SEQ ID NO: 32525 - DNA, 2300 bp, Homo sapien
tcttctcaaggagtatctttgtggcattctctgtatttcctgaatctgaacgttggcctgccttgctagattggggaaattctcctggataatatcctgcagagtgttttccaacttggttccattctccccatcactttcaggtacaccaatcagacgtagatttggtcttttcacatagtcccatattgcttggaggctttgctcgtttctttttattcttttttctctaaactttccttctcacttcatttcattcatttcatcttccattgctgataccctttcttccagttgatcgcatcggctcctgacgcttctgcattcttcacatagttctcgagccttggttttcagctccatcagctcctttaagcacttctctgtattggttattctagttatacattcttctaaatttttttcaaagttttcaacttctttgcctttggtttgaatgtcctcccgtagctcagagtaatttgatcgtctgaagccttctctcagctcgtcaaagtcattctccgtccagctgtgttccgttgctggtgaggagccgcgttcctttggaggaggagaggcgctctgatttttagagtttccagtttttctgttctgttttttccccatctttgtggttttatctacttttggtctttgatgattgtgatgtacagatgggtttttggtgtggatgtcctttctgtttgttagttttccttctaacagacaggaccctcagctgcaggtctgttggagtaccctgccgtgtgaggtgtcagtgtgcccctgctggagggtgcctcccagttaggctgctcgggggtcaggggtcagggacccacttgagggggcagtctgctggttctcagacctccagctgcatgctgggagaaccactgctctcttcaaagctgtcagacagagacatttaagtctgcagaggttactgctgtctttttgtttgtctgtgccctgcccccagaggtggagcctacagaggcacgcaggcctccttgagctgtggtaggctccacccagttcgagcttccgggctgctttgtttacctaagcaagcctgggcaatggtgggcgcccctcccccagcctcgctgccgccttgcagtttgatctcagactgctgtgctagcaatcagggagactccgtggggtaggaccctctgagccaggtgcaggatataatctcgtggtgtgccgttttttaagcccgtcggaaaagcgcagtattcgggtgggagtgacccgattgtccaggtgccgtccgtcacccctttctttgattaggaaagggaactccctgaccccttgcgcttcccgagtgaggcaatgcctcgccctgctttggctcgcgcacggtgcgcgcacccacttgcctgcgcccactgtctgtcactccctagtgagatgaacccggtacctcaaatggaaatgcagaaatcacctgtcttctgcgtcgctcaggctgggagctgtagacctgagctgttcctattcggccatcttggttcctcccccggtattcttatttctaaatatgccaaattgctaagtcttagatggaaataaattagaactggaacagatgcctatatagaggcatatgttttatctgtatatataaacaaatttgagacattattattccatttgtgactgcttataaatgttctccttcatttaaggatctgctacactttctgaacattcaagaaatacaaagcagatttaatattaccagagaaaatgtgcttgtagagtttaacaggaaaacattatttatcatgtgtacaatttgtgactcaagaaatgaactgataactctgaaggcagaaaataggttatgacagtttgttggtgtgcttgtttaataattagcagtaagtaattaaaatagtaacaaaacaaaattatcacgtaaagtattctcatggagaaattaaatctcattcaatgtataaataaaactatatttgaatataatgttcttggagtactgtgtaaaaatgatgattgtctcaaactttgtaatttcagagtatctgactgtcttctctcagatgattgcatttcatgatccagagctgagtaatcatctcaatgagattggtttcattccagatgtaagtacttggtgcattaatagaacatgtggttaaaaaaaaaaagcagaaattattagcacagaagagtgtattttcttaatttttgttgtcatagtgcatatctgaacaagttactgctactaattgtagccttgtattagtaagtttgtggctact

SEQ ID NO: 32526 - DNA, 2300 bp, Homo sapien
aaataagaatatgtacaggaaagtattagtaaacattaaataataatgaattataaataaatttgcaaaagttttaccagatttaccacatttaattacaaagattgatactacagctattaagaagccttggagattcttaaatgtggtctgtaacctaaactttttactttaaattcccaaataaatgtaagtacattttccaaattatgtacaataaaaataagttagtcttgtaatcatgaaaaaacaaaacaaaactacaaagccttcttaaaaagcgctgtttacatacagtcagttcttgaagaggattggttctagcaccctcacatgtaccaaaatccatgtgtactcaagttccacagtcagccccacagaacccatgtgtatgaaaagtcggtcctacatacatgcagatttcgcatccacaaatactgtattttcaacccatgtttggttggaaacaatccacatataagtggacctgtgtagtttaaacccatgttgttcaagggtcagctatgtgtgtctgcatgtgtatatttagagagagacagagagagctagagtatctttaccttccttgtaaaggaattgctcctttatcaaactatttaagctggtatctttcagtgtcagttattcaattagtatttatctgaagcttttcatttttatcaaaacatgtaaagaaatttaacaaaatgataaagttttcagtattttaagtttcaaaattgcattactccattaaaacatttttgatcagtttattttctggtttgttggacagattagaaaaatagcatttattcatatagtttttctgttttatagattgtgtagatgacactttaatagttctggctgaagagcatggttgtttggacattataaaggtttgtcattaatctgggtcttagtccatttgtgctgctataacaaaatacctgatattgggtaacttataaagacaaaaatttatttttccacagttattgaaactaggaagtccaagttaaaggcaccagtacgtttggtcgtctggtgagggctgcagtcttctgagagagaaacactgtccttacaaggcagaagggcaagctaggcaattgctatgtgaggtctcacctttataagcctcttaatgccattcaccaggggaagagcccttatgacctaattacttcttaaaggcctcacctcttaataccatcacattggccattaagtttcaaagttcatgaagcctaaactttggagggaacacattcaaaccatagcaatctgtgaatgaaaatttattttacacacttgggatccagttggaagctattttaaagcaatgcttatttctctttaagtatttgctttttcacagtgactaaatttgtataaagtacaaataaaaactttaaaaacatcaaaaacttctagattagcaaacatttgaataaagtatatttctaaaattgatcattttaattaattattttctctctttatttaccaggagcttcctgaaactgtgatagatcttttgaataagtgccttaccttccatccttctaagaggttgatattatttagagattgggattacattgagatcctttacgcataagcaattggtttttttcttgttttaatataatggattaaagataatgtacatatggagtagtatataattgacatcagtatcataactgtgaatgatgtaagctttcattttttgtgaattaatgaaaaagtaattaaagttaaactacggtcagaaaactgacatacactaaagaagttactagttcattttcaagcttttaaatagaatattaactaaactatggaatgtaggtattcctagacccaataataacatcagtgaaatgagaataaaagtttgttgtcaatatgtattatagcaatgaacttggatcagtggtgtgataaactaacaattgttgacaataaaaaaggatttcttagaagtttcattaattgactttgacttgatgatgtcactactagtcatacagctatccctaaattcctttactatgtaatgtttgaaaataatgtatacaaatttgcctttagaaaaacaactttatcaagacatgttagagagaaatagttttgtgtcaatgtaccacattaaaggacaggaagaaaagccaaatggtattattataatagtttgcataaatattatttaattatttaagatattcagtaaagcaggtgaatgctagtcagggtaaaagtaaacaatgcagaagcttttatggaatgat

SEQ ID NO: 32527 - DNA, 2300 bp, Homo sapien
ggggctaagaaacaatgttatttacccaagaatgaatataagcccaggataggagcaatacaaaaggactagaatgcaatctgttcaaattaaacagaaagccattgggctttaaggggaaaatcttcaaacagaggaatggaagcttgcttctatgtgcatcatacaaagaatgagaagattcagtgaagaaagcacatccacctacctattccccaggagaaagcagaaaggcaattaagaaagtggggacggttaaaaactatgtattacatactccaaaatataaagcatgctcaactacagcatattttgcccttggcaggaaagaaataaaaacccatttgaccttgatatcataaataatctccttagtatggcacagggatcatgaagttaaaactctggggaaaaaaacatatcagagcatacagcttggacttgctctaagtaacaactataaagccataatactgtaaacattttattttttttattggtttttggcacgtgaataaagcgcaaatgttatagttaagaaatatattactaactttgacaatgtacaagtaaatgtccagctaagagaaagtgggcataaatgtagtttctgaagtgataaagaaaaaggtagaatcactacttttctcgttttaccaaacaaggagtcaaatatattttcaaaagttgatgtgaaaaaagtagtttacgtatattattttgaattataaagtaaccaatacaaaaactaaaaattatgattatgactcttccaaaattcagaggagattgtgaatggtgtgggctatttctagaagtcaacggaaaaagaattagcagttcaacttagggctatctcaagaagtcaacaaaaagaattaacagtttaacttattatttaacctacagacctaaaattagaaaaggttaaaagtggttatctttgaagaacagtactgagagtaggacaggtgagacagttgcactttattattcaatcctactacgctatactacttgattttttttttttttttttttttttttgagacagagtctcactctgtcatcaaggctggagtgcagtggcatgatctcggctcactgcatccttccacctcccgggttcaagcgattctgtgcctcagcctccagagtggctgggattacaggcgcccgccaccacgcccggctaatttttgtatttttagtagagacggggtttcaccatcctggccaggctggtcttgaactcctgacctcaggtgatccacccgcctcgacctcccaaagtgctaggactacaggcgtgagccaccgcgcccgaccattttattttcaatcagatgtctttatcatcacatagctgaaaataaaataaccaaataaaacacaatgatcgaaaaagataaaacactaattagcataatcagtgttctttttccactacctcttaaatggttgtacataaaaaggctcacacacaaaaatacacacacatacattcacttacacctcgtgagtggaagaaaactaccgggggaaaaaaaacgtagagatgagagattagatgagggaaacagcagtgcaagcagttgggcttgaaaattcattcattcaacaaatattttgaagcccctattttaagtcagttgtttttccagctggtgggcaaaggataatgaacaagtcagactctgtgccctcaaagaacttagagttttaaacgactcgaatggggaaagaaagtaaaaaatagggcaaaagacgccgattttatcatgaataaaatttcacatttcttcaacaggaaaatgatactaattcatttattttatatatacattctctcaagaggttatttttgtctcaaatagatagaaaccaggacagggatccttgaaaagcagccactgacaatcctcaagtaacttccttcctctgcttcactttctcctactgctcaagggggtgttacactttgacgactgactaaacctcgagggccagaaacaaaccaaagcaaaattctgcctccaaggtgagtaatggaggggcggattctagattctctaacctcctttagccttcctttgaggcagtgacagagcgattactaagcctacggttcccaaacgactcaggtgaacctgatttacaggaaaggcgggctgtagctagggatggagacagtacctatcagcaagcggctccacagctcggttctctatctattctgaagacatgcggggccactcactgctcctgatagtcctctacctcccacagaccccacccac

SEQ ID NO: 32528 - DNA, 2300 bp, Homo sapien
cggaaaaagaattagcagttcaacttagggctatctcaagaagtcaacaaaaagaattaacagtttaacttattatttaacctacagacctaaaattagaaaaggttaaaagtggttatctttgaagaacagtactgagagtaggacaggtgagacagttgcactttattattcaatcctactacgctatactacttgattttttttttttttttttttttttttgagacagagtctcactctgtcatcaaggctggagtgcagtggcatgatctcggctcactgcatccttccacctcccgggttcaagcgattctgtgcctcagcctccagagtggctgggattacaggcgcccgccaccacgcccggctaatttttgtatttttagtagagacggggtttcaccatcctggccaggctggtcttgaactcctgacctcaggtgatccacccgcctcgacctcccaaagtgctaggactacaggcgtgagccaccgcgcccgaccattttattttcaatcagatgtctttatcatcacatagctgaaaataaaataaccaaataaaacacaatgatcgaaaaagataaaacactaattagcataatcagtgttctttttccactacctcttaaatggttgtacataaaaaggctcacacacaaaaatacacacacatacattcacttacacctcgtgagtggaagaaaactaccgggggaaaaaaaacgtagagatgagagattagatgagggaaacagcagtgcaagcagttgggcttgaaaattcattcattcaacaaatattttgaagcccctattttaagtcagttgtttttccagctggtgggcaaaggataatgaacaagtcagactctgtgccctcaaagaacttagagttttaaacgactcgaatggggaaagaaagtaaaaaatagggcaaaagacgccgattttatcatgaataaaatttcacatttcttcaacaggaaaatgatactaattcatttattttatatatacattctctcaagaggttatttttgtctcaaatagatagaaaccaggacagggatccttgaaaagcagccactgacaatcctcaagtaacttccttcctctgcttcactttctcctactgctcaagggggtgttacactttgacgactgactaaacctcgagggccagaaacaaaccaaagcaaaattctgcctccaaggtgagtaatggaggggcggattctagattctctaacctcctttagccttcctttgaggcagtgacagagcgattactaagcctacggttcccaaacgactcaggtgaacctgatttacaggaaaggcgggctgtagctagggatggagacagtacctatcagcaagcggctccacagctcggttctctatctattctgaagacatgcggggccactcactgctcctgatagtcctctacctcccacagaccccacccactacgacacggaaaactggattacccaaatacctgcctctgagtctggggacgcaggcaagcacaaagacaagggggatggagcttctacacagggccccagcgctgtcgctgtggctgctgctgccgctacggcttagtgcaccagacgctgcatttcaggtgctcctacaaaagaggccactcctggaacgccgggagctcagacgctgccctttgctcgcgagccaagtcagccaaggttaaccttcgcggaacccggcgaggagcgcaagcctggccttccccaaacacagatccgagcttttcaccctctaccctcccctcagcctggccttttcttccgccctcacagccaccgcgacccaacgctgaggaaagaccccgacttgtggtgtccttccccttgcccaaactggccacgaaaggacatatagcgagagagaaagaggtgcggggggacggggggggtcgattgaaaatactgggtgagggaatggaagacgaggagcgtggtatggcaggttaatgggactgagcacaggaagaggaagaaagaattgagggttgaatctgtagaacactcaggctttcagcaaggacacctcattgggtcctttctcactgctatagtacgcgggtggctggacctacatgcttcctgctgtggctgtctcggaacccgtggtcctccgcttcatgtgagtgacgtcgtggcgggtcactcactcggggatcgccgattgcgatcgtaggggtcttccttctctaacttgcctccaggagagaggacctggcctgcgctgctaatgggtagtccgttc

SEQ ID NO: 32529 - DNA, 2300 bp, Homo sapien
atttaaatcatatgtgtcaaaagtcagaatttaaagaagaaaattaaatacactgagaacaatgcatctgaagacactcaaaatatgtaagcgcagcaaccagcagtaattccctaggtcttttatcaacctttgccaaaacctataaaaagaatatctaaaattgcttttttatggaagttcctatttcccttaccagacagcctgctttccctttactgatgaggacatagggggtcctggagggtttaaaggatggctataaggaatgactatagggtggacagctatgagaggccagtccatgcatttctaaataccatcgtcattaacacaaaaactttcctccccagtacagagtccataaaatttaaaaaggagtatgccttggcctcccatgaccctcttacctcacaataaggccatcttttacctggttaagatttgcagactagacccattacataccttgtcattaaatacctataatataccctaacctttgcaatcttgacagatgtgatttccattttatagacagatccaggaaaattacatgacttatctgaatcccttcaagtaccacatagcaaagccatgattttaacttgtgtttgccactctgaaactcacactggaattcatttttcaagtgtcctccaaagcctaattaaataaaattaaccctgtcatctataatactcttacatatccaaattaagtgcatcaagaatataactggccatttcttaccacccatagtcaaaccaccattatgcttcctctggattattgcaaaactcttcttattggtctcctttctcctaccacgtcctcctctgtgtattttccttaaagagtgaccctcttaaaaggaagtcagagcccatcactctactgctcaaaacgctccaaagtcctatttcatttagaataaaagttagatgtcctcaagatcttcatgacctgctcgccttgatttaatctccagtgaaggactaaacccttcactcaactctgccctacaggcctccttgctattctagcacgtttctgcttcatgacctctgcaatggctggtccctctgtctgactgcactttcccaagatattcgcgtggttaaatctcccacttctgtcagccctttacttaaaagtcatcttttcagcaagaccttcctgtgtcactttatacccttcttccctgctttacgtttctcttcaggactatcacgacctaaaatacagtatgtttctaattactttgcttagtatgtgccttcctctctaaaatgtgagctacaagtagacacagatttccgtctgttttgttcactgctgttcacctaatgcctagaacggtgtctggaatagagtgggcgcttaataactattcgctcaatgaataaattcctgtcttcaccctcctctcccccaaagcacctaagtcctttgacacacacattcacataacagtaaatacgcttagggatcgatatttttctgtagcattcttaacttaggcctgcatcccatttctcaaacgtggctcctttagaaggaagtctcaaactctttcctgtttccttaggccagggctggtcctgctgcgaacggactacccattagcagcgcaggccaggtcctctctcctggaggcaagttagagaaggaagacccctacgatcgcaatcggcgatccccgagtgagtgacccgccacgacgtcactcacatgaagcggaggaccacgggttccgagacagccacagcaggaagcatgtaggtccagccacccgcgtactatagcagtgagaaaggacccaatgaggtgtccttgctgaaagcctgagtgttctacagattcaaccctcaattctttcttcctcttcctgtgctcagtcccattaacctgccataccacgctcctcgtcttccattccctcacccagtattttcaatcgaccccccccgtccccccgcacctctttctctctcgctatatgtcctttcgtggccagtttgggcaaggggaaggacaccacaagtcggggtctttcctcagcgttgggtcgcggtggctgtgagggcggaagaaaaggccaggctgaggggagggtagagggtgaaaagctcggatctgtgtttggggaaggccaggcttgcgctcctcgccgggttccgcgaaggttaaccttggctgacttggctcgcgagcaaagggcagcgtctgagctcccggcgttccaggagtggcctcttttgtaggagcacctgaaatgcagcgtctggtgcactaag

SEQ ID NO: 32530 - DNA, 2300 bp, Homo sapien
ccaatagtgcatatataactcaactgaaataatgacaagattaagttatgactaagtgggtgtaagtgtgggcaatgacaaatatctcacaactgccaattcatctacagtgatttaaagatgtcaacaacttaaaaatacatccctatttcagagatgttaagtaagagaaaaatgtgtatctcagaattgatggaatatagtaattttaatcattttcttcctttcttctcctcccttcattcctattcttgccttccaacttctttccctgatttgctacacaatctaattactggatatgtaaaaatattatagtatacataaaataccccacactgaaagaccgtccttattatagtgtaaagcaatgtggtaccttttagcactaggtgaaaattcctgctaggatttaaatcatatgtgtcaaaagtcagaatttaaagaagaaaattaaatacactgagaacaatgcatctgaagacactcaaaatatgtaagcgcagcaaccagcagtaattccctaggtcttttatcaacctttgccaaaacctataaaaagaatatctaaaattgcttttttatggaagttcctatttcccttaccagacagcctgctttccctttactgatgaggacatagggggtcctggagggtttaaaggatggctataaggaatgactatagggtggacagctatgagaggccagtccatgcatttctaaataccatcgtcattaacacaaaaactttcctccccagtacagagtccataaaatttaaaaaggagtatgccttggcctcccatgaccctcttacctcacaataaggccatcttttacctggttaagatttgcagactagacccattacataccttgtcattaaatacctataatataccctaacctttgcaatcttgacagatgtgatttccattttatagacagatccaggaaaattacatgacttatctgaatcccttcaagtaccacatagcaaagccatgattttaacttgtgtttgccactctgaaactcacactggaattcatttttcaagtgtcctccaaagcctaattaaataaaattaaccctgtcatctataatactcttacatatccaaattaagtgcatcaagaatataactggccatttcttaccacccatagtcaaaccaccattatgcttcctctggattattgcaaaactcttcttattggtctcctttctcctaccacgtcctcctctgtgtattttccttaaagagtgaccctcttaaaaggaagtcagagcccatcactctactgctcaaaacgctccaaagtcctatttcatttagaataaaagttagatgtcctcaagatcttcatgacctgctcgccttgatttaatctccagtgaaggactaaacccttcactcaactctgccctacaggcctccttgctattctagcacgtttctgcttcatgacctctgcaatggctggtccctctgtctgactgcactttcccaagatattcgcgtggttaaatctcccacttctgtcagccctttacttaaaagtcatcttttcagcaagaccttcctgtgtcactttatacccttcttccctgctttacgtttctcttcaggactatcacgacctaaaatacagtatgtttctaattactttgcttagtatgtgccttcctctctaaaatgtgagctacaagtagacacagatttccgtctgttttgttcactgctgttcacctaatgcctagaacggtgtctggaatagagtgggcgcttaataactattcgctcaatgaataaattcctgtcttcaccctcctctcccccaaagcacctaagtcctttgacacacacattcacataacagtaaatacgcttagggatcgatatttttctgtagcattcttaacttaggcctgcatcccatttctcaaacgtggctcctttagaaggaagtctcaaactctttcctgtttccttaggccagggctggtcctgctgcgaacggactacccattagcagcgcaggccaggtcctctctcctggaggcaagttagagaaggaagacccctacgatcgcaatcggcgatccccgagtgagtgacccgccacgacgtcactcacatgaagcggaggaccacgggttccgagacagccacagcaggaagcatgtaggtccagccacccgcgtactatagcagtgagaaaggacccaatgaggtgtccttgctgaaagcctgagtgttctacagattcaaccctcaattctttcttcctctt

SEQ ID NO: 32531 - DNA, 2300 bp, Homo sapien
aaatagctctaaatccacactttagaactctgcgttgttttgggggaaaataagagtcaccaacgttctcacttagcgacaagtttaattcgtactcatggacatgcgccaggatcaggtgtgaaagctgtgaaatctaggtccaaaaattctgaagaggatgctgcttgtatcctcccctggcggctagctgccttctaacttcaagttgtggctcaatgcttggatttctctgctcctggacattagtgtctgcgaagcagaaatgcaataactttcgaacaatcccttgctttgcttggaaagtctcgcacttggccaccagacatcaccgaactcagcgcttgtctcctgcagcaattccgtggctcgctgaacggctgccactggcgcccccaagcgccagcgcgtcccagtcgttcccggagcagccttcgaccttcggccgaagggaattggacctggagagacccgggggctgacaggaatggcttctcttgtaattcactggggctagaaggcaggaagccaaggaagacaggatctcaaaggctccctgcccccgttcattcctatctgggatttcctattcgcaaaaagagcagttgcctggcatggtaaagatgctcattcgagctgtgaggtccaaacccttggagcgtacccagagcatccccttcttcccagtccctcagagacatagacatattctacgagtgcggcggggcccggggttccgaaggaggagactaaaaagacccaaatcgaacaggctcatcttttcccctctttggtctgcccctttccttccagaccctctatccggatcattggccaccccctggcgcacctatgtggctccagcttcacacactccctgggaggcacagtctaaaaccaaacgtgagctcacaaagaacacaatactaatgagcagatgcgcagatgctcacttctctaaagcttccatagggcttttccagctctcctcgcggagtcaggggctgaagatgggtgggaagatctaagaaagggtggcagcgatcaagtggtgtcagcttgccccactccgtttccacctttggtctctgccagtttccaaagacccctccaaccgctggagttgttgtcaggaattaggagcccctatgttccattcacctcatggaaaagctagatcccccttttccagtagttgtgggtggagacagagcgggaggatgaggaggaggaaaagctggagtgaaagccgcagaagcagaagcagcacgcagagaggaggggggcggaagcggtggggagtgagagaaaaattttcactctttgtcactcttgaattgggggcggaggtaaaaaaaaaaaaaaagtcctcactgtgggaagctataaaaagcaaagaggactggggagagagcagagagagagaaagcgggagcccgcggcgagcgtagcgcaagtccgctccctaggcatcgctgcgctggcagcgattcgctgtctcttgtgagtcaggggacaacgcttcggggcaactgtgagtgcgcgtgtgggggacctcgattctcttcagatctcgaggattcggtccggggacgtctcctgatcccctactaaagcgcctgctaactttgaaaaggagcactgtgtcctgcaaagtttgacacataaaggataggaaaagagaggagagaaaagcaactgagttgaaggagaaggagctgatgcgggcctcctgatcaattaagaggagagttaaaccgccgagatcccggcgggaccaaggaggtgcggggcaagaaggaacggaagcggtgcgatccacagggctgggttttcttgcaccttgggtcacgcctccttggcgagaaagcgcctcgcatttgattgcttccagttattgcagaacttcctgtcctggtggagaagcgggtctcgcttgggttccgctaatttctgtcctgaggcgtgagactgagttcatagggtcctgggtccccgaaccaggaagggttgagggaacacaatctgcaagcccccgcgacccaagtgaggggccccgtgttggggtcctccctccctttgcattcccacccctccgggctttgcgtcttcctggggaccccctcgccgggagatggccgcgttgatgcggagcaaggattcgtcctgctgcctgctcctactggccgcggtgctgatggtggagagctcacagatcggcagttcgcgggccaaactcaactccatcaagtcctctctgggcggggagacgcctggtcaggccgccaatcgatctgcgg

SEQ ID NO: 32532 - DNA, 2300 bp, Homo sapien
tcacttaactttataaacttacaaatttattactgggcatatatagatgttaaatgttcttactacaatcatgttatatgtataaatacatatatatattatacatgtatataaagtcacacacatataaaatttatatctatatagcatgagatctaccttctcaataagtttttaaaaatacaatgcattattgttggctataggtacaataccatatgacaaatctctagagtttattcatcttagttaactgaaactttatgatcattgatatagtaactccccattctcctctccttccaattcctggtaaccatcattccaacctttgattctatgcatttaactattttaggtacctcctataagtggatttgtctttctgtgattggtcgagttcacttagtatgatgtccttcaggggtcacccatattgttattcctggcatatttttaaaaagtggaaaaaaaaccccacacactaaaatgtgaaaaatctctaccttaaagaaaggaaattcaaaagataagaacacatgccagagggtgcatattttaatccccgtttccttgtgtattaaaaaaaaaatctgaaaatgaagaatttcagggcagacagactcataggtcaggactgagaaatttgcaaaactggagctgtctgggagaaaatagctctaaatccacactttagaactctgcgttgttttgggggaaaataagagtcaccaacgttctcacttagcgacaagtttaattcgtactcatggacatgcgccaggatcaggtgtgaaagctgtgaaatctaggtccaaaaattctgaagaggatgctgcttgtatcctcccctggcggctagctgccttctaacttcaagttgtggctcaatgcttggatttctctgctcctggacattagtgtctgcgaagcagaaatgcaataactttcgaacaatcccttgctttgcttggaaagtctcgcacttggccaccagacatcaccgaactcagcgcttgtctcctgcagcaattccgtggctcgctgaacggctgccactggcgcccccaagcgccagcgcgtcccagtcgttcccggagcagccttcgaccttcggccgaagggaattggacctggagagacccgggggctgacaggaatggcttctcttgtaattcactggggctagaaggcaggaagccaaggaagacaggatctcaaaggctccctgcccccgttcattcctatctgggatttcctattcgcaaaaagagcagttgcctggcatggtaaagatgctcattcgagctgtgaggtccaaacccttggagcgtacccagagcatccccttcttcccagtccctcagagacatagacatattctacgagtgcggcggggcccggggttccgaaggaggagactaaaaagacccaaatcgaacaggctcatcttttcccctctttggtctgcccctttccttccagaccctctatccggatcattggccaccccctggcgcacctatgtggctccagcttcacacactccctgggaggcacagtctaaaaccaaacgtgagctcacaaagaacacaatactaatgagcagatgcgcagatgctcacttctctaaagcttccatagggcttttccagctctcctcgcggagtcaggggctgaagatgggtgggaagatctaagaaagggtggcagcgatcaagtggtgtcagcttgccccactccgtttccacctttggtctctgccagtttccaaagacccctccaaccgctggagttgttgtcaggaattaggagcccctatgttccattcacctcatggaaaagctagatcccccttttccagtagttgtgggtggagacagagcgggaggatgaggaggaggaaaagctggagtgaaagccgcagaagcagaagcagcacgcagagaggaggggggcggaagcggtggggagtgagagaaaaattttcactctttgtcactcttgaattgggggcggaggtaaaaaaaaaaaaaaagtcctcactgtgggaagctataaaaagcaaagaggactggggagagagcagagagagagaaagcgggagcccgcggcgagcgtagcgcaagtccgctccctaggcatcgctgcgctggcagcgattcgctgtctcttgtgagtcaggggacaacgcttcggggcaactgtgagtgcgcgtgtgggggacctcgattctcttcagatctcgaggattcggtccggggacgtctcctgatcccctactaaagcgcctgctaact

SEQ ID NO: 32533 - DNA, 2300 bp, Homo sapien
tcctgtttgatgtttctggctcatttgcatgacccatatctggaatcatgaatttggatggacagtatcaatgtaaacttatgatatattttaccttaaaaaaagtcttttactagaaataaggtcaaactcacagcagtgagcactcctagagccagatcgttatatctaaataccatttccctctaataagaaccagaactcagagcaatggctaacttcagatgtggccctattttctcatatgaagcttgagatcttcttccaagctcattcctgttattggcagaatttgaaattatattgaaattcagttctatgtatgaaccccagattgaaaattccctagaaaaaaagctgaagggaaccattcacattttaagtagtcaagtaacaagatcagatttctgtttcagaaataccgctctgacagcaggtgcaagaatggggtgtgtggcggggatgtggagagcggctgcacagctgggaggatgtccagtgaacgggcttaatgataactcaggctggatataggggaggcctaatttaagacagtagcagtggggcaaatagatggagggctgatttgctagtcactaacaggcagcagcctcaggtcttggtgatgggggctgatttgctagtcactaacaggcagcagcagcagcctcaggtcttggtgatgggggctaatttgctagtcactaacaggcagcagtctcaggtcttggtgatgggcggggtcaggggcggagggcggctgtgtcacaggggggcagagctgcaagcaactcttttggtgccaggggcaagctgcggaaaagagaactcagagttatggggggtgtggggaagataactcctggaggaaactctgtcatgcccccagcccatcctcctacgaactagccctggaataattaggtgaatttgaaaatgtcctccgtaggcgggagttctattcggggttacctgcggcctccccggtcctggatttcagtcctctaggtatttcctgagtagctcttaataatacagaagcccctttccggtgtaggtcggtaagaagcactgcacagaaatctgatgcgaagtggggtctcctagcggagagggaggcaccttataagtaatcactaatccaggttgagatattaattattgatgtcaagaaatcgggcttttattatatctttttaaaaactgtgtcttgaggccaggcgctgtcgctcacgcctggaatcccagcactttgggaagctgaggcgggcggatcatgaggtcaggaattcgagaccagcctggccaacatagtgaaaccccgtctctactaaaaatacaaaaattagccgggcgtggtggcacacgcctgtagtcccagctactcgggaggctgaggcaggagaatcgcttgaacccgggaggcagaggttgcggtgagccgagatcctactactgcactccagcctgggcgacagagcaagactccgtctcaaaaaaagaaaaaaaattgtgtcttgagtagaattttaatgtggagaatgagctgttcggtaaatcaattcttccctttgcaaagctgtaaaacatttaaaacatttggccagggtgacatgggcacagaaggggcagacaggaggtcggcagccaggtctgtggaggagtagccacaggtgcaagaggccgcgtcagcgtcctcccaatcagcctctgctgagggagtgccgcgcgcggcgagccgcgcactccccttgcctttctcccggcggctggtactcgctcttagagatctgcgttagctcagagctaggctcggtgccgcagaggcacctgaggttccacgactgcattccaggccccgccccttcatcgggatctggaaggaggagcgccgtgcgcgcccgcgccggcgcgagcgctgaagctccgcccccagcttctacctccggttctatcccggcgtttcgcccttccccacagacctctgccccggacccatttccgaggcgcgccgcatgcgccgcgcaacccaggccacgagcacgggcgcgtgcttaagtcagcgcgcgcccgctccgacgcgaggaggccccgccctccagccccgccccgctcgctggcctgccctcctcttgctaccctcccggcgcagagaaccccggctgctcagcgcgctccgcggtcatggagatccccgggagcctgtgcaagaaagtcaaactgagcaataacgcgcagaactgggtaagctggggacgaaggcgagacggcgaggagcggaggggctgtgggagcagctc

SEQ ID NO: 32534 - DNA, 2300 bp, Homo sapien
agaattgcttgaacccaggaggtggaggttgcagtgagctgagattaagccactgcactccagcccaggcgacagagcaagactccatctcaaaaaaatttttttaaatttaatttttgtaggtacatagtaggtatatttatggggtacacacaatattttgatataggcacataatgcataataatcacatcagagtaaatgggatatctaccatctcaaacatttatcctttctttatgttacaaaccaattatattcttagttattttaaaatgcacaattactgttgcctgtagttgccctgttttgctatcaaatactataccttattcattctatctaactatatatatattttttacccattacccatcccccctacccttcccagcctctggtaaccatcattctactgtctccatgagttcaattgttttaaatgttagctcccatgaataagtgagaacatgtgaaatttgtctttctgtgcctggcttatttcacttaacataatgacctctagttccatctatgttgttgcaaatgccaggatctcattctttgttatggctgaatagtactccatgggtatatgtaacgatttatccattcatctgttgatggacacttaggttgcttccaaaccttggctattgtgagtagtgctgcaataaacataggagtgcaggtatctctttgatacactgatttccttttttgggcatatatacctagcagtgagattgctaggtcatacggtatctctatttttagttttatgaggaacttccatactgttctccatagtggttatactttttacattcccacaaacacaagggttcctttttttttccacaacctcgccagtatttattgcctgagcaccttttcatatacctgtttgctatttgtatgtcttcttttgagaaatgtctattcaaatcttttgcccatttattactcggactattagatttttttttcctatagagttgttggagctcctcatatattctggttattaatcccttgtcagatggatagttcccattctgtgggttgtctcttcagtttgtttcctttgctgtgcagaagctttttagcttaatatgatcccatttgtccattttctttggttgcctgtactgtgacgacatcttgaagttgcgagtttggggattgcctgccttgtatattcttttctgttaccatcatctttaatagccacaaatgactgttgacccacatgatatctgcactagaaacccaaagattcccgtcattatttttgttgattatatggaagcacccataaaccagcgcaaatcctaaacataattatcttgtccagaaggagacattaatgtaaaacttatgtcaagaaagatttagccacattccctcggattggtcattcctagttagagtccttgaggctgccatcgtttactttgaaaactgcccagcaggtgtatgaatagcaactccaggacaatgtagaaccattaccattttaaagacagcaatcccccttttaaaaaactactgaggccttcgaagaaaccacacggctgccttgggccccaaaagctgcggaaaagcgcagtattcagttaagcaaataactacttacactgtttattttggttacgattccttaagtgagaagtaaatcaattaacaggacaaatgacacgatggttaggcacgaaagggacagtgctgccacctcattagcttggagcaaccttccagctcataccatgcggactgatgactaaccttgccaggcaacgctgtgaggtttggaaacccacctctttgacctaggcccggtcaacaccgataaaccctctgaatcaacgctggcgctcccaagcccactcacacgccgtcaggaagcagtttccgaaacaggccgggtgcgggggtgggggatcccgttccagccccacccctgaaagttgctgggagtggcacccaaagaactttcccagattgatctctgttgccgctcagggaggtcagctccaggccctcagcctttcggccgggagccaaactgccctgcctgccaagcccctccttctctgcaccttaaacagccgcgaggggagagtcggctgggattttcttcttaagaagtcgcgcaggtttttcgagctccactctgcgccaggagagccacggcagcaggaacgggcactgctgccaccgggccgacgggtgagtcactgtttggaaatggagtgggcgggcgagggtgtgagagaatgaatgatgtcaagagcgcg

SEQ ID NO: 32535 - DNA, 2300 bp, Homo sapien
gtctatgagaatttagccacttcagtggccttgttccccataatttggaactttccttcggatttgatcaagtcggaagaagttggtcaaacccaatgggaaaaagactgaaacaacaagaaaaagagaaacaataaaaaaaaacagttaagcaaaaaaaaaatgattgcacaacttatatgattactgagcactctaatggtaaagacattaagaccagctggttgttgattttaactttagccaagacaaaccccaatttagttatctaggggttgttgggtctcaggctgaagactgctttctatcctagtgaagcagccttgttgtctggggtgatacctgaggttcattgtctcatgcagaggaaatcaaggacatggacacacaaggagtgaggttaaaagcagaggattaataggcaaaaggaaaagaagaactttctcctgcagagagaggggtcccaaatgggtttctgcttcctcagtgaaatgcaggttttatagatgagcttgaggaggtggtgtttgatttacatagggcatgaaagattggttggaccaggtgtgccatttgcataagggtgcaaaaagctggccacccccaccctaatgttttattatgcaaatggattatcttcctggcccacaccatgttgcctgtttctttacacatggtgacaaaaaggaagatggagcctacacgttgaacatacctggcccccaggtagccattttgtattggcacagctgctggcagtaacctgtgcaagcttccagcttgcttatctatgtctgcagctcaatttttcaggctgctcttcattagacaaaagaagtttctcgggctgctttctgttagaagggaagccttgccaagaactcttaccctcactatctgcctaaataacttctatctcctgtgtcactaggagcaggaaaaaaaaaaaaaaacctcatcttccctgttggaagggaaactccgtaaaggagttacctaccttccatcatcatggaagcaggaaaaacttgcctgccttgtgttggaagcaactaaaactccaaaaaaaaaaaaaaaaaaaaaaaggttgtacagcaaaataaactttagatctcaaccagaattggggagatcagggattctctggaatgggtgcttccaggcctcagcaaattgtcctattggtttaagccataaagatagcccaaggttgaaccaagcactgataggagatttgttaaaggtcaggggcacctccactcagaatccctctgtggttaccaaaatgtgaaccctgaaaatctgagacaggtctcagttaatttagaaagtttattttgccaaggttgaggttgcacacccatgacacagcctcgggaggtcttgaagacatgtgcccaaggtggtcagagcacagtttggtttcatacattttagggggatatgagacatcaatcaacatatgtaagatgaacattggttcggtccggaaaggtgggacaactcaaagtggggagaggccttccaggtcataggtagataagagataaatggttgcattcttttgggtttctgattagcctctccaaagaaggcaatcagatatgcatttatctccatgagcagatgtgtgactttgaatagaatgggaggcaggtttgccctaagcagttcccagcttgactttttcctttagctgagtgattttgggaccccgagatattttcctttcaaaataggaatgaatatgttgtgatcattatcttgatgacaaacatttcgtcccaagatttgttcacacatgatgaatgtgctatgtatatttaatcttaatgaaatcccaaggaaaatattaattttaacactaataacgataaatgggcattgtactcacatagtgttcttactcccaggggcacaaagctcttcacaattaattatttcagtcattctcatagcagtcccatgaggtgggtggctgagtgtgtcctcttggaaaaaaaaaagaaaaaaggttactaattggattttcttctgttccacattctgtgttctagaaccgagtagctaccttataaagaccatctgtacatccactgtgaaatggagtttcaaaatcacaagcttctttcccacatgaacataagactaggagcacatatggaagagtaaagttgaagggaatttggatgatgatttggcaagatgctgtaagtggattaggcaaggctgctaaagagagacaggaaatggctgtgttagtgcttcggacctccgttagaagtagcagttcatggtgt

SEQ ID NO: 32536 - DNA, 2300 bp, Homo sapien
aagtgtatccataatattatgaacaatatcccttcctgtattcgtttgctagggcagccataacaaagtactacagactggatgttttaaacaacagaaatttatatttatatcctcaccgttctggagactagaagtcaaaactcaaggtgtcagcagggttgatttcttctgagacctctctcctgacttgtagatggctgccttctgactgtgtcctcacatcctctttcctctctgtgtccttatctcctcttcagacaccagtcatattggtaagagcccatccacaggactccattttagcttaattacctctttaaaggccctttctccaaatacagtcttattctgaggcactgggggttaggacttcaacatatagtggtgaggagaggctgaattcagcccagatttcctatctgccccgcacagctattaacctagtgaaaatgagagatttaggaaaacactacacgtgcagttacatcctgtacaatataaaagggtggctgttggagttgttaaattagtcacagcttcaactattttaaaatcatttatgaatttaaattgcttgtatgggatgatgtatatagtggctactgtttcagagagcaaagccctagaatcagatgacatccagaatgtcatgttgaagatcgtatctgcaaacaagtagtttaaatttttaaaaacttctcttaattcaaaaattcaaaaaaaatgagaaaagtaatctcacaagtagtggttaattatagaagatgagaggtgtggaggttttttttttttgtttggggtgcataagcttaaaataacatgaaaagcatgtcaaaaagaatatgagaacagagtggacttgaaatttaacatatcctactggcatcacttgtttatagaaaaataaaatggatcatgtatttatttgaggactcactatgctttctttgatcacatttttataggtacagcgtggtgttcaaacttttaatgtatggagaaaaatgaaacggctagaaaaatggcccagtacagacaattctatgctcaatccaacttgaacagaaactacaggatttggcctaaacaagactgaaagggaagcccttatcaggaaagccattatctgagaagataaaataaagtaatactttgtttttaaagtattatacaattcatatctaatatttcaacctcagcctttcaagtgttgtctaacaccaataataatattgccacccctccctcaaccggttatcttcttttcatatttctagctacttaaatccaccaagcaaattctggtttcgctatttctggatttaagtacattttctaatgcacccaggccacacgcaggaatggacacagctttcgctctccgcataagttttctagcccagggcaagctctcagaacgtgactcctcgtgcctcgctgcccgcccctcgctccccccactcccgccatcatcccttccgcagagttggctgccaagccgacacccacagattctgcattccacggcttcccagcatcctgctgtctctgcgtggaggaaagggtgctgcgaatcccagtttagataaggaaccccgtcttttcactactacaccgaagcatgcaggaatagggcgttgaccccattctcccagctcagggcacaggtgctaaggccgacccatctcacgggcctgttcaccagtttcccacactcagtacagatcctaacacggtttatgcacttcataaccatgcgtttgtgtttgtcaactgacaaacgagtgataatgacaaacgaatgacacaagggaaaccaacagccaatcagagcgcaaggttgtgttgccagcatcccagtttcagggacagtcaccgccaagcccgaccctgcaaagggtcgtaaccggacttcggggcaaacttcaggtcccccgcctgctagcccgccaaccccctccgccaggcagccggcgcgcctccaggttccgcccaggcgtcgctgagtggcggcggcggggagaatgcgcgcggcgcagccaatccgggggcgttcctacaccccctgcccgcccccgaccttccagagcagagcaggacactggcgccgcgggtcaggcagctgcgtgcgcgtctcctccaggcagcaaggggaacccgaggccgccggcgcccggaccatgtcgtctccggggccgtcgcagccgccggccgaggacccgccctggcccgcgcgcctcctgcgtgcgcctctggggctgctgcggctggaccccagcgggggcgcgctgctgcta

SEQ ID NO: 32537 - DNA, 2300 bp, Homo sapien
catttaagcccaatcttaaaagcaagtgtgaaaaaaaaaaaaaaaagaagtgttggtgaggacgtggagaaattgggacccctgtgggaatgtaaactggtgcactcactgtaaaatagtatgatggttcttcaaaaaattaaacctagaattaccacatgatcaagtaactcctagggactcagatatttgcccccttctatttatagcagcattattcacaatagcccaaagttggaggcacaagtgtctatcaatggatgaatgggtaaacaaaatgtggtatatacagtcgaccctccacatttatgggttccacatctgttggttccaccaaccgcagatcaaaaaaacacatctgtactgaatgtgtagactttttttcttgtcattccttaaacaatactgtataacaactatttacaaagcatttacattgtagtaggtattataaataatctagagatgatttaaagtatccaagaggatatgcataggctatatgcaaatactacaccattttatatcagggacttgagcatcctagggttttgttattcgcaggaggtcctggaaggaatcccctacagataaggagggatgattgtacatatgatggaatattagtcttcaaaagaaaattttcacatatgccacaacatggatgaacactaagacattatctaaggattttaaatgagtagggataaagatcataatactttaaatgccccactgaaaaacaaatgtcacagttcacacctcatccactacatgccttcgtaatactgcttctacctaaaattctcttctgagctcatgggtgcctggagaaaacctacctgcttttcttttcttttttaaaaattgtggtgaaatacatataaaatttaccatcttaaccatttttaagtgcacaccttaatggcattaggtactgtcacactgttgtgcaaccattgctaccatccatccatagaacttttttcatcttgcaaaactgagactttctgtccctatgaatttcactacgctaggaggcacctcatataagtggatcatacaatatttgtcttttccgtttaaaatcctgatgcaaaactctggctttatcagattctgaaaagcctagatctttctttgccatgttataggggcaggaaatagcattcatttaatagatacttgaactcctactatgtttcagacagcaatgactctgtcctcctagatgtcagaacagtggtgaagactgacatccaggcccaaggtcataaagttatgtagcgtcagttttgaaaagtgtagtgaaggaaaagtgcttgggcaagggacctggttctaacaagggaggctaccctacttgcagaggctgtgagaaaaggcttccccaaggaaaaggcatttaacacctgactgatgcgtaggagtgactcagaaaagaagtcagagacctaagccagccagtaagacaaagggggacggtagagacaggttagattggacattttattgcagcagataacacgttttccaacccccaaaaatgtccaatttagactcccatacgcaggaatcagaggctatgaaccaaagccggagatttggtaataggcttcttctgtgttttctggactttttatcttattggaaattatcttcttaaattcttacattcgaaacccacaaggtaaaaagaatatccttccctctttctaacatgggggccaaagtttctctccgaggtcacagctggtggaagggaaggctacttttggaaagatggaacctggcttgccaccttgtccttccgccatccctattactctccctcaatctccggatgacttttctacttatgatcttggagtatgagcaagtcacgcgtccgtcactacttgatgggatcttaaaggcatcagaaaggagaagcgccgccaccaccatcacctgttagttcaggatgcaggtgtgaggcagcctgggggcgcgggcggccggaaggggcacaggaactgcagcccccacgcacctggagactcatccgcggcatccgcgtacccacagcccacgacctcccgctcacccttctccttggtcacgatggagatgagcggcacccgcgggcggtcgctgaagacctcggcctgctgcaccagcgcctcgcgcacgctgtggaagtcgctgaggaccaccaccaggtagtggccgataaagaagctgaagatgctgccgtacacgcgggctaggtgagccaggagcacctgcgggcctatgaccgagggatcaatccctgcggc

SEQ ID NO: 32538 - DNA, 2300 bp, Homo sapien
gacattgctaagactggactgactgataagtcataagatatgtacatattcagtatgactagacattgcagtttactctctgaattggagagtactctgaaagcgtgttcacagaagtgtttaaatgttctcatttgttcagaatagttgccatcacttgatacttgtcaatgttttagttttgtcaatcagaaggctgaaacgtatctcatcgatttttatttgcatttctctgattgttaccagtgggtcagagcagctttttatacggttattggccagatttcctattctgtaatttgcatttatctactgtgcaattttctttttcttatatatttgaaatgcatagcagatcttttatcatctgattttttaagtttctaaatggtattatttgataagcagaagttttaaatatagttggatttatcaatcctttgatttgtgctgcatattttagaaatctcctcctaccatgggttcataaacacattctctattttcttgtaaaaattttaaattttgttttcacatttaagtttctataatctacctggaatttatatttgtgttaggtattgctacctattgtgaggtaggaatccaaacattttttccctatgtagacaacctattgttcaagcatgatttgtcaaagggtccccactctacctcacccttcaccaccaatctgtaatgctgtctctgatacacatttcctatataggggtgggccagtttacaggctttctagttggttatattggtctatgcgtttatcactgtgctcaaagcacattgtcttaattactgttactttataataagatataaatagtctttatagtaatttttatatctaatagggaagtccccttttccctacaaaacctcgttctttttaaaaactgtttcaaaaacttcaaaatcagtttctcaaacttatttaggattttggttggaactgcatttaatttctttttcctttattttattttttttaaacacagaggtctgggggatccacagagcataggaggcatttgctgaggtgcagacagtgggtggaggagcctaataggtggtgactggcagctaagttgtctcctgggagggcttgggttcacccccaggccccatccccagtctgagactgtttgtctctggatgtggccaccaagaccccaggagaggcagaatttctgctggcagaacttggcttggacgctcactttgtagcgtctatgtctccattgtcacgcagatacacttcatttctaggttaatttgaaaactgccttctttatgattattgaacttgtaatctaagaatgaatctaaacttgcttgtttttaaatttctttaaaaaattgctggattttgtttcgtaatgtaagctttttaaaaatagtatattcacgaatgacaatggcttataagtttcctttctcatgctgtatttgtcttgaatatactggcctcctaaaacaagccagggtgtagtctttgtctctgaaagaatttgtctaaaattggaacatgttcctcttttcctttaggttctctttttattataatacataatgtttgccatctgactcattaattttcagacctctatcttaataaataatttaaagctctacatttgcctctgtctgggtactactctagctgcagttcacaagtcttgtttccatgtattttcattatttggttttaagtaaaaaaaaaaaaaagtttctattttgagtcttctttgctaccttacctggtttatcttatgctgatatttgacatttgacatttgcttgcttttttaccctagtatgtggccaatgaaatttctaaataaagttgagaagaatgtttgtccaagtaattttgaggaatatgtcctctctatatgtccaatagagaaagcttgataacggtcaaagccaaattttctgtacccttaacaaatttttaactgcttgatctctcaaccagatacttatattaagctattttgctataatggtggatttatcagtttctctttacagttctgtaagtttttgctaaaggtagataaatatcaatgtagctatacagatttatatttatatatatatatgctgttaaatacagatatatattagatgacattgttaggtacattcaagcttagaattctatcttcctgttttttaaattttttaaaagtggatccatttatcatgaatgccctcctttttcttaacaataaagtatcacttagagtaccttttgtcaaaaaagaaccacttttctt

SEQ ID NO: 32539 - DNA, 2300 bp, Homo sapien
ctattccaaacttttctaatctttatgcttctttagtggctctccaggttattataacttgtgttaccaggctaattacaaaaatggatacctctttaaatcaggccataaggctgaatcaggtcattcagtgaactatggtccttgtaaaaagtaaagtagaggttccttttcaaagactttcctcctcatctgattaggaataaatagtaacctctcttagaagcaaaatttattcaaagacctgttaacattcttaaatatctgctagctgtaataaagaaatcaatgtactttatgttcttagctcccacaatttagcctaaatatttgccctggcatgcttatactggtccaagtgggcattaggtcatagcctgttcctcttccttatttagaggtgtttttcccttctcagcattccacaagttacttcctccttcctttgttctcctctgcctttgcctcttttaagaatttctaagttgctagccaatcaagacaaatacagaatgtgaagtcccgttctagccaatggaaaccagtcacaacagtaaggtggacgggtcaggttataaatgaccctgcctcctttgttcggtgtactcttgtggcaaaactgctggcgagtgtactctttccgcagaaagtaaaaatggccttgctaaagaaattaattttatgttcaagtgctatttctttacggcaccaagaaataagcatttctagcagtccttaaccgccataatgccctaaattagaccatgaccaattggactcaaatactttgaactatctttattgcctgaactttgaattgtttaattttgatcagttcagtttgtggagactcctgttaaggtgtgtacctcagtttattgctatactccttctcgtggccataatagtctccctgatgtgttgttgtcccctcgagagtcttcaatgtctctatgcagccatcctttgtacaccaaatggtgttattacagttagaataacaacatgaagaaagtataatcactcaactaatttgacattgtgacttccatactgagacaaaacaaggttctggtcaatctcgtaaaactgagaggctgacccaaaggaggaaactgttattaaattaaatctggcctaaagttgcctccctacctagcaaagcataatcaaacctaatatgtaaataaactgcaatgtaatttgagagtacgttcttctaacaagtggccaagtcttggccaatcaccgcagcggagcttttagcccattacaggctgcaaaaaatattgtctataaacgcggcttgcccactgttaggggctggagctctctgaacctttactggctcaggatactacatgattcatgctttctttgctcagataaactctgctaaacttgtttgaagtttttttgttaacaatatttaaacataaagcaaataaattaataagaatcctatatcactaagttacagtaattagaaagtattcacctgagtgagaagattggccaagctgctatccagtcttccattatttgacaagacatttctttcctatgctttctaatagtattcgttattccagaaaggttgctctatgaccttaaaccgtccacatgttcactgcactgatagacgtccaacgtcaagatgggtaactaaaggtcaactctctctttaccttccctgagcctgatttttgcattgtaactcatggtcactagacatttgttttgggtgttcgcagtctacatttatttcccttttaggggaaacaatcactgtccacgggattaaaataatcccgagttgattatttggtgacatcaaccaacggtgcacattttgggtccattaccaacacagccaagcagcacatatttcttcagagcctagatatgcacatgtcatcaaaggatagcattttacagagtcaacaccactcacttcatagaacaaggggccagtggcttttcagaagaagggtctgttctcggccccacaccagaacgccagccgccaggtcccgctgctcagcaggtctcaagcccgcgctcactcgggctccggctgctgacagctgcgagcccgcgcgtgtatacccgctcaacgctgggacgttacagccagggccaatgggcagagcgggactcgaggccccgcccccgccttgtggcgtcacggggacgccgggggcgcgcgggctgcagggccgcgtaggtccccgcccccagagtctggctttccgcggctgcccgcctcgcgcgtcttccctgcccgggtctcctcgctg

SEQ ID NO: 32540 - DNA, 2300 bp, Homo sapien
atagaaataaagtgcacaatcaatgtaatgcacttgaatcatccctaaaccatcccctcttccctgcaagacggtagaaaaattgtcttccgtgaaattgtctcccatgtcttcctggtgccaaaaaaggttggggacctttgctccagagcatgcagcagcaaggcaccatcttggaagcagagaacagccctcaccagacactgaacatgctgatgatcttgatctctgttgtttatacattacccagtctttggtattttgttatagcagcactaacagactgaaataagccatattactagagtttaggaatttaatggctcaggagaaagtagaagcaccaagtgtagtgaataaaatagcagctaacaagctttgtgcaccttcacatgcctggcactggtctaagcatgttaaacacattaacttctttaatcctcacaacagttttatgaggtgggtacctttgttactaacctttatgacagatcaggaaaccaagacatagaggcttcgtagctcacccaaagtcacacagtgagtgagtggctaaatcagtgtcttagtctttttttttttttttttttgctgctattaacagaatacctgagactgggtaatttataaagaacagaaatttattttctcatagttctggaggctgggaagtccaagatcaaggtaccagctttggtgtctggtgcagacctactcgttgtgtcttgctgggggaagaaggctgtctgcacatggcagaaggtggaagaaagctagacgaactttctccgtcaagtccttttataaaaacctttaatcccattcatgagggaggagccctcatggcctaatctcctcttaaaggccgcacctctcaatactatcatattggcagtgcctgacttttgaagaggacacattcaaatcatagccaggttttaaacccaggaactccaactataggcttgtttctccacatatcaccatgccaccaagtaatttaaagactttggtggtaaagcaaaggccagcctcaggtgattaaggaggatccttttcttcctccctttttatatggagcaggatcccagcccgtttgtaaaaaaatagaaggacacagaagggaaaacttgaaaatgaaaactgaaaaacaagtcatgaaatcagaagatgtgagatcaaaagcaaaataaaatagtttaccttagaaggctgtgcctggatccaacaataggcctcagacccttgcagaaagaagaagggggcagcccagaattaaaaaaaaaaaaaaacaaaaaaaaaacccgcaagctattgtgatgtgccaggcaccactgcaggtttttgacttgtattaacccatttaaccctcccaacaaccctgttgcccctgttttatagatgaggagacagcctgctgaggttaaggaatgttttccatccccaacttggcacacaggctctggagtctggcccttgcctgtctcagtactgtttcaggctgttgccctcagaccccgccatgccttccagggtcaagaaaggcatgtgagcaggcagcttgagctccctgtcacgtgtagacagtgagaataatgtgccttccccaaaggcagttatgaagatcagaggagataatttatgaaaagtgcaagctctcttgagagtaggggattttgtttgttcaccttacaaggcaggtgttgagtcaataggctgcagtcagtgaaggaatgaatgcagtggcatgcgcagcgtggtggtctaagtggtagttttggtccatccctaggggagcacaagtcttgggcagaggatcaaaagcacacacctctgagaagccaagtgtttttgtctgtaacctttgatcattcaaaaggaagcattttctaacctctgcatttttttacccaaactgtacaaaggcttccttgctgtccaagttgtggtatactccagtgcagctgcctggcttccaagagaaacttagcacttcttgttctgtttgtagcctcaaatcaacatgtaaccaaaagctgtgaatgaataatccaaacttgaagaaccccagattttattcaggaggagtaactggaagccataaccatgaacttccatatctgtcataggaaagaggttggcctcagcagcaatgagggataattctttcaagaaaggaatgaagagagaagttagatggaaaagagatttttaaggtcaaaagaagcagctgaagaacatgtgtaggacagccttaggagttactacacttcaagacctgggtgtctgctggaggaagg

SEQ ID NO: 32541 - DNA, 2300 bp, Homo sapien
agagaacgtctgttgagagaaatgtggattggatagcgtttggaggtgagtagatgagggaggtctacctagctagttattaccctctggaagcacttcagctgacagaactacaatgggcttttgaggctctctccttcaaaacttgctcaagaccatttctcccatgtttcccgtggtaggaaggatctagcggtcatgacctgcaccaggaggtctggcctaccaataggacacatgtcctcacagaggagacaaacacagagggctaggctgatcaggaagagaaaccagtagctacagaaaaattcccctggagtaattcattaacggtcacaggcttgtctcaaagtcatcttgacattgccaaagtctggttgagctgatggtaattcactctgaatagccacaggagaggaagccttgccttggtagaacatgaatccaggagtggcaatgacccctttcctcccacctccagcttctgggaatctttttgctttagagctttgtggttaggggattaactaactagtcttgaatgctgggactaaggagtcattcagctgcagaaataaaactcagtgttaaccttcctaaccacacattttcatttttcttttttctcaaatgttgggtaatgtttactgtcaaggagctgaagctggcttttgtaggttatatttccagtcttagggacttaaatttcaaagttaacttatgcgtttgtttctctttatcatctttcttcaaacagagcgtgatatcctgggggtggctgcactgttacagatgtagactgcctccaccaggatacaggggttgttgcctggggatggacagacagaatgatggaaggtaggaaggagagaagaaagtgaatgataatttagttccaaggtatggtggagagaacacatgttgagagttcagaggctcatcctgctgcctattagttgggtgacctttggcaagttactgaacttcaggtagcctcagtgtccttatctgtaagtgggtgggaagatgcaaactgtaatgatgataatgtgaaattctaaagtccatgtctcagtgcctggcaaatcagtgcgtagtggacagtgtttttgttccttccccctcaccagcttcttgcagacaagaccaccttcaagtcaacaagactgtcacttttatgatgccaggaggcctggggaacagcccagcactgggactctctaggggtcaccatgggccagtcattttatgaccatattcctaagtctctgctaaaaaaacaggattagactagctctgtcacgcttgcttcctgctgtagaagtctgtacctctcttccttcatacacacatgacattgtgcagcagaagagttcacaccctcaaatcacaggcttttgtcagtttttcccaaggtgtaaaaatggagacaattggcatgaggtgtgtggtgtgatgctggaattccatttttgcaattaaaatctgtgaatctgtttacctctcataaaaccaatctctaatattctcccctcaaattgcacatcgtttaaggctcctgcctcttgttagtagcatttgagagtggcgtaaaaggaagaggacgacgaagaaagggtcttttattccaactcactttttttgtatcctcaccaattctgaataaggaagtgatattacatgatggggcaggggtgcattttgttcctggacaccagctttgctgcccttgccttggcctggacagcttaaactgactggccagtgagccctgagtggcaccctgacagggctggcccttgcctgctcctgaccctccactccaccacctcagagctcacccatagacttgtctccttggccctttcttccagaggacagcctggggaggaacccccaggacatgagctggccaagcgctctgcttttggtaggattttacatttatttgggcttagagagaaggagtttccccctttccctttcttcactcctgagtcagggtctgtaaagccctattggcccagggtcggtgctgttgacctcccagaaacaggcccactcttgaaatctttagattcacctttattgcttgggcttttagtaaggaactctacccatttgggttcatggttccatttggttgatgggatattttgtcaagattggaatttggtccaggagagcatcaggggggttcggttatatggggtggggtggggtcttgtgccgcctttgcatccccagtacaaatgcgtggtgactcctggtggagggagcccaagtctgaacatatgtaa

SEQ ID NO: 32542 - DNA, 2300 bp, Homo sapien
actccagcctgggcaacagagcgagactctgtctcaaaaaaaaaaggggggggggttatcagaggacttaaagcaatggaacatgtaaataaatagtttagtttatgcctactttgcctccttgccttttattcagtttcgttagcttgggtctttttgtcaacctgtttcttgttttaactgaaaaatacctcgttgtttgggtagaagacccaaacttgatacctattttgggagttaatttgtatttatgattccaggttttctcagctactgtaagttacgtaaaactatactgatacagtaataaaaggtgttgtatataggggaatgatagttgtcaaatagtaaatttaaaatggaagacttcctgtcttcttttattttttttgtccctaatttttttccttattggtaaaactttgcctcttgccaatcatccttatttagcactaaagctaattgtgtaaatatcagttttcttttttcttgttgagacagagtcttgctctatcacccaggctggagtgcagtggtgcaatcttggctcactgcaacctccacctcctgggttcaagcaattctcatgcctcagcctcctgagtagctgggattacaggcatgcactgctacgcctggctaatttttgtattttaatagaaacaggattttgccatgtttgccaggctggtcctgaaccactggcctccagtgatctgtgtgcctcagcctcccaaagtgctgggattataggcatgagccactgcaccctaccataaatattgcttttcttttacaaaatcaaggattagccaggcctggtaatgtattcctgtaatcctagctcagtgctgcggtgggaagattgctggagcccaggagttcgaggctgcggtgagccatgatcacaccactgtactccagcaacacagcgaaaccctgtctcttaaaaacaacaacaacaacaacaacaacaaaaaacgatgatgtttccttttgtatccagtttggtttttctccctgtgaaggtctgtaatactaggtcagtgttccaggtttaaaaagctgtcagttgctagcagcagtgtgacttttccatcccaatttaaaccactgctgctgccccagacacagattcttctcaggctcgatttgtctaatgtttattctactagtacaaagaactgtacttaaggtaactgtttccagggttgttttgttttgttttcctggcacctccctctaattttttttttaaacaaaagcacatcacctgatttgctttaggctcagggcaagccctgctgtgtgtcatgctttttaacctcacgctctgcacttctaaagcaattaaacaataaatcatctatcctcttcagcacagactgcctgacttttaaggggctttcaaaggaaacggactctgttacccttctggtgggaactgctgcttctcgcactggtggttggaactggaggtggggtgtggccggaaggtgctgtcatgtctcatgaaatcagcttcatgtactgttgtcaaacaagagcagcaggtgtttgttttcttagctacactttaggggctgagcccaagttgatgaggacttagacatagcctcctctaggagaagtttttctctctcatcaacctctctcactctatccttcctccaacccacccattcccttcttatttaaaaatcattttaaaaaacatgaacagggagatcaaaattaatatgcagggcagccatgaatgggaaagaatctcatagcctgcaatgggaaggaagcaaaatgggaagctccacacctgagagttgggggagagcaggagcagggaggctcccagctgacagattgtgtgtgcacacaggtgagcacatgcgggtacaaaagtgagcgtgtgtggtgtgcacatagtttatgtgcacagaggagcatgtgtgttatgcatgtggatgtgggtatatgtgctcaggtgagcatgtgagtggggtgtgtgtgtgttttgcatgtgtatgtgctcaggtgagcatgtatgtttgcgtagtgtgggctctggtctcatccttgtatagctaccatcgcctctgtgtcataccctcatggacagtggttctcccaaatcccagatggttctccctggaaagttctgctggcagatcctggcattggggaagttgggaaaatacatgaacactgtctgctggggactggggtgagtcatgtgcagatgtatgcaaagcagtgtgcaaatgtaaaccccttaaaatcccagatacctttcctacataaat

SEQ ID NO: 32543 - DNA, 2300 bp, Homo sapien
gaatgatccacatgctgttctgactgctgtttattaaaccatatcaaggctccttggatgcctaatattacaggagtaggagttaatggggttgatggtttcgatagcctcttcaaccactgttcacttcaatcagatctgattaaaagaaggctgaaatatcattttgcaactgaaaatggcatttaaacataaacaagccaaccactcagatgcggtcttaaggcaactgccctgagcgcagttacagcagaagctccactcgagcttataacctactatggctggctgagtgcaggcttacaaaagtagaacgattctgtggttaaagggaggaaaattagagagtcaggttatagacatctaaaaggtagcccagttgatatcagttttggtaatcaccatccacccagacagcctcaaacacgtgcaaatcagtggtattactccttcaccctcaggcctcctcatgcccacttaacacccgagtgctctcggattcgaacgcagtgtccttcacccggaccagaaaattgtggagaatatgaagtgggtggcaaaattatttatggactaaggcaggactagcaaaatgggtagaaagagaggctgctctacaaataggagagtttggcaaaaagcctgtgttttggatgttattcggttctctggacgtgtgtcctccctttgacctccttttcccagcacacagtagtcacaaatcttttacgcggggttaggtgcaccctacccccgcccccagcccgctcaaactggattcaacgggtaaagaacaccattctgttctctgaacgcaggcccccagcctttcaaaattcgtactcacctctgccattgggatagagaaggcagatctgaggtgttcttaaacgcgctgtttaaaacccaaaatgtccccgccctcaaaaccacacactttctttttgggggtagaaagatgccatttaaggaaaaaaaggtatatcctccaagtttctttggagggaaaaggcgttggttaaatcattcgggtgtcaggacttttctaccggatttcctccagagggtttcccagttgtggaacaagggtgaccagtggagtgtcgggtatcagggtccatccgccccctagaccagctctggactaggcttcaaacagccctccagcgcggccctgctccgcgctttctctagccagcacccacgtgtctctatttactctactcaggttaccagctctatcgcccgcagcgggccagaagacccgataaagcgccttccaccctgcaggactagtgcccggcttccgctgcttctccgcctttcttctgcgtagatttaaggcctgatccggtcccaaaccccaaataaaagttgtgggtttgtttccaagtgatggcggttggagaaaactagagttgggggcggtacagccagggtgtacccttgcggtgggtcggctcggcgcacccacagctcccagctgctagcccaggcgctggggccgcagggactgaaccccgcaccgcccccgcagcccgggtgcgcgccccatcggccggcctgctccccgcggcccggctcaccggtggtagggacggccccgcctgccccagcccacgcccgcctccccttcctcccgcctgtggctctgctcgtctccacctaagcctttggtggtttaacgcacttttgcagagacatctaccaagagatagcgtgtgcactttgttttccgtcccacggaagaatttatcagtagcgttattcagccctactcgctttaaagcacggcacccctcagcccaacaaaaagaccgaaggcgaaacattgtgggttcctgcccgcgaaccaaccgttcagccaccgaaccccctaaactgatccatttggaataagttaccctgcccctctacctcccatcctacacacacacacacacacacacacacacacacacacacacacactgcggaccgggggcccagctacgcacacaccccaaaacaaacgagggatctactcgggaccctcagccgggcggccgggcgccttcgttcccttcctccctctctgagtttcccagggacccgccacgcctctcggaactggggcagcggcccgctcacctcgtgtccgttgctggccgggatgatttcagactcgttcaccaaggaagacttgatgtcagctaaatcgccttcctcttcgggatgactgatctcggcgaagatcttttccttctgaggatcgccctcgtccttgaaggggatcatctcgtccgtggcgcagagttccg

SEQ ID NO: 32544 - DNA, 2300 bp, Homo sapien
gttcgcagtccaaggtgccagggactaccccgtcctccctccctcttctggctttgctctcctgagtccttttgccttctcttcccccttcttggattatcttttcattctcgatgaggttcccacacactgcggtgtgtgtctctgaaaacccactggagacctagcacaactctccgtacatcccgtggtgagaacagaatgaaagatatattgtttaaaaagcaataattaaaatctagtcttcagttccttcttcctcgtcatattttttctccgtaagcctagagattttattttcactagtgtgttcccttgtctccaaagagcgtgtgtgtgatattatattcgggaaagctacaactctcttttccttgtccttctgttctctcttaatagttgagcaatgtctgttatattttccccttttcctttttttctcagtcccagattcccgcctctccccactgtcagagcatctatcaatgtggtgtccatcacagcggcagcggctttctctttcatcttcctccctctgccagagccagggagggagagtgggaggcgtcaaggaggtaggggagagactggcagaggaaaaggagtgggtgggtgggggccaagtaaatagatacttagatgatgaagtcaagccactgcggcaatgtttcttgtcagtttcacgcgggcaaagcgtgcctttcggtgggttataagcagcgcccggtccttccttctctcgccaagttgcctgatccttccctccaggcgcgcgcgcacacaccacactcacacaccccaaaaccaagactcgtcctacaggatctgggaaaagaaaaagaaaaaaaagccctcaatcaccacctccttctcgccgactccccctcaccccccgcctcccctccagcgggcagccaaggagagctagaggcgggggaggggagagggaggagaagcgacgcaagtgggtagcttttcagcgccggcgaggcgcgggaggaggagaagcagtggggaggcgcagccgctcacctgcggggcagggcgcggaggagggacccgggctgcgcgctctcgggccgaggaaccaggacgcgcccggagcctcgcacgcggccaagctcggggcgtcccctcccctcggccgggcgaactcaaggggcgcagctctttgctttgacagagctggccggcggaggcgtgcagagcggcgagccggcgagccaggctgagaaactcgagccgggaacaaagaggggtcggactgagtgtgtgtgtcggctcgagctccgggcagaggcatttgggcccgaggcccccgctgtgactccccgagactccgcagtgccctccactgcggagtccccgcgcttgccggcaaaaactttattcttggcaaacttctctttctcttcccctcctcctcggcccccatcttctgctcctcctccttctctagcagattaaatgagcctcgagaagaaaaaccgaagcgaaagggaagaaaataagaagatctaaaacggacatctccagcgtgggtggctcctttttctttttctttttttcccacccttcaggaagtggacgtttcgttatcttctgatccttgcaccttcttttggggcaaacggggcccttctgcccagatcccctctcttttctcggaaaacaaactactaagtcggcatccggggtaactacagtggagagggtttccgcggagacgcgccgccggaccctcctctgcactttggggaggcgtgctccctccagaaccggcgttctccgcgcgcaaatcccggcgacgcggggtcgcggggtggccgccggggcagcctcgtctagcgcgcgccgcgcagacgcccccggagtcgccagctaccgcagccctcgccgcccagtgcccttcggcctcgggggcgggcgcctgcgtcggtctccgcgaagcgggaaagcgcggcggccgccgggattcgggcgccgcggcagctgctccggctgccggccggcggccccgcgctcgcccgccccgcttccgcccgctgtcctgctgcacgaacccttccaactctcctttcctcccccacccttgagttacccctctgtctttcctgctgttgcgcgggtgctcccacagcggagcggagattacagagccgccgggatgccccaactctccggaggaggtggcggcggcgggggggacccggaactctgcgccacggacgagatgatccccttcaaggacgagggcgatcctcagaaggaaaagatcttcgccgagatcagtcatcccg

SEQ ID NO: 32545 - DNA, 2300 bp, Homo sapien
accccaatcttccagatagaatttacatgtgactactggccatgttgtagggaccaattggatcctttgtaaagttttaaaaattgcttcctagtaaattcttattcccaagaagtagtcgttattagtaggtgaagtcattagtgctcacttagatacagcattgtaaaaatctttacccattcaatgttcagcagcctgaaatttcacctttaggaaaaaaagagggatctttgccagacaattcctatataatggagcaaaatctgattctgtagtgttttgcttgttttcgatttaagggagatgaagatacatttctttatgtcctttgtttactgttctgaagttttacagatggttactgtattggatataataattttgcctagatttttaactgagggggtttgagaaccaagggacaaaatgtaatgtgttttcaaacttcagcttcccttctgctgtaactttcacaaagtatctcctgaaaactcctgtctttgtacaaaattcatcaaagagacagtggagactggggaatttttgaggttgtattcggattggtgtcttcaagggtccctttcagttcgcagtccaaggtgccagggactaccccgtcctccctccctcttctggctttgctctcctgagtccttttgccttctcttcccccttcttggattatcttttcattctcgatgaggttcccacacactgcggtgtgtgtctctgaaaacccactggagacctagcacaactctccgtacatcccgtggtgagaacagaatgaaagatatattgtttaaaaagcaataattaaaatctagtcttcagttccttcttcctcgtcatattttttctccgtaagcctagagattttattttcactagtgtgttcccttgtctccaaagagcgtgtgtgtgatattatattcgggaaagctacaactctcttttccttgtccttctgttctctcttaatagttgagcaatgtctgttatattttccccttttcctttttttctcagtcccagattcccgcctctccccactgtcagagcatctatcaatgtggtgtccatcacagcggcagcggctttctctttcatcttcctccctctgccagagccagggagggagagtgggaggcgtcaaggaggtaggggagagactggcagaggaaaaggagtgggtgggtgggggccaagtaaatagatacttagatgatgaagtcaagccactgcggcaatgtttcttgtcagtttcacgcgggcaaagcgtgcctttcggtgggttataagcagcgcccggtccttccttctctcgccaagttgcctgatccttccctccaggcgcgcgcgcacacaccacactcacacaccccaaaaccaagactcgtcctacaggatctgggaaaagaaaaagaaaaaaaagccctcaatcaccacctccttctcgccgactccccctcaccccccgcctcccctccagcgggcagccaaggagagctagaggcgggggaggggagagggaggagaagcgacgcaagtgggtagcttttcagcgccggcgaggcgcgggaggaggagaagcagtggggaggcgcagccgctcacctgcggggcagggcgcggaggagggacccgggctgcgcgctctcgggccgaggaaccaggacgcgcccggagcctcgcacgcggccaagctcggggcgtcccctcccctcggccgggcgaactcaaggggcgcagctctttgctttgacagagctggccggcggaggcgtgcagagcggcgagccggcgagccaggctgagaaactcgagccgggaacaaagaggggtcggactgagtgtgtgtgtcggctcgagctccgggcagaggcatttgggcccgaggcccccgctgtgactccccgagactccgcagtgccctccactgcggagtccccgcgcttgccggcaaaaactttattcttggcaaacttctctttctcttcccctcctcctcggcccccatcttctgctcctcctccttctctagcagattaaatgagcctcgagaagaaaaaccgaagcgaaagggaagaaaataagaagatctaaaacggacatctccagcgtgggtggctcctttttctttttctttttttcccacccttcaggaagtggacgtttcgttatcttctgatccttgcaccttcttttggggcaaacggggcccttctgcccagatcccctctcttttctcggaaaacaaactactaagtcggcatccggggtaactacagtggaga

SEQ ID NO: 32546 - DNA, 2300 bp, Homo sapien
agacaggagttttcaggagatactttgtgaaagttacagcagaagggaagctgaagtttgaaaacacattacattttgtcccttggttctcaaaccccctcagttaaaaatctaggcaaaattattatatccaatacagtaaccatctgtaaaacttcagaacagtaaacaaaggacataaagaaatgtatcttcatctcccttaaatcgaaaacaagcaaaacactacagaatcagattttgctccattatataggaattgtctggcaaagatccctctttttttcctaaaggtgaaatttcaggctgctgaacattgaatgggtaaagatttttacaatgctgtatctaagtgagcactaatgacttcacctactaataacgactacttcttgggaataagaatttactaggaagcaatttttaaaactttacaaaggatccaattggtccctacaacatggccagtagtcacatgtaaattctatctggaagattggggtgaaattaaggggttggtgaaggaatccaggaaaattaaaacattaaatccatttttaatagctgacaatgctatgcctcaagagaagaaaaagagtatattctgctacagtgtgtgagaaacccaatttttgtttttggatgatggtggtatgtcacttcccttaaagttaggcaccagtgtgagtagtgtcccagagaggtgaacgtgtagctgtgtcagacatttatagccccattcttaaaagacacatgggaaaacagtcaaaagtcctcccataactgcaccaatttgaccaataggaaaacaagtggaaaatgcagtttcaccaaagcagagtagaggttccttttcatcaaaccctcaggagggggaggggagaacacagaatggccagggggtactttctggaagccgaagagagattaaatgatgactcttacatcccccccgctgtttaagtgctgaaactaattcagatcccactttctccttcatgttaactctggattccccgagtaatttggagcctatgctccaggtttcctgaagattagaagctcaagaagatgggaatttttagaacaataactaggggaaactgtttacttgaagggccaagggtagggggctgcgtttggtattttactgagaccccgtccattgaaaacattgtttctaacgaaatcacccagcaccttgctctatttgcgtggctgttttccttacagtggtgtaacttgtgttagctgattgtctttaggattgttgtaaatcttctgatgagcagcacttagaaggggctttagtaaaaaccatgcgccccaaatttctaaagcttcgtttgggagagaggttgacatttgcacatgaagtctgtcttttggaaacagcaggaggacgcaggaggggcgaagtaaccccgggaagacgttcttccccctcccttacggattcagtgtagttcctggcataagcaattctgtcaccgggcggtcttttctaattcgtgtgggggctgatattaacataagcagccgcctcttcgggtgcgagtgggatcccaggtccgggatgtggtgggtgcggtgcgggagaggcacccgccgcccccttcactcggatgttagaggcaagttgttcgtgtgaactcgagcgaacgactggaggttggctgttgtaggttcactccttcaggatgtgggtttcagggggcgttttgatgtgatttaattccgaccgtgaaaacaattgctaggggctggctggattgctgttggtttttcccctcctggtggctttgcttggtttgggtttagtttgggaacaaacttgttttatatcaacacttccttctacatcgggcgccgtcgcctcaactgcgcgtggggggcgaggcgcccaccccgcacaagaacagaggagcgggggagaagagacggcctcgctgctcactgggtaagcggagcccagccccgctcgggagcgggcaggagagacagggtagtgacccccactcacaccagaaaacccctccccccggcgattttgctgccaactcgagtcggctacagacagtccagtgagtccttaattacaaggacgagagaaaagcacggtgcccctcgagtcctctccgccccctcggtcctaacccccgcccaggctccaggtcttcccctttgtgtggcctggactctctcccagctacgactttggtgggatccaaaaggaaggaggtggcggggcctacggaagaggatacccaggagccagggagaagggctagaaaacgaat

SEQ ID NO: 32547 - DNA, 2300 bp, Homo sapien
gaaaaagagtatattctgctacagtgtgtgagaaacccaatttttgtttttggatgatggtggtatgtcacttcccttaaagttaggcaccagtgtgagtagtgtcccagagaggtgaacgtgtagctgtgtcagacatttatagccccattcttaaaagacacatgggaaaacagtcaaaagtcctcccataactgcaccaatttgaccaataggaaaacaagtggaaaatgcagtttcaccaaagcagagtagaggttccttttcatcaaaccctcaggagggggaggggagaacacagaatggccagggggtactttctggaagccgaagagagattaaatgatgactcttacatcccccccgctgtttaagtgctgaaactaattcagatcccactttctccttcatgttaactctggattccccgagtaatttggagcctatgctccaggtttcctgaagattagaagctcaagaagatgggaatttttagaacaataactaggggaaactgtttacttgaagggccaagggtagggggctgcgtttggtattttactgagaccccgtccattgaaaacattgtttctaacgaaatcacccagcaccttgctctatttgcgtggctgttttccttacagtggtgtaacttgtgttagctgattgtctttaggattgttgtaaatcttctgatgagcagcacttagaaggggctttagtaaaaaccatgcgccccaaatttctaaagcttcgtttgggagagaggttgacatttgcacatgaagtctgtcttttggaaacagcaggaggacgcaggaggggcgaagtaaccccgggaagacgttcttccccctcccttacggattcagtgtagttcctggcataagcaattctgtcaccgggcggtcttttctaattcgtgtgggggctgatattaacataagcagccgcctcttcgggtgcgagtgggatcccaggtccgggatgtggtgggtgcggtgcgggagaggcacccgccgcccccttcactcggatgttagaggcaagttgttcgtgtgaactcgagcgaacgactggaggttggctgttgtaggttcactccttcaggatgtgggtttcagggggcgttttgatgtgatttaattccgaccgtgaaaacaattgctaggggctggctggattgctgttggtttttcccctcctggtggctttgcttggtttgggtttagtttgggaacaaacttgttttatatcaacacttccttctacatcgggcgccgtcgcctcaactgcgcgtggggggcgaggcgcccaccccgcacaagaacagaggagcgggggagaagagacggcctcgctgctcactgggtaagcggagcccagccccgctcgggagcgggcaggagagacagggtagtgacccccactcacaccagaaaacccctccccccggcgattttgctgccaactcgagtcggctacagacagtccagtgagtccttaattacaaggacgagagaaaagcacggtgcccctcgagtcctctccgccccctcggtcctaacccccgcccaggctccaggtcttcccctttgtgtggcctggactctctcccagctacgactttggtgggatccaaaaggaaggaggtggcggggcctacggaagaggatacccaggagccagggagaagggctagaaaacgaataatgtgactccagaggcggaaccccgaccccctctatttcccaccccggcttcacccggagacgaaagctgtgggcatcttcagtttaacggacttcgcggaaaaggagagaaggggggcgagggaaatggcagtttgtgtcccaggggttcttccccttcttcttgccgcctcctaaagacaaacaaactcaaccccccaccctccggggtatcagggaactcgtgggaccgtgaaaaagtcgttcccaaatccggccgcctgcggacgtcggacttccgcggggccggcgcccgttggcgtctgtagctcggcgcagccacgcggggctccagcgagcggggtccgccacccctcgcgccctcctgcggctttcccagcgctgggccagtgcaggccgagccctgcgtccctgcctcgctgggtgggggtccggggcgcggctgtccacagggccgcctcctcctgcggcccgcggggaaggggcgcatcccaccccgctctgcaggccgcccttctgccagctgggaggcgagggcacacgtcctaaggctgcccaagggggagaggaatcgcgccggtaggagag

SEQ ID NO: 32548 - DNA, 2300 bp, Homo sapien
acctgataacaaattaacaaaatctcaaatggataaagcttgtgtgatgagaccaaatcacacaaagtgaagaagtcgaattttgtttaatttaaatgatagagaatagacatgcgctgagttacattttccttaaaaaatcaccctgaatgctatgtagaggatgggttgtaagggggcaaacatagaagcatggagaccagttagatagttactgcagccaattatttggactaagagagtaaagatagagaataaaagagataatcagatttgagattgattttggagggtgagctgactagatttgctgatggatggacacaggggtgacagaaaggaaggaatcaagaatgacttctaggtttttagcttgaacaactaagtagatatgtcatttactgaaatgataaagacaagaacagatttgagagaggaatcaagaattctggtttcaaatgattattagctatcaaatttcatattaaggaggaggttggatatgtaagtttggatcttagtggggctagtgaaatacatttggaaattgtcataattctggtggttatgagattgcctagaatgaggataaagacagaaaacaaacagagaaaccaaaatcaagcctatagagtactcaaaaatttaggagttgagcaaagaaagaaaacccaaaggagtgaaacaaaagccaatggtatgggaaaaaatccaaagaacatggtctcagggaagccaagggtgttttaagagtggaagagtggttaaccacatgccaattggtcagtaagatgaaatcataaagaatgttaaccatcgtttttgactagctggagtcactataaatcttggtgaaaatgaaaactatagtaaggttaagtaagattaagaaggaatggaatgtgaggagttagaataggatgtaaagaaattgtagagatagtataaggagccagggttctttttgaaaaaaagcatctaataactcccattcttttttagagagaaagagagagagagcacacaggaaggaggctaaacttgcttgcataagcgtcccactctctcaataaccttaatccattcataaggacggagcccttgtgatctaatcacctcttaaaggtcccacctgtcaacactgttgtattgagtattaagtttccagcacataaacttcggaggacacattcaaaccattgcagggagttatatgcacttcctcatgagactgtcagtatatcagaaaagctgtgtgaacagcttgtgacagctgccccaatggctgttccataggctctggacaggcgagtgagagacgatgcagggtttgggtattctctctttctttcttctcttgaagggagggatagggaaatgagacttaaccccaaaatccacagtggtcttacactttaccaagacacagggtacaaaattccccctgggaatgacaaatatcaaaaaccaggatcaaaagtcctcagtaagaaaggaagaaaacatttggccccaccctcaaagggcaagagtgctgagggaaagcaggactctcattctgagtgacttgagcaccaaaagttttatgtctggtcttgagacatcaacgggcccttggtggagaggaaaaaaaacaccgtggtgttattcaacagtacctccagaccagtccctggggaaattgttccaagttcctcaaacagtggagccagtaaaattgaaagagtaagactacctcttgggggcctaaaatatctgtggccactatgcgaaaatatcaggtcagaccacccaagatttccagagtggtattcattttcattgatggcttcttcaaccaggagcaggccacaggctagagtggtagcgatggagagcagagaggtggttcccagagcagcagtcatgagaggagacgggccagtgagcagcctgaaagcagaacacacaacaacagcaggaaagctacaacagctgcagaggaccatgtggaaagggagatgcctcaatggtttagaattctatattaaaaacagtggtggtttggaagaagccccaagataactgctaccaaacctgtgaaatataatttaggtgcctcaaacatgcctctgtgacctgaggctcttcctgctgcctggaacgttcctcttgggctgaagtgagaccaacttcttattcttcaggtacgagctaaaatgtatctcagcgtggaggccatccctatttaaagatctccctgtgatagtctaacgcagccctgtttttccttgagagtactgcatttcgctgattctgat

SEQ ID NO: 32549 - DNA, 2300 bp, Homo sapien
gtataaccatttttcccaacttcatttactgaatagtcaccaatctttccccaccaatctgatatattacctttgtcatataccaaagtttcatacatttattattattattattattattgagataggatctcattctgttgcccaggctggagtatggtggcacaatcatggttcactgcagcctcaaacttctaggctcaagtgatcctccagcctcagcctcctgagtaggtgggactaaaggtgtgtgctacaacacctggctaattaaaaaaaaaaaatttgtagagatgggcgtctcgctatgttgcccaggctgatctttaactacaggtctcagtgatctttctgtatcagcctcccgaagtgctaggattaacaggcatgggccactgtacctggctgtctttgaagtttttaataagattgccatatctctctcaagactgatcaagaaaaaatgcaaatacaaatttaaagagagggaaaaatagtattatggaactgggttaagtaccttaagggaaaactacaacaatgagaccactattcttatctacttgggtgggggaaggcacggacagagacgtaaacaacagcatagtgtgccaagggctcccatctcctgttctcttctgctctgcaaagtctctcttaaaatatagagaacatattgcaagtaaatacattcattagtgcatttattcaaaaaccacatttgtctctctatgcaagcttccatctcaatgcctggcacagagacgaaaaggatttcagaggacaaaaatcaaaggactggaaaggagggaagtagctgatgacaaggtcgggggagaagcagctatttgagagtgagcagagggaaggatataaccagagccttccatctggtgttgtgacaaagatggcagtgatgtgaggcttgatagaatcaataggcctcacagttcaagacagactacatgccctcagtcacttgcctgctttcttggtttgctagatggattagaaatactagaaggaaagttgagtgggtactgggatatcctatccaaatcctctcttctggggcaatgcagctgcctcacagcaaccacgttgtggatcacctgaccccgcctttctcagcttcctggaggtgcattctaagagcgctccccataagccaacactcaagtctcttcgaggtgtgtttccagggagcctgatctaagattaaaaacttaaaggccccttttagaattgtcttttacagcccaggcaaagagttctttacttttttagaggtcatgaatccctttgacaaggtgatgaaagccagggaccctcttctcagaaaaatacacacgtgcgcttaatgtaaaattttacatactgttttaaaggttaaactttaccacccatgaaaagcctcaagtagttctttgtacataatcataagattagcaaccatttactgagcacttcctctctataagaccctgtgctaagtgctttaacttcataatgcctttgatcatgacataacatggcacggtagttcctaatatcttccttttagagatttaagggcttgctcaaagtaacatagctaataattagcagacactggattaaaatcccaatttgtttgtaaagcttgtgctctgaataaatgacaaggaaagagaagggaaggttgaagaagggaaggttcttgaaggtccctggtccttgaaggtcccttaaccataaatgtcaagagttgggatttaaacccaggtctaacgccagagctggcgccctttagattaaaagtgcagtgtccatgacaacgaaagaagttgattttgtcccacctttgctctttgcggcttttcatttgcgtttgtttccacagcgatttccaatagatttctgcgtggccttgacacagacagctagtgtgaatccccgcccacagaggggcggcacgttggttgccgtacaacgtggtggttccctgcatctctgcccacgtcggagaggtgcgtcggcttccgtacaacacggatactctctctctgacgcaacttcctgtcctgcgcaattctatttgacctttgaactggcaaaggcttttttcttcctcttccggggacgttgtctgcaggtatggatgttgttctcttttccctgtctttatttccttaccaatcggctgccatccgaggagctgaggaagcctagagctctcagaagcagtcctttgagctggtgtaggggtaaggggcacaacagggaggttggtggtgaggaagttccttactttgatcttt

SEQ ID NO: 32550 - DNA, 2300 bp, Homo sapien
taagatttttgtgatgctttaacagaaatttccctaaattttgttaagtgttaagggcaagtttaaagtaggttacaaagggaaatggtgtactcatttatctgaaaggcatttcactgcatttctcagattggtttaaaaagtctatgttcgtggcagatttggctcatgaatgtttagtaattctgaaccctcttagtggtaacctctccttgattcattccatcgtcaagggatgaaagctcagtaagttcaagacttgttaggctgcacacagtaaaaggtacacttacccctcgaagtctgcctgggcacacaccacatgcagattttggtgctttcccaaccttcttggtataaaggtaaacaattctattaccaggggttcgggacctagaaagtgaaacagtcagtaggtcagcattttgtagagtaaatgacaatatatacttaaaattttcagaaatacttacagcctagttttgttagaggctgtattgtaggaaagcctacgtcggtatgtcaaacgctggaccattctgagtgcctaaattaagaatagagtaacatcaaatctttccattgtaaaagtaaataaaatctcaaaacagtatcatgtggtctatttcattcacatacatatccttgtatgtaacacccttaaattaagatgtattattccacattttaaaactacttgtatttaaaggtgactgataaacaagaggccaagaatgttagctttcctgatggtaatcaaacgtggcacttccttaacgttctgatgaccaggctccttactcagagtctaattttgtttggagtggtgtccagaaaagtgccacgagcccagttggagaaacaccgctttaaacaaagagcacaaaaagtgagctctgaagtcgaatccttagctatgccatttactgggaatataaagggcaaggagctagcctccttatctctaacatgggaattctgtctactttatacagctgtcattaggattaaacgacgtgggctatccgtcccaacacaatgcctggcacatatcagggttcaatgtcttgccctaaagcaccacctgcgtaaaggcataccctttaatactaattttgatattacacaagtttctttgggttatggcacctgctttcttcccacttctggaaacatcgtgatgttatttagcaaatcggttatacagatatgcatacgagcaacttcgttaagggaactacccaacgtaaaacataatcaatacttgaactaatttaatcttcccattccaccccttgtaaccacctcatttgttgtcacaagcctctcactaaaattaaactaaaacagaattaccagacaccaaaacttgacacgtaaaaccagtgcgagtgatttatgaagccattattctgtttgcatctccaaaagcaagacagaaacttctaacacatttttctcttccttgacatgggccttggacgcagaagccaaatagcgaaaccacccgaactcgccggaccctgccctcccaaagactaaggacacgtacaggcgtgctgtgaaaacgtgggtgtaaaatatgaaaacgtttggcgattttccagactcaaaccgccaaaccacaactcgttagtctccaaacgctacacttggaatgcagcaaagtcccgggtggtgagctgtggctactcacggctttggaggtgccaccaggaacaagggatttccaaagatcaaagtaaggaacttcctcaccaccaacctccctgttgtgccccttacccctacaccagctcaaaggactgcttctgagagctctaggcttcctcagctcctcggatggcagccgattggtaaggaaataaagacagggaaaagagaacaacatccatacctgcagacaacgtccccggaagaggaagaaaaaagcctttgccagttcaaaggtcaaatagaattgcgcaggacaggaagttgcgtcagagagagagtatccgtgttgtacggaagccgacgcacctctccgacgtgggcagagatgcagggaaccaccacgttgtacggcaaccaacgtgccgcccctctgtgggcggggattcacactagctgtctgtgtcaaggccacgcagaaatctattggaaatcgctgtggaaacaaacgcaaatgaaaagccgcaaagagcaaaggtgggacaaaatcaacttctttcgttgtcatggacactgcacttttaatctaaagggcgccagctctggcgttagacctgggtttaaatcccaactcttgacatttatgg

SEQ ID NO: 32551 - DNA, 2300 bp, Homo sapien
ttactcatgaaaggtctcttttatacgtggcttatagaatattacaaactcatgttgaaaaatatttcaaagcttaagaggttaaaaaataataatgaattggttcctggagcaaacttactttttggaaagtgatagtaataatttaacatatagatgaatgcagtgtgttctgacttggcagttttattatttatgaaattaatttttcatttaaaaattatatattaataatttatatgttttccacaatgtaggtagaaattatgtgtccctagtatacacaggaagaaggataagtatataaacgtataccattttaaacgtcttaaatctatttacttctacagcaattgccttttaggtctcatccagtcacagactatactacactttttgagtttatttcccttcccaggagccacttttgtcatatgtaaagcagttatactagtatttacctaacagaattgtcatgaagagtatataagcacaaatgtaaatcacttaacatagtacctgccaagcagtggttaattaatgttagattcctttttaagctataaaggaaatttaaaaacctttaatccctatgtttttccaaagcaaaatgttttatttttatttttttcttcataccaaagcaaaatattttaattgttccaaagtgttccttacttataaaactgtgggaatttcagaaacattctgctttacagtgcccagagaaacttcctacatataaacgctggttttggtgtaaatgcattcattattggtgttatcattggcctttacataacctaagattcgtgtggctccgttaagacataggcaatatgactctgggagagactctcactaatgaacagtaagggcagcaagcctcaactgtacttagaattggatactacaatgttttgatagtattttcattaccgtcttcaagcaatttcttaacaattgagttgttagctaattagaagtgcagaaccaatacatggcatcctgtaaaaataaccacgggcttagtaacaagcaaataaaaaaatataaaaacattggctctataatgtgtcaatatgctctggacttatgtaatcagtgactcttaactcttgctccaaaaggaagttaacatttgtagagtcttaaaagattatataaaaaagaaaagcaaaacagaaaacaaaaaatcttttagaccttctagtccatccctaatgactaattctccatcatatattttcatctatttggattgtaaatgttgcccagaccagagatggcggtggttcacactagggtgtcagtggtggaatggtgaggggcagatgaattggagatattttggtagtacagccaaagagacctactaatattttggatgcagaaggttagtaaggagagaaatccagacgactttaagatttttggccagagggattttaccttttagcgacatacagatgaccaagggaagagcaaagttgagaggatgagttattcaaaatagtattatggtcacgccaagctatcagcattaaggcatccctgtagagatgtcctgttgacatttgtgatccaggctggatgtttaaaaaaaattggtaacatattactttagcaactattattaattcttattattaccacgactacatcgggaagtaaaagctcagcagcctccggcttttcctaacccttgaaaaaacctctaatataaaaggcatttatatccaaaagttcccattcatctcccgctctgggaaccgggagcgccccctgtccaatcagctttcaaatcccctgcgtcagcgagtgggcggggctcacctagattccttggcctccgcttctccggcttggccacgttagaagtcccgcaggtccttgaaggtacacaaatcacctatatatccattagaaaaatgtagagtacattatcacaatgtaagtttaattagattaaataatttacaacactttattcatatcatttatttgttttatttagtttcttattttcttctatgagtatagtaaccacctccgagctttacggatctgcgggtcctttcctcgcgcacgcgcacttgttagggagggcgggcctgtttccgggaggcgcgtggggcttgaggccgagaacggcccttgctgccaccaacatggagactttgtaccgtgtcccgttcttagtgctcgaatgtcccaacctgaagctgaagaagccgccctggttgcacatgccgtcggccatgactgtgtatgctctggtggtggtgtcttacttcctc

SEQ ID NO: 32552 - DNA, 2300 bp, Homo sapien
ttgcccaggctggtctcaaactcctgagctcaagtgatgcacctgcctcagcctcccaaagtgttgggattacagctgtgtagctccccaccagccacagagctcagttttcaatacaaagaaattgggcctcagaaaggttaagaagcccagctggtttatggaagaaccagatctagaacccaagactcttaatccagagtttcttaaggcactgggaatattaacaacaagaatccataaagttttatgaaggaagtgtgactatgacttcaccaggtcaaggtggtttgagagtagatatacagttggcaatatctttcaggcacagaactagaccaagattacataactgggatttcttgcaagtctccaaagtgcttcctgctcttcatttataaaacacggaattcttttttttttcttttttttgtggagggggatggagtctcactctgttgcccaggctggagtgcagtggcatgatctcaacccactgcaacctctgcctcccaggttcaagcaattctccctgcctcagcctcctgggtagctgggattacaggtgcccaccaccacgcccagctaatttttgtatttttttagtagagatggggttttgctatgttggccaggctggtctggaactccagacctcaggtgattcgcccagtttggactcccaaaatgttgggattacaggcgtgagtcacggcgcctggcctaaaatctggaattaacacactgttcctcataggactccatttctctttctaccttaggcaatccaattctactcctcctgcagtgcatgaatatatattaataacttttttcaagagaaagatcagttgcaaatacttatcaaatgtgttgatacatgcaaattaggctttccctgctgccctttcaaaacacagagagaataaaatgacctatccttaacccaatgactaagtgtttgtgtgaacttgaataaaccttcacctttcctgtgcctcactgttcttatctacagagcagagaagttaaaccagatgacttctagttaaaataatgtatgatttaatgattcagttaattaagattctattgggaggccgaggcggggggatcacgaggtcaggagatcgagactatcctggctaacatggtgaaaccccatctctactaaaaatacaaaaattagccgggcgtagtgacgggcgcctgtagtcccagctactcgggaggctgaggcaggagaatggcgtgaacccgggaggcggagcttgcagtgagccgagattgcgccactgcactccagcctgggtgacagagccagactccatcctcaaaaaaaaaaaaaaaaaaaaaaaaaaaaaaaaagtttctacctgtgcacatatttagcttcagatatgatctgtgtgagaagaccatcttgaaggaagtcaagaaatctaagaatgagtcccgttttcagcatcaagtggatatataatcattagaacagggaataacctcactttccccgttcattaaatggggtaacactcgtggtcatctctcagggttgttttgaagactgaacaagataagtcatgtgaatgtgttttgtaagttgtatagttagaggaattagaagtgtaatcattgttaaaggagatgtttgaaacactgcatatatcatcactgccaatggagataacaggctgagtccgggttatttctcgttaggacgcgtccttgtgctgagtaaatggtaggttaccttatcagactgcgcagtgagtcttgatccgggaagcgcctaactcctgaatttttaccagaaaataaaggactacactaaaaagaaaccagaaagaacgtgggaaggagggaattcgcaggcagaggaggaggaaaagcaaagacgaggcaaagttaggagaatgaaaggcgaattcagaggaatgataggggcgggtagggccgagccggcctggcaggacagggtggtggcgaatgagctgctagcccggcgacctgcccgcggccccggcgggggaggaggaggggcttggcaaagggcaacgccagagccagacttaaaagggagatgatcctagctagttgacgccaccggtgacctccgacgccccgggcaagagaacgccaggagggataacgggaggaaggccggccggggccgccaaggcagtcccaggctcgcgtaggaggcgcgcagaccttgcaccttgcaccttcgcagcgccctgcaccccgccaccatgtgcgagctgtacagtaagcgggacactctggggctgaggaag

SEQ ID NO: 32553 - DNA, 2300 bp, Homo sapien
aaaaacctagcactaaaatgttgcagtattaggtaagctgtggcttaccaataacagccaatattttatacatgaaggtcaactgctttatttatcatgctaggctgcaactactgccaaataggctcccggctagggtaaggttccagaaaacccccttactctagtctaaaggtacccttacacataacatagattcctctcaactctcaattccaagggctctgcattcataaataccccggcactgcatcctttaccaaaaataaagctactttaaaaaaaaaaagtttaaacttttaatatgaaaagattcaacgtgtgaaattattgattttaaattatatatgacattattttacatttaagagtgattaccttttttatatattaataacatctatgaccctaaccatcttacaacatgtaaaagatttaacagatgctatctctgcaagaaatattctctccacaattgggtttgacttaggacaactaaaaagagataaaatgccctttccgaacccttttagaccttcctatgtgtttaacacgcaaacattaagagagagtgagggaagattagagatagggatggggacatcaagggatgtgcacatataaatatatgctacagtgagcatagatccttggccaacacatgcacgcgcgcgcacacacacagccacaccaagtatgggtacagtaagggtagcggctagtcatgcacacagagtcacgcttgtacaagatgttacccacgtgcaaaataccccagcctctcacacctgagccagaagtcgctccactttctcttgcaccatagtcttgaggtgatccagggtatcaggcagcagatgaatggaaggggcccctttggcggattcgagagcggcgatcctcgcctggaggtcgttggttttcacacccaggtacaggcaagacaccacggccaccactgacaggagggccgccaggacggcacacgggggcatggtccgggcacaatgctgttcggcaggggtcgggtcctcggatctgggctcccggccccctcctttccctgcgtgcttcttcagcagcatcgtggcggggtcggccgtctcggcttcgcttcccaccctctacacctcaaataatcctaaaaggaaagaaaaaggtcgattcctccaaagttcagtccctgtggctgcacaactagttggtggagtcaagcccacgagcggatacggacccctgccttgctcagcgtccagacccgcaggcgtgcaccatccccgctttcttctctcctcccagctggaagtgaaaagcaccctccgtccggggactgggtggcggtggggtaaaaagcaagacgaaacccacccagacagctcttccgactcccagaggaccgacacctctttcgagggccccaacagtggccgctcagggtccgagggcaacggccgaggcgccacgcggggccgcggctcgccctggccacggaggaccggacctgttgcgcctctgtgagtttgccttatttctacctactcggtgtctttcggcacgccgacctgtttcccacctgcattcagttcaaggcaaaaaggctgtgagagcacgctacagcgcagcgcgaaaggggcgactaaggtggagaagagagaggaaaacgaaataaacccaaggaaccaatgctactcgcgaagccgaagtcgcggctgcccgaaggatctccgcagccccgcgtgcgcgatccttaaatacccttcgcgatgctcgcgtgagtgtgtgtgtgagtgtgtgagtgcgcgcgcgctccgagcacgacgtccctcccccgaccccctcccggcgcccggcgtccggcctgccgctcccgctgctgcgcgccccccttccgaaggcaaagcaggagcccgccttattatcataatgtattcaccttggcccagcccgcgggccggcccggggaacccccaagggaggcgggaagcttgggtgggagcggggcaggaggtctgttattagcataatgtatgcaaatagctggagcggccaccgtgattggagaggagcctggcgacccctccccctgcgcggagtaacttcagcatctccgagggccacctctctggcctgggccggggccgaagcggggtcggctgcgcaagaggcggcaactttggcttatactgactcagcccagcgccccctttttatcccacataaaaatggagaaatggcctccgggaggaagatgtgaagcggcacgctctatctctactgatcttcactcaaaagcagccgca

SEQ ID NO: 32554 - DNA, 2300 bp, Homo sapien
ggcttggggagactggatggatggcaactccattggctgagatgggaaacagaggaagcagacagaatttggaggtaagctgcaggttacattggaaatgagagtgagacatccaaacggagatgacaaagaggcaactggctatatggatctgaggttcaggagagaggtttgggcttttgatatgaatttatgactcatcagtgtaatgggaactctactggagagagtatacagagaagatggaatagacagagacccaaggagcaccaactttcagagaaatgaaagaggaaaagcctgcaaatgagactaaggaacagctagaggttacagaaagagtttgtacattaaaatatttgtacccattatttgggtcctgttattggaaacatgtttaatcacaattaaatgtgacttgaaatttatctgttttaaaatttatttaaaaacgttgtttatatttaaaagaggaacagtaaatcctcacatcgcagggttatgaggttcaaatacaaaaagtatttgaaaatattttggaaagtattataccagtggttctcaaactttagtagtatatatcaaaatcatttggagggcttgttaaaacacagattgctgttttttttaaaattattatttcagtagtggtagtagcagtttctgattcagatctgtggtaggaacctagaattttaatgtccaagttctcaggtgatgctgatgttattggtctaggaccatcctttgagaaccactgtgtaatacaaatgaattatggttttgactttatagccaaattcattgagttttcctccaatgttagtctctttcttcctctaatgctgttatttccttaccttgcttcacacctagcaatatccgtttacacatgtgaaagaccaacttagtgaagtattttgttgactgtttacaatagtaagcaacgacttcaggttagcttaattaaggagaataggaaaaatatatggtttttttttttatagggagataagaaggaactctttggaataagaggtgggatttctgttttccccaaagtcaattagatgtcaaatgctacttgttaccaactttccaaaatcccattagagaccttgtaatttgatccagagagaacagcattaagagtcaggtaaaaggaaaaactgacttcattcttcattcctttcctaaatcctgagaaatgtgtatacctcaacactcccttttccaatcccgcaaaacagggaatcaggaaaacacattagcaccctagtacagactaggaatacagagctgggaggagactcagtgccgtcaagacaaggaaactgggggaggggaaggaaaacttcccctcgttggacaatctgagggctgcagtgggaagagaagggaagtggggaaatgtacctcagacgtcggccagacactttgcctctgggcatgtgggaaagtgagggaggagggaaaagcgctgcaccacagcgagatagcaacagctcctgcggctgcttttgagtgaagatcagtagagatagagcgtgccgcttcacatcttcctcccggaggccatttctccatttttatgtgggataaaaagggggcgctgggctgagtcagtataagccaaagttgccgcctcttgcgcagccgaccccgcttcggccccggcccaggccagagaggtggccctcggagatgctgaagttactccgcgcagggggaggggtcgccaggctcctctccaatcacggtggccgctccagctatttgcatacattatgctaataacagacctcctgccccgctcccacccaagcttcccgcctcccttgggggttccccgggccggcccgcgggctgggccaaggtgaatacattatgataataaggcgggctcctgctttgccttcggaaggggggcgcgcagcagcgggagcggcaggccggacgccgggcgccgggagggggtcgggggagggacgtcgtgctcggagcgcgcgcgcactcacacactcacacacacactcacgcgagcatcgcgaagggtatttaaggatcgcgcacgcggggctgcggagatccttcgggcagccgcgacttcggcttcgcgagtagcattggttccttgggtttatttcgttttcctctctcttctccaccttagtcgcccctttcgcgctgcgctgtagcgtgctctcacagcctttttgccttgaactgaatgcaggtgggaaacaggtcggcgtgccgaaagacaccgagtaggtagaaataaggcaaactcacagagg

SEQ ID NO: 32555 - DNA, 2300 bp, Homo sapien
tacccaagtcattttgccgtcttggaatcctgagtatgtcatcactctgtattggagatgagattgctcagaaacactgaattcagaatgggatctagcaagatggtatttctggagcaataagtcatttactgaatgattatgcaaagcataaattgcattgtagtcctagaataatacaaagcttccctttagttgttgccgtaaattaataactggcattttaatgcactaaatgaattttagtagttagatttatatctttgacttctaggaatttcaactacattagagttcatatacacaaaaggggcaagcccttttccacagcatttccagcttctccacagaaacctagccccacatgagcaaaagatcacactctgtgcttcatcaaagagattacacaattacagattccagcatctcccaggagtcctttgaatttggattaaggtctataattacgtgggtaagggaataactaggtaattggctttctgcacctggaatgtattctcctgggtataagaggctccttttaatcagaagtatatgggatgaaagtgaaccctgtctcttaaggggagactccttaagaggaggattggggccctgtgttttaatagatcttctccacaatctttaatacctaagctccttccccttgtccactaatttgctgtagaatttttctagcatgtttatgatggtgttcagggcacactaccccaaaatataacaccttggcatattgaatgttttaagctgatggaatttgagaaatggcaggtgtgaggactctgaccttcccatgaagcaggtcataagaccctcatgtgagagatgccctctctatacctggagaaaagaagcagtcttatttgtgaagacagagagacgccaagaggaatctaaatgaataggccttggtaggtttcccccagtttactgcccttagcccatctttttgtcttatcacagttttccataacagtctactcttcatcaagcttggtataaaacgctcaggtttcttcaggtcttcgtttccttatgaaggctctggtgccatgtaaaacttacattaaatatcatacattcatatgcctttcttttgttacaggaaccccagacgcacgggccttgtgctgtcgctgccgtggcaccccttctagaaggtagatatttttcctcctgacaaacactacaacctttatgaaaatatttcactcttttgctttaatttccattactactataagtgaaaaaaggatgaagaattgaatgaataggattgaaccatctactaggcactgtgcttgtaaatctagatatgtatttttttctatttaatcctaacaataactccatgggatatttttcttatccctattttatctgtgaagaaactaatgtttatagagctgaagtaatcttagtaaaaatcatgaacctggaattagcagaaccagcggtcaaaccaaggattatttagctccagaccattgctttactataaactatactgggttaatttacatttttcttcataaagctatgctagttatgatttactgtcttgctgtcaaaagattttcagtttttcatatttagaatttgttccagtgtactctacaatggtagatctcagagtttttgaaatgcagatttgtgggcccaaaccctggaccgtatactgattcagaagtggtggagatagggccctacagcaagctctccaggcaattctgatgcatggggaagtttgaggaccactgcttttgaatagcagagttaagctgaattggttcattctcttactttggaagatgatggtcctttctttcaggacatctcttcaatcttttacagaccaataaaagtgatattttgtagatttgtgattacagtgtcacaaatgccaattatgatgtttcctatgtcaactcagattctctgaggtatagtgttgatgcagatgctgaggccaagtctgttcagtgagaaagagtgggtaattgaattaatctctgctgcatatatggaagtgaaataatacgtgtgttactatttgtcatccccaacttaggactctattctctataacagaagtgggagccttggacaactgaacgcctatctctagctcaagaaatgtcagctctttttttttttttgagactgtcacccagtcgggagtacagtggcgccatcttggctctctgtaacctccacctcctgggttcaagcgattctcctgcctcagcctcctgagtagctggggctacaggtatgca

SEQ ID NO: 32556 - DNA, 2300 bp, Homo sapien
tagtaatggaaattaaagcaaaagagtgaaatattttcataaaggttgtagtgtttgtcaggaggaaaaatatctaccttctagaaggggtgccacggcagcgacagcacaaggcccgtgcgtctggggttcctgtaacaaaagaaaggcatatgaatgtatgatatttaatgtaagttttacatggcaccagagccttcataaggaaacgaagacctgaagaaacctgagcgttttataccaagcttgatgaagagtagactgttatggaaaactgtgataagacaaaaagatgggctaagggcagtaaactgggggaaacctaccaaggcctattcatttagattcctcttggcgtctctctgtcttcacaaataagactgcttcttttctccaggtatagagagggcatctctcacatgagggtcttatgacctgcttcatgggaaggtcagagtcctcacacctgccatttctcaaattccatcagcttaaaacattcaatatgccaaggtgttatattttggggtagtgtgccctgaacaccatcataaacatgctagaaaaattctacagcaaattagtggacaaggggaaggagcttaggtattaaagattgtggagaagatctattaaaacacagggccccaatcctcctcttaaggagtctccccttaagagacagggttcactttcatcccatatacttctgattaaaaggagcctcttatacccaggagaatacattccaggtgcagaaagccaattacctagttattcccttacccacgtaattatagaccttaatccaaattcaaaggactcctgggagatgctggaatctgtaattgtgtaatctctttgatgaagcacagagtgtgatcttttgctcatgtggggctaggtttctgtggagaagctggaaatgctgtggaaaagggcttgccccttttgtgtatatgaactctaatgtagttgaaattcctagaagtcaaagatataaatctaactactaaaattcatttagtgcattaaaatgccagttattaatttacggcaacaactaaagggaagctttgtattattctaggactacaatgcaatttatgctttgcataatcattcagtaaatgacttattgctccagaaataccatcttgctagatcccattctgaattcagtgtttctgagcaatctcatctccaatacagagtgatgacatactcaggattccaagacggcaaaatgacttgggtaatgtagtctagggcctgccagtgagtatgctgagacagaccagaaagacttaaagattccactaatgtagacaaagcaagctgagccacaacttctcggaacaccaacaggatgcaccaacaatcgacaaaaaaaaaaaaaaaaaaggagataaagtttaaagtttgtcttccagcattcccttaccctattttccccttcctcttccctactttatcagtgggaaaagttctcaataatgcaattcttactgagattcttgtgtttatcagagaaatgtttcctctttctttgccaaggaattatatattcccaacagacatggcgcttgaatgctatatttcctttggaatcaagaaaggggaggtgggggaatcaaaaattaaaaaccaaacccaagccattgttcctcttcgaggaagggtgggtggtcagtcgtcgcctgagctccgaacatcaacccgcggctctcaagttcccctcccagtaatgctgggcccagcctcgccgcggccgatccagcctctgccctaggtggaagcgggccacccggtcccttcacccactgaggcccagtcctttcgcctcaacacgaaggcacctggccgggccggagcagcagccgcggggccggcactggggccacggaaccccgggccagactcaggcctgggccagctcggctccggcctgcagggggcgctgcggcggcaccggcgcgaggcccgcgcgtgcggggagcgaccccaggtgtaagtcccggggcgtggggcgcgtgggtcaaggcggagcgacccaggatccccgcgcccgcggcggccgccgagtggcagcgctggactcgcggagaagcttgggtacctgagccgcggtcccgggtgacaccctcagtgacgccaggcgcgttccttcctcttcctctctcctctccggccccgccttcccttccctccgcccacctccctgaagcggagccgccgtcgccaccagcgccgtcatgtcggcccccgccgggtcctctcacccggccgccagcgcccgg

SEQ ID NO: 32557 - DNA, 2300 bp, Homo sapien
acctctgcctagagtcaacctttccctcccaccccaacctgtcgagtccctcaaggctagccagaaccaattcaaacattaccaaatacagggcaagtcaggagagaggcagggactctgtctcatctgctaccctaaccttgagtccccaactggtaagcatgcaataaatgttgaaatgattattgcaacattaaaggaaagtagtgattataaacaagagaactcaagcatcatctatatttggcatcaaaacattgatttgttcttacagattttaacatcctgattacacttggctgagtacatatcctggcattcttgagtgttcacaaaatttataaggctgtaataaacatttgccactttaaaaactgttcactaagatgataatgcatattcagaaaatcaaggaaagacacaatccttgaatcactggtaaacatgagtctacaatgttctaaaagacttgggctcttttactaaattatcgtgttctagttccttcataaagctattttaaaaacaaacaaaaacaagaacttatattaaggttacaagaacaaacactgctcacaaatagtatttttacatttgttcagaacaggtttatatccaaaagcgattatagtaaacaatgactactgagagtacagcatgtaatactgataggtaaggctgatccaaagaatattaaggctaaagtatcactcaacttctgatcctcaggacaaacgatacacttcatgtttgaaaagcatcagttgtaaaacttagatgttgattaaactaattcataaagtccagcagattttcattaggaaattagataaaacaggtcaatcatctggagagtactaatgcagtttggttctcgtaccaacacaggacagaggtatttttctaaattcagtcaattactttccaaggttctcatctgacatactaagaagtctgtaaggagaattcctccacccttggcccctatccgcgaacattccaaatctcagcattagggaatgcatatccatcattttgcagcctactaaaagcccacgaccttaatatgaaagcggctttcgtgctgcatttggctgctgcctgtatgaaggccctgcctcaaagcagggccaactctggcacgttttttcatctctgaaagtggagctaggaaaaacacccagatctaaagatgttcgtttaaatccgtttacatctgctccctttcaaacactacaagcaaactccaaaagcttgagcagcagccgcagcggcaatgacagttcttgaggccgaactgggtcagggttacagttacacttatatagcatatttacacccttttgtctacaaacttgagtgcaaacttaagtttcctcaaggcagcgtgttcgctgggcctcgggaaccgaagcaattttcctgagacaggaagggcacaatccaccctgctgggtggctgcaccagccttctccggaccacgcactcagcggcctcggcttctggccagctctcgcagccaaggggtcgctcggggcaactcgcccgcgtccaggctaggtaactgggttttactacgtgggctcccagcttttcagtcgcccctactcgcccgaggccgtttcgggcctggggtcgcattacataaacagccacggccccagctttcccaggccggcccccgcccccacgccaggggcgtcccacccccgcgcgccccgcgccgtgccttccctgccccctacccgcacccaacccggaccccgcggcctccgcaccgcgcccgctcccgtccctcgggccgggcctggccccgaacgcccttcccggcccggcccgccccgccccgatgtggccgtgcaggccgcccagccggtgctaggccccgcgctccgcccgggccgcccgcctcaccgttctgctggtgcggcgccgggcccgcacccgggcccgcgggcgctgcggctcctgagacggccgctccgccgaacttgggcgggatccgggcgctggcggccgggtgagaggacccggcgggggccgacatgacggcgctggtggcgacggcggctccgcttcagggaggtgggcggagggaagggaaggcggggccggagaggagagaggaagaggaaggaacgcgcctggcgtcactgagggtgtcacccgggaccgcggctcaggtacccaagcttctccgcgagtccagcgctgccactcggcggccgccgcgggcgcggggatcctgggtcgctccgccttgacccacgcgccccacgccccgggacttacacctggg

SEQ ID NO: 32558 - DNA, 2300 bp, Homo sapien
cttggggaacctttatatccagttaaaggattgtaaatacaccaatcagcactctgtatctagctcagggattgtagacacatcaatcagcaccctgtcaaaacggaccaatcagcgctctgtaaaatggaccaatcagcaggatgtgggtggggccagatgggggaataaaagcaggctgccagagccagcagtggcaacctgtctgggtcccgtgccacgctctagaagctttgttcttttgttgtttgcaataaatcttgctgctgctcactctttgggtctgcactgcctttatgatctgtaacactcaccgtgaaggtttgcagcttcatttctgaggccagtgagacccgaacccactgggaggaatgaacaactccggacgcgccaccttaagagctgtaacactcactgccaaggtctgcagcttcactcctgaagccagcgaaaccactgaacccaccaggaggaagaaactccaaacatgtccgaacatcagaaagaacaaactccggacacgctacctttaagaactgtaacactcaccaccagggtccgcggcttcattcttgaagtcagtgagaccaagaacccaccaattcaggacacattatcaagattcttcacaaatgttaatagggatttttatcagttttagttgtagtttccaatttctaaaaatgttcaggtaatttttttacacctttcagaacctagctcatgagtgttgaatcaatgctttttcatgtcaattctttgtataggcattcttttcagttgtattaaacaagaacccttcacaacaaaaaaacaaaaatacacgcttctttcacttggagcactagctaataggaggaaaagattcaggtaaggtaatttaccttcccatatgaacttaaagtttcatgtgtcactctccatctggggcaactgtattttgaaagacatgctagttaacacaggtgaatcagcctttaatagtgataaagtttttactatagtagaaacttgtgattctttcccttttcaataaggaaaggagattaccgccaggagtgatttgccacttattgcaggtttgccaattttgattcattaactgaaccctcttgcagattcaggagataaaaatgcggagtgcccagttaaatttgaattcagataaacaccaaataatttagtatatcccagatatttcatttttaaaataataaatgtgacccatgcaatatttgggacatacttcactatttgtatctaaaattcaagtttaactgggcatcctatattttatctaacaaccctactgtaattggtttaggttgctctttaatgcctttggtttgctttcaaaaataagtagtctcaaaacaaagcatccgatttcccagtagttagaagaactcaataccggttccgaagcttcttcaattaaaaacgtgcttcaaaagagaagccaattctgtgggagatactttcccaaaaaactcgggtttgggcccctataccgtgaactacaaacctccgcaggggtaggcccgggctgcccgcctcacaccgcactcgccagcgagcaggggcccggcaccgcagcccggggcagaggccttggaggttgtggaggtgggagaggcctcggccgacccgcttcaatccgtcttctccaagctcggtggggaaaacaaacttcctgagcggccctgccccctccagatgccggacgctgttttcgtctcatccccgtctgggttggatggcgaagacggcgctcagagcacgcagcaccgggaattaacagcgagttttgaaatctagagctcgcaaggtgtgcgtcgcctgctgctgttcattccagagggtcttctgctggagaaggagggggccctcgacctcgggctcccgctctcgggctcccgctctctcgctctcttttttttttttttttttggtcggaggaaagaaaacagccctgcgcccggatgcgtagagagccgacaagtggaaacagggacacaccctcccgtgagcccgcccaagctggagccgcggcgcgctgagcgagcaggcggggcgggagcgcccacagctcggagccaccaggcgctgacgaggagcccggctgagggaggatgcgccgctgacgcctgcgggagccgcgcgcctggggcgggaggatgctccagaggggcctctggccgtggcgcacgcggctgctgccgacccctggcacctggcgcccagcgcgcccgtggccgctgccgcctccgccccaggtaagagcgggtgccgggctgtgg

SEQ ID NO: 32559 - DNA, 2300 bp, Homo sapien
ctaggattacaggcgtgagccatcgtgtcccacccgtacataattttaactaatttaaataaccacatttaacaagtgtctaccatatcggacagcacagatctagagcagtgtttttcagactctaatgtgcatgtgaatcttctgaggatcttgttaaaatgcagactggaattcagtacatctggtctgaatctgtgattctgcatttttttttttttaagacagagttttgctcttgttacccaggctggagtgcaatgatgggatcttggctcacggcaaactccacctcccgggttcaagtgattctcctgcctcagcctcgcgagtagctgggattacaggcatgtgccaccatacctggctaattttgtatttttagtggagacagggtttctccatgttggtcaggctggtcgcgaactcctgacctcaggtgattcgcccaccttggcctcccaaagtcctggaattacatgcgtgagccaccatgcccggcccgattctgcatttttaattagccccaagatgctcctggtctggggaccacatattgagaagcatgtctctagactagatatacttatgtccatttgttttagattattacctgaaaggaaatactgaaagtaaaaattctcacagaactctaggattttcagggggcctcataccccaatttagggatcccgtcctggtgtgctactgctacagcatacatagtagcaggcaagcatatagccaggaaggttcagtgagcttgccaagggctcaccctgggatgcatgacaagttgagtttttcattatgcttttcatatagtattaaaaagaatcttatggtaaaataaagacacttatttcatctttcccactctttttttaaaaaaacaaattaatttttccttcttgtaggttttgcgtgtgaagctgtgtggaaatgtgaaatactaccagtcacaccattatagtaccgtggtgccacctgatggtaagctttcttaccatttatttgattcatatgttaattgtttccctttcttccaaataaagagctgcgagagttttgagcagaatagacttttcttacactatccccatcccaccccaccctgattgggttcacttccacctttttgtgctcccataatatagctgctgtcttttgtcaaattcccacctcagaatcagaggagtcagagatgataagcaatagtcgggtgggtgtggtggcctgtaatcccagcactttgggaagccacggcaggcggatcacttcagctcaggagtttgggaccaacctggccaacaaagcaaaaccccatctctacaaaaaatacaaaaattagccaggtgtgatggcacatgcctgtagtcccagctacccaagagattgaggtgggaagattgcttgagcccaggaggtagaggctgcagtgagccatgatcgtgccactccagtttgggcaacagagtgagaccctgtctcaaaaagaaagaaaaaaaaacaaatagtttctgtcctcaagaaaactagaacttaagtgtttacctgagaagactttttttctttttcatttaatcagggtctagctgtgtcactcaggctggagtgcagtggcacgatctcggctcactgcaacttctgcttcccaggctgaagccatcgtcccagctcagcctcttaagtagctgcaactacaggcgcacaccaccatgccagacttaattttcgtatattttgtagagatggggtttcgccatgttgcccagagagctctcaaacttctgcgctcaggcagtccaccaatctgagcctcccaaagtgctgggattacaggcatgagccaccatgccggccacctgggaagactttaagcagataataaagtgtggtatgtgctacactaaaatgttatagaatggtagggaatatgtaaactgtagtataatgaaggcattattggagcaatacaaatttttataagacttcagaggtttgtgaatttcatgtttgagcattccttctagaattcttgtatttatggttttttttaaagtaaaatttactcatttttttttctttttttccttaacagaaataacagttatttatagacatggccttcccttggtaacacttaccttgccatctagaaaagaacgttgtcaattcgtagtcaaaccaatgttgtcaacagttggttcattccttcaggacctacaaaatgaagataagggtatcaaaactgcagccatcttcacagcaggtatatatgtatataattttacaacttt

SEQ ID NO: 32560 - DNA, 2300 bp, Homo sapien
tcctttccagaagattttcaatttactttgctcagaactatcagaggaatcatgatgacagctatagccttatgaaatgtattttgtaaataagacttgaaagtcaaaatttctccttgatccctgggcttcagaatggatgttgtgttagcaagcacgataacagcatcagtctctgtacatctctatcagaactcttggatgaccaggtgtattgtcaatgaggagtaatattttgaaaggaacctttcttctgagcactagagctcaacagtgggctttaaatattctctaagccatgctgtaaatagatgtgctgtcactaactagcctttgttggtccatttatagatcatatttagcataattcttaagggcactaggattttcagaatggtaaaggaatgttggctttaaagtcatcagttgtattagcccctaacaagagcatcagcctgttctttgaagctttgaagacaggcattgacttctctctagctatgaaagtcttagatggaatcttcttccaatagaaggccgtttcatatacatttaagatctgttgttttggctgggcacggtggctcacacctgtaatcccagcactttgggagaccgaggcgggcagattgctcaaggtcaggagttcaagaccagcctggccaaacatggtgaaactctgtctctactaaaaatacaaaattaacctggacatggtggcacatcctgtaatcccagttacttgggaggctgaggcagaagaatcgtttgaacccaggaggcagaggttgcaaaagatcgcaccactgtactccagccttggtgacaaagcaagactgtctcaaaaacaaaagattgttgtttagtgtagctgcctttatcaatgattttagctagatctggataacctgatgcagcttctacgttagcacctgctgcttcaccttgcacttttatgtcatgaagatagtttctttccttaaacctcaggaaccatcctctctgctagcttccagcttttcttttgcaattccctcacctctctcagcctccatagaattgaagagttagggccttgctctggattaggctttggcttaagggaatgttgtggctgtttttatcttctatccagaccaactagaactttctccatatcagcaataaggctgtttagctttattgtcttttgtgtgtttactggagtagcatttttaatttccttcaaaattttttcctttgcattcatgacttggcttttctcctttgcactcacaacttggctaactggagcaagaagcctagctttctgcctaccaacattacttcctcactaacttaatcatgtttgcttttgatttaaagtgacaggctcttcctttcatttggacacttagaggcctttgtaggattattagttggcctaatttcaaaattgtgtttccaggaatagggaggccccaggagggggagagagaagggaaagttcggtggaacagtccaaacacatacagggcttatggattaatttccccttcctttatgagcgcggttcatggtgccccaaaacaattgcaataatattaaagattactgatcacagatcacaacagcagacataataacaatgaaaaattttgaaatattgcgagagtaccaaaatgtgacacagagacacaaagcgagccaatgttgaaatacaggcagtatctgctaagcggtataaaacaatctatgcctgtacctctagaaagtacaggcatagcaaagtaaggaatagcaaatgtttggggcagctgggattaaatgagtccgagctcacacaagtgatgtgaaattgcctcgggctaggcggtctgtgtgtccccccgggtggcaactggcatgtccccagggcacggttagtcccagcgggcctggaggcgaagaccgcgtacctctccctgcccccgcgctcttggtccccgcgggctccggagcgactgggaggagctttaactctgggaaggaccagcccgatccacgggagcccgggcggcgcgcaatcagaaccaactggccccacgctcgggggcagggggcggggccgccgaggaagggccgagggcggggccgggcccgggagcctgtggcttcaggaagaggagggcaaggtgtctggctgcgcgtttggctgcaatgagctcggcctcggggctccgcagggggcacccggcaggtaggcagggggcgtcgactgggcaccgagcaggtctgcgtcttgctccggctggaggggaaacgagggttagtggaccggg

SEQ ID NO: 32561 - DNA, 2300 bp, Homo sapien
agatcacaaagaagtaaataaatagagaaagtgggggaaaggagaggctttgggtcataactgagggctggaactaggttattttattacattctatcctttcttttgaaagtcttgtccctggactagggagttgtaagaaccaagcctggtttaaggattcaggtggtggtatctcagaggtaatctagtccaactttcatactttggagctgagaaaccaatgttccagaaagctaagacaatgattctaagttccctttttaaaatgtattgaaatgtgttgtctaaaaattaaaaaataaaaatatctgtggtattttgtgaagacagaggccttggtttggagtagatactgtcacatgacttctcacctcgactcttttattgtaaaagaggaagataataataccttccagggaacattcttcccccttctccattgtggtaggaattaatcactgcccaagactcctggttgaggggctgagtgaagtgcaggcagtctccagccaggagctacaccgtttgttgggctaccctgtttgtagggaggaatgcctttctatgtttctaacttgcccaaagtctgcatccttgtaaagtagtgttctgaatgtgagcgatcatattcatgaagtgcctggcacatagtaagcactcaataaagagggatgtaatttttatgaactgtgcactgaacgtttattataagctcatttagtttgtaacaaacacaaaaggccaaacctagaacttattggtaattcttatagaaaggacacacctatgcccaatacttactcactttcttttttttttagagtctcgctctgtgccccaagctggagtgcagtggtgcaatctcagctcactgcaacatccatccacctcctgggttcaagtgattctcctgcctccgcctcccgagtagctgggattacaggtgcccgccaccacgcccagctaattttctgtatttttggtagagatggggtttcaccatgtcagccaggctggtctcgaacttctgacctcaggagttccaggcctcccaaggtgctgggattacaggcgtaaaccaccgcgcttggtctgcccaatactttcaacattgctctggatcttactgtaaaattcttggaaactgctgtgatactaagataaccagatatttacaactgatacaaagtactactgcaatagttatttatggatcccgcacaatgctgggggcagggtggtaggtacagagaaacaaacgtcactgtaactatcaagttacaaaatcccttgagtagaaaaacaatgacttccttaagatttattttactttttactgtatttaagtttacactactgtttcttccttaccaggggagaattttatgatttttatgttggcccattttctttttccggaaagtctaaactagcatttagctcgtcctgattagagtcaggcaccgccaaggcatgggttggcatcttccagatcccgctcccccaaccgcggccacagcagatctggaggaccgggagaggacgcaaggaggaaaagccctgctctgcgagctgacagccggactctgcccacattgccaatggaaccacgtcttcaagccggaaactcagctggacctctcgcagcgctctctgcgagggggcacaggggttattttctccgatgttgtccacacccagaaaagcttgtctctcggggctactgtgctgagccccgactggtcaggttaggccaccggggttagctctgcaactcttgcttcacggttaacagcccggagagctttcttaaaaaataccgacgcccactgccacctgggacaacgtaatcaggctccctagaaaaggggctcaggcctgggtactttttaaggttctcttgtgaaccaggaccaagggtcttgggagggtgccgcggagaccacgtgggcatggaggccccgcccccgtttcccgccccgcgcgcccctcccccggttccccgccccccccaaccccgcccccgccccgccccacccctgcgcgtcccgcccctcccgtgcgccgctgacgcgccgtgctccggcgcaggcgcacaggggacggttgctggcccaggtgagcgggcgcgctggtccaggtgagcgggcgcgtccccgcgacggcgctgcctgcccgaggcggttcacgtaaagacagcgagatcctgagggccagccgggaaggaggcgtggatatggagctggctgctgccaagtccggggcccgcgccgctgcctagcgcgtcctggggactc

SEQ ID NO: 32562 - DNA, 2300 bp, Homo sapien
ggaaagtttagtgtttccttgaagcatggaaatacagattcagagggaatagttgaagtaaaacttgtggaccaagataagacaatgttcatatgcaaaagcagctggagcatgagggaagccaacgtggcctgccttgaccttgggtttcaacagtgagcgcttgtatcagtggattttctcatggctgatttaattgttctgtttgctttttgattacctaacctttctgtgtattaatttccatatgtgtaacctaagaaaattaactatgtgcatcatagcattgttatgaggatgatatgcattcatgtttacccaacacttggaaccctgctgacaacaaagcatggataataagtctgttgaagtatctggatgtgaatcctttagtgattctgagagtcacaaacacattcatttctgtctgtctcctactcgtctacaattatgtacactttttcacacttagtatagtttatatactgtgtgtgagtatagtttatagttatataatatagtttatactataaactatacagtgagtataaactatacagttatagtataaactatatagttaggataaattatagtttatagttttatagtatagtttactataattatagtatataagtatatatactatgagtatagtgtacaaactataatttatatatagcttatatactataattatagtatatatacttatatataagtgatattttatttattgtttggttcagaatatcttctaactttcaatataatttcttctttgccccatatgtaatttagaagttttctttattataatattagttttaattaatacgttagtttgcttttggttaactttgtgttattgattttcttattctgtgtggttagagaatatccctgtatgataacaattttttcaaatatttgttgagacttgctttgtggctgagtatttttcaaatgctccacgtgcagggttctagataatagatatgttactcattattaatagaattagctgctctgtttagatctttctctatttctttactttcagtcttcctatatctttagattttaagcatgttccttataaacagcacatatctagatttgttttaattcaatattacaatcactgttaactaaagagtttagtccatttaccttattatacttacttacattgttgaatttatttttcctcttgtttttaggcttattatttaccctgctttttgtgtgcttttgtcctttttccttttataatttctactaaattaaagatttttaaaaatctttcctcttttccacctctagttggtttgaaaattatgcattatatttctacttctttagttacctttgaacttataccataaatcattgatttaggaagtcctcaccttcagtaataatagaaaaaaatgtaattaacccatcaagtttctaatatttagttccaccttatttttctatatcccagaagttaatcactatgatgatataataagccattatcactactattaaggcaatgcttactcagatttacttcatgtttaccaacttcttggtttgttctttcttgtatctcaccccttctttctgaattcaattttcttcttcttaaaccacatctgctagtagttcattagtgagagtctcttatattgttaaattaagccataggctatttctgagtttcagcagtttgttacctacaacttatggttcaacctactggtagattctctcagtattttatttctcagtattttgctcttatattttgcataagctcatgaacagacatctctaattttaaccagtgcagatttcccttacttccttaagaactcattgaggaagaagatggcattttatatagtatttttagatatttttaggttggtacgtttttcagattattaacctataagattgcctcaaatggctcttgtttgttctcatggcacagcctcatgatctgaaataattacaaatcttggcttcaccttgttttatttttgctttttatcctagttagtctaatatttatattgtcattactgttctatttttgtttccatttacctgatgcatctttgctcaattttttatttttaacctattttccccatttacttctagagagaagcaaggaacaattgaatgtcctagaagaatagttcactgtaaatcatcatctctaggataatacgtcactgaggaagtctcttctcacaaattctgagcaaattgagaagtccaagcaatggcacacagat

SEQ ID NO: 32563 - DNA, 2300 bp, Homo sapien
gccagacaagggtgcccactttacagcaaagcaggcccaggagtgggcctgtgatcatgcaatcccctggtcatatcacataccacaccactcagaagctggtggacttacagaatgttataatgggctgctgaggacagagctgaggtgccagttaaatgcaaaactttgtgagaatggggtgctatcctccaggaagcagtatatacattcaatcaaagactttcatatagcattatgttcccaataggaagaatacctgggtctgggaaccaaggaataaaggcaagaattaccacacttaccatcaccaccattgaccaactgggggctttgtgcatcttgtctccacagttgtagactctgcagggttcgttatcttggtctccaaaggactatactttcaccaggggcaagcaagagtcccatggaattataaaccagagctgttgcctggggtacgctgggctctttgtgtctaggaactagcaagaaagagtcagaatccacaagggtaattggccctgatcattccgaggaagtagggctgctattactataatgtgggcagggaggaagatgtgtagaacccacataacctactggggtacctcttattttttgctttttttggtttcttttttaagagagggtctctctttgtcacttaggctagagtgcagtggtgcaatcatggctaactgcagcctcaacctctccctgtgttgcccaggctcatctcaaactcctggcctcaagcaatcctcctgccttgacctcccaaagtgctgggattacaggagtgagccaccatgtccagcctgcctcttgtgacagtagggataaaaatggcaacttttgcctgagaaacaaaaggtaaccaggggctcagaccactcctgaaagagagtgtgggacatgtcatccagtaagtcaccgagaccagcagaggtgggaggtcaaggtaaagggaatctaaaatggataggaagggggccaagggtaagtttcaactacagccccaagatcaactgcaagggtaggagctgtagtttttcccattaacttcctcttctaagttttctctcaagaatagggacccactgaaatgtttaaggagccactcctggagtgtatatggaacatagatctaagaggtgcaagtatgtactctgaaagacacagagatgagtttcccagaacccttgtcaaggaaggtcttgctacctggctgtaaagagtgtagtcagaagatacctcctcctgatagcacataactgtcagatccttctgtgtctgccttagctacagaaaactgtctcacctaagtgtatgcccttcctgggcaatatatagtaggggaccaagcaaggcagaatataatggcccagccatttatactgaaatcaggggcactgtgacaggtcacactcactccagttcaacttctacctctgttcacccctgcttcccctcccttccttgtatggatatcgatccctaacaaacacttgtgccccacactcactgtctcaagtctgcttctgatgaacccaactgtgtcagcatttctgctatcacagatttatttcataaatagataaaccctgcatgatagttggtactggcacaagaatacttgtttttaaaatttcttgtactccaaaaatacaatttgatcacagcacaacaaatgcatggtaaagaagctggtttctagagttttaaatgtattttgcagccttcactatatggtctacttttattcttactgtctcctagtcttcaaccttaagtttaaaaaattatatttttactgtacaaaaaaaaaaccaaaaaattgcttccaatataatttctgtcttccctggaatacagaattgagtcattgcaattaacagggtgggaggaaatcagtctcttctggtggaaacaagttcctattggtcacctccctcagctctttaatgggaaggccattttttggtttcagttacggtaaatctctctggatttcagccaaattctttcagagttcaaaagtacaaagctctttaggaggtttgttcttttgaaacattttttcagaggttaaaaattaaatttcaaaagaatacctggagtggaaaagagttctcagcagagacaaagaccccgaacacctccaacatgaagcttcttcatgttttcctgttatttctgtgcttccacttaaggttttgcaaggtaagtaattcaacctttatgcaaacaattttaattgataatttaaaggttgtaaaaacatagaaaataatctt

SEQ ID NO: 32564 - DNA, 2300 bp, Homo sapien
tattgcaaaaagggatcttgaaatgtttccactgctgcttggactttagaataaggaagtctcaagtcttaccgaaaaccaccgtggggaattgcagaacaaaaccgaacaatattttccttcccctggaacacaactgtataactacgtgaggaaccctttccttgaatcttctcagcctgagcacctggctttgagaaaagaggaagaactttgtgaatgtatgactgtagatataagatgaaatgtacttatttgtgtttctccttctttttttttttttttttttttttgagacggagtcttgctctgttgcccaggctggaatgcagtggcgcaatcttggctcactgcaatctccgcctcccgggttcaagcgattctcctgcctcagcctcccaaatagctaggattacaggcgcccgccaccacgcccggctaagttttgtatttttagtagagacagggtttcaccatgttggccaggctggtcttgaactcctgaccacaggtgatctgcctgcctcagcctcccaaaatgctgggattacaggcgtcagccacagcacctggcctgatctgtgcttctacaagttttggatttctgagaaagaagagcagcttgacatttttaagaaagtaataaacattttgacatactttaaaacttcttgttcaagcaagctttttctcactaagttttaagagtaaagacaaaaatcatctcatttcagttgaaaatgcaatctgtgtgtgacaatctcaagttcaattcagaattgagcaaatacacagcaaaagataagcaaaggtttcatactaaataggtaattttcattttttgtttcaaaaataatacacttatataggcccataaaaagaccaacattcgttaaaatcaaattgcagcatttactaaactaaaagaaaaagaacaagtaaagtttcctctctcacttattttgttttttgtttgttttgagaccaagccttgctctgtcgtccaggctggagtgcagtggcgtgatctcggctcacggcaacctccgcctcccgggttcaagcgattctcctgcctcagcctcccgagtagctgcgattacaggcgtgtgccaccatgcccggctgatttttgtatttttagtagagaaggggtttcaccgtattggccaggctggtctcgaactcctgatctcaagtgatccatctgccttggcctcccaaagtgctgggattacaggcgtgagccaccacgccccgcctacaaaggtattttaaaatcccatttacaataaccctctgaattagataggtaccaagttccaccctcttctaaacacgagatcaaatatcaaggtaaggtctcagagggtttgggtgtaaaagactccaaccaaatttaataaatgggaagtcattacctttatttgtgagagaagctttggagaatgtgggggaagctgatgtcaaatataaagggcttaaagagagaagagggagaggagctttcagcacagtccagttcacagcccgtcggtgctcaaaacatacttgaatacctggtacaaaagataaaaatgatggtttggttttctataagacagcatagtttctttaaaattacacacacacatgcattgcttttcttcctttaattagttgagaccataggacaaaagaagaggcatagttgagcgcgtaatggtgcgaaaatcaaaaggttgggaagaaacaagaaactcagataaacgcttccgtcggctgtgacaggttctgaggcgcccagatctactggacatagcgcggctcagaagcctcagagacctgtccgcacagttcctgaagttagcaacaaattagtgagtgctgttgcgggccattttgcagccagagaagcaaatgcgcaaatgcgcccagccagtcagcacggacttcaagaaccaacttcattccttgcaaggtgctttagttctggccgttagggcggcaaccaaacagaaacctgccccgcctctgggagagaaggcggatccctaacgccagctatctccaagagcaacattgccgcagcacttccgggacgtcgtgctgcaaaggacgccgctgttatacgtcacttccacggctcagcgtcaggcaagttggcctctctgttgtaaattagtggttaaggttatctattattgccacttttccagcgctaaaggctgttttggaaccagtgttgcttgttccgcgggtgattggcttttttttttggcaaaccagttattcaagtttctggtctttaaaaaactctg

SEQ ID NO: 32565 - DNA, 2300 bp, Homo sapien
cgtttagcttatgtatatctttttttcattgtccatctttaagcttttatttccacatcttttccttttttttccttatagtttctgggtttatttatttgtttatttattattattattttttgagacggagttttgttcttgttgcccaggctggagtgcaatggtgcaatgtcggctcactgcaacctctacctcccgggttcaagcgattctcctgcctcagcctcccaagtagctgggattacaggcatgcgccaccatgcccggctaattttgtatttttagtagagatggggtttctccatgttggtcaggctggtctcgaattcctgacctcaggtgatccgcctgctttggcctcccaaagtgctgggattacaggtgtgagccactgcgcctggcctagtttctgggtttttttgaggcatttcattttgaatcaaattcacatgtatttctaagccttatcccaatatagcttttctgtatcacccatgaaggaagcataaaaaagaacttcaaatgcacctacctcactcatatcaaaactttcatctgcagcagaaagctgactatctgaaattatatatttttcagttcttagaaataattatttctggaaaatttttcatggatgctacaactaggtataacttattacagaaaaggaaggtagtatgacccaaagcaaattcaaaaattttaagttttgttttgcatattgaatgaaagaaaagacaaagactttttaaagggagtgatttcctcttgggtattatgttttttgctctagggtcatttgaaaacaatactgacgagattcgcttttctagtataggtataacaatattacatttataaaaatgtgagtactggtagctataagatttgggacagataaatcaacctgttcatcttgagtttatacacaggcaagagaactgaagcaaaaggattatcttaggtttctgctgtgccattctaggatttttataaaattaaactaagtgggtaaatatagccctctagtggttctgttttatgcttacactgttaactttggtgcatctaagcatttctctaatgtttactgattttaggaaactgaggagaatcagattttaataatgttaatggcataaagaatatgggaaaaaaggtaatagggataccttattattctaacaaaacatgctcaggttggttttcaggttgtaatgtgataatccagaatatttttattctgtactttacaatatcagtgattgaattcagatactctggcaaagtatacaatgattactatcatcagataatattaattactcatgtgcatatcaaactataggggaaattaacggatggtggagttgatcatattatatccatgctatgaaatacatagctactaataaattagactttattagattctgggtttattaacttggatattataatacagccttatgggaaaacaagttgcattatatatatacatttgtacttatttttttccctcatttttatttacaagaagaaagtggaggaaacctgaaacacttgtatgaatatgtgtataagcagagaaaagcctaagaaaggatatgcaccaaacaatactggtacctttaggagagtgagatttggaagtaggaaggagactacttctttgtcactaatatttaaattgttaagaaaaaaaaaacaacaaaaggagccgaaatggaaagacttgaatggtcaacagaaaacagggaccttaatccgaatagttttagaggactaaggctggctcctatactgatttcctgagtttgtttattgttaaatgggatgtgtgtgcttgataatctccttagatagaagactgatgcccaaataggttaaaatgtgtggtgcttggtatttctttttgttttgctaataagcttttcccttattctgggaattaaagtcctttcctctttagcccaattaaatttgttaagggagggcctctatgaaaaggcccttctttgaggtctctaagtggaaatgattggtcctaaaaaatctttcctcagtagctcataaagcagttcataattatcgaaggcttattatgaagggtgtttcggtatcttccctccaaaatgctaagaaataatttaggcaacagttcagactctaaaaatgaagatggctcggtcttttcacagactgaacacaatattgttgcaacttacttgattatggcaggtatggatatttaagtaagttatttttctttagaatgggtgaagaaaggcagaagt

SEQ ID NO: 32566 - DNA, 2300 bp, Homo sapien
gtattttttgagatattcactgggtggttaaagacaatgaagagaatgtagcaagttaaagacctacttgtccagggacgtgtagcagtgaaggatcaggccagggtacttttgagaaactatcacagaaatgtttccttctttgtggtgaccccattattgatggattttataaaaattatagaatattaggcctggcaagaaataatctagttcaaccccttgtcagtttataagtgaagaaactaaactgtatggagaccaaatgacttgtcctagatcatataattgtgttgatgtagtaactaagttcataaagatgctagatcttttagcgtacaaactagactttcttctatgatagcatgctgagatacttattttatttatttatttattttgagacagagtctcactttgtcagccaggctggagtgcagtggcacaatctcggctcactgcaacctccatctcccgggctcaagcaattctcctgcctcagcctcccaaggagctgggattacaggcgtgtgccaccatgcccagctagtttttgtatttttagtagagatggggtttcatcatgttggccaggctggtctcaaactcctgacctcaggtaatccacgcacctcggcctcccaaagtgctgggattacaggcgtgagccaccgcacccggccaatactttcttaatgagtagaaactgctaccattctggtataaagtagtactgaaatctgtgatataaaatagagatgaaaagtaagagatatccctagaggatttcaaagattccatgaggtcttttcctgaagttatagaaaggacataacactaccactacattgcagctttatgctgcttacgtgtgtatacattatgagctggtttttcaaatccactgatttaatgtcatatgtttcactaaagggttattttattgtaattatttactaaatttatagtgtgctataatttagatgatactttgcaaaacttcttattgttcatttttcataattcagatgagtatctcataggagataagtctttttccaggctaaaatgaatctaaattctcagattcctcatactttaaatttacacatgggacagtgttgtcttccttccttccttccttccttccttccttccttccttccttccttccttccttccttccttccttcctttctttctttctttctttctttctttctttctttctttctttctttctttctttctttcttttctattttgagatggagtctcgctctgtcacccaggctggagtgcagtggcgtgatcttggctgactgcaacctctgcctcccaggttcaagcgattctcccacctccgcctcctgagtaggtaggattacaggtacctaccaccgcgcctggctaatttttgtatttttagtggagtcggggtttcgtcatgttggccaggctggtctcaaacatctgacctcaggtgatctgcccaccttgacctcccaaagtgctgggattacagccatgagccacattgcccagctgggacattgcccagtgttgtttttctatgcctgttttatatgtgccaacaaacaagatcaaaatgtgacttgctcaaggtcaactcctaatttctggtttattccttaggcagaaagcaatgtgcaagtcacgttattaaaacagagttcaactttaaacatgtactgtgaacacttttttttttcacctaaataaattattctctgaacaaggattgatttattattttaacagggggttcttttaaaatgggccatttcctaaagaggtgcactttaagttggacagaagtggttttgaaaggtggctgtgaaacccactagctgggtgaccttggaaagttactgaatgttggtgggcctcagttactttccatgtaaaaccgaggttgttgacagtagcagcaaatacctactgagtacctattctgtgccaggaagttgtagagttttacatccattgtaattaatcatccataacagtgccatatgggaaaatgaggttgagacactggtgaagtggttttccatggccacagaggaggtggcaaaccttagaccttggttagatttgaaccaaggccctcctcggcctcccaaagtgctgggattacaggcgtgagccactgcccagctgaaaattgatacatttttcaaatgagaagtatttttttcaaatgggtgttggaaagtgagtttcctcacattgttcatgttgtgacactaggttggtgctatgtaatgacatggata

SEQ ID NO: 32567 - DNA, 2300 bp, Homo sapien
ccagaagtaggaacataaacttattatttatttatttatttatttttttgagatagagtcttgctctgtcacccaggctggagtgcagtggcgtgttatcggctcactgcaacctccgcctcctgggttcaagcaattctcctgcctcagcctcatgagtagctgggactataggcatgtgccaccacgcctggctaactttttgtatttttagtagagatggggtttcaccgtgttagccaggatggtctagatctcctgaagtgtgatctgcccaccttggcctcccaaagtgctgggattacaggcatgagccaccacgcccggctggaatataaacttattaaatatctctgtaaatccttcccagttgggtagctctgtcctatgattttgctatctgggcaactgtagatgatgaattagctgcgattgattttcatcatcagtcatcagccatagcatctgctatacctctgttgactccgtcatctcctagggagcttgtactcaacattaatgacaacattagcccaggtgacatgtaattaagaaagcaaacctttttccaaccaaaaataatatgagagattccaaatccaaacagaacagagctgtggatcatttcatgtttgtcttcatatcattctctccactccactccactgacacagcgtgatgcttgattgtcctctaagccccttccattgctgtcatctgggatgctggcaatgtattgtgctgaaagggaagcttattaataaagttagtaactcgaagagtcagtgcaggttatttgtaggatgctcattatgagtcttgagtctgactcagtccagaaagcaatggaatattccgcataaccacctaaaggacttctctttcccccttccccagggtctgtttctcctgtaagggttcagagctgcctggcagaggctggctgaaataggagaaatcctgacttaagctgtttcaggaaagtgatccagtctttggagaataatcaggacataattaagtatgagtaaaaggcttagagttagtctgttctcctctgtaatggggtgttcactagtgtgacagttgtttttgtgactattgcttttacgtacatttttgaccagcacttggaacactacctcagggtaacttaaatgaaagtccattttccaggatggagtaaactgacagaaatttccatcgtgcatcaaatctgctataagttgtttgccttctgggtatttttgggccctagttgtactcctgaagaaataaccactgttgctccaagtagaaagtggttgaggagacagctaacagatacgtccagttcttattttctatcacagagatgtgaaaaaaaaaaagcctaaattatcttagaaggaaaagcattcctctgtgctggatttccagtgcttcccagctttgcactgttagcttattttttccaatgtccctataataacaatccactcctttctctgcactcctggcccctcgtgatgttttatcatgctcatgctgaaagaaaaggtgtctgtccatactgtatctcttcatttggcctcagggatttccctttgatttggaaagaataatctttcaaattccgctataaactatacaggagaaagagaaaaataagataaagctcctggaatgtgcactggtattgacatttcgttcaaataatgggctgaaggtgaactatctttactattgctcatgtgaatgatcaattattatcaatccaaactatcaacagtgctgcttattattgatttatactgcatggtttaattttgtctccatccttccagacattaaaacatagccaatatttagcagttcccgccattcaccatgagcacctccacagcccccaactcctctctcccagttctgcccaggatatttatggtgagtagcgagttatctcctctttggcagtcatccctgctttcctgtgtggaggaattgcccacattcgcatttgcaaacagaggctcactcaagtgtcactaaaggaaaggaggtggagcctgaagagctttaaaaagcaaagctgagtcattccacttttcaaaaagagaaactgttgggagaggaatcgtatctccatatttcttctttcagccccaatccaagggttgtagctggaactttccatcagttcttcctttctttttcctctctaagcctttgccttgctctgtcacagtgaagtcagccagagcagggctgttaaactctgtgaaatttgtcataagggtgtcaggtatttcttactggct

SEQ ID NO: 32568 - DNA, 2300 bp, Homo sapien
gattttctgtcttgattcctttctcacttcttaccttaatttatttgatgaatcattcactttacaaatatttattgattattcacaggctcaggcaccgtgctaaaatggttctttcttatctggccacacctatcttccagcccaatcttgccaagagttttggcctgggccttacttcaaagtgacgtagacttgtactgtagaggtctctagaaagacaacccttggctgggcatggtggctcatgcctgtaatcccagaactttgggaggctgagacaggtggatcacagccagcctggccaacatggtgaaaccccatctctactaaaaacacaaaaattaggcgggcgtggtggtgcttgcctataatcccagctactggggaggctgaggcaagagaaccatttgaacctgggaggcggaggttgcagtgagccgagtttgcaccactgcactccagcctgggcaacagggcgagactcctccatctcaaaaaaaaaaagaaaaagaaaaaagaaagacaacccttaatgggggagatgaggacagtccctacacagaatctttggcagtgtcaatgtatacattaatttgctaatcaactaggctagccctttaatctatatattgtactggattttaaaaattatttctttactttctcattagaccttcctcttttttttttttgtttgtttgtttggagacagagtctccctctgtcgcccaggctggagtgcagtggcagaattttggctcactgcaacctctacctcacgggttcaagcgattctcctgcctcagcctcctgagtagctgaggttacaggtgcccgccaccacgcctgcctgatttttatatttttagtagagacggagtttcaccatgttggccaggctgttttgaactcctgacctcaggtgatccgcccacctcggcctcccaaagtgctgggattacttctgtgagccaccaccgcggccggtcccttcctcctttaaaaatttttctcccagttcccactttttgtgggttagaggcatctaaattgaatgaaagtaccctttttggactactggggaggtggggggatgttctcagaaggggaattttctttctggtcctaatatccacctaatttttaaaagcagggctccttattattttgtaaagtttacaattacatcattagatacttccatgtctcatatttcatttttccaaactcttgggggaaatgagtggagggatggatggaatagaaaatagtttttcctcttggaggctgagggcccagtaggggtcaacagtacattcagccctctcctcacatattctgttctacctacaagtacagcaagtaaagccaaatttctcatgcatgcaaataaagtttttgcatttggccagtcggtccagttctcctgtcagcttccttccccactctgcctctgttcattaatcccccccttcccggtacctaaaccctccacctaacccagccctttcttccacttccggctactagcctctctcgcctatccactatcctcacactcagcatcccctgtctgtacgagattaaggagctctgccgtccgcagggcctgggttagcgtgaatctaagccagagctcccgggtgggggtgggggtaggggtgggggtggtcccagaggtagggcgaggaggtgggaagcgtattcccttcactggtgatctcaacgtagatttgcccggagttctcttgcaagagagctggcaggttttactatttcccaatcgtttactcgccaagctctcgggtccacgcgccgcggggatgcgccctgcaagctgaaacttcattcaaagcaaggcggcccacgaggttgggcttaggggatctggatgacctccaggccacttcctttctctctgcgcccttcccccactcttccaaccaccttcgctgtaaacaaaactgtcccccccgggcggagagaggtcgcgctctttcgcacactccctcgccaagggttaatttctcaaatcgcacgagggggaggagatttccctgtagacgagtaaaaagggtgatggacaaacgtgcgggcactaagaccgcaaggcattcatttcctcctacggtggatgcggacgccgggaggaggagagccccagagagaggagctgggagcggaggcgcaggcaatgctcagccctggatgtagctgagaggctgggagaagagacgaccgctggagaccgagcggcgtggggaagacctaggggggtgggtgggggaagcagacag

SEQ ID NO: 32569 - DNA, 2300 bp, Homo sapien
cataagacctggtgataagattgttgtctttgtaaataagggcaagtttaagagatttcatatatgtttgccacaaggtcaagtttaagagatttcaaatgtttgccacatctgagattttaaaaaatacttccagtttaacataattttatgtacattcttccaaatactttttgcttttcctttcactatgtttaggtaaatttgagccacatttttgcctttcattcctaagaaacatatcaaaatatttgacccatcaaacatttattgaaatgtcagatgatcttttcaataaaaagagggtttcaagggctaaaattcaggaagttaatgtgccaaacttaaacatactgtgatctcaagaagtttagggttgcttcagaatgtaaaattaatcaatacaagatgggcctacaatttagaaaaacatatccctttttcctttaattctttttctgttactactattttgtgagaaaaacagcagaaatgttacagagtaaaatggacccgtttgcttttaaagttttgttttttgtttgtttgtttagtttgtaatttagaaccgtttgaaacaacgtttctcagagtgtgctctgtggaacagagggccctcaaaaggtacctcaccagaaaaagctgtcttgtcaactaaatggggaaagtactccgtcgtgtttcctctctgagaggctcacaatgtgtgtcaccatctggaggctctgcaagaatggagagtagtaaaagaagatttttcactttaacccagcattgtttgcttggcaagtagatctgttaatatccatggattgtatctggggaaataccaagtttttcatagttacttaacccttgaatatttatcctcctcagagcatggaagcaagcagtagaatgcgatcgttgatatatggactttaatttttttaattttatttatttatttatttattttgagatggagtcttgctctgtcacacaggctggagtacaatggcacggtctctgctcactgcaacctccgcctcccagcttcaagcaattctcctgcctcagcctcctgagtagctgggattacagatgtgttccaccacgcctggctaatttttgtatctttaggagagacagggtttcaccacgttggccaggctggtctcaaactcccgaccgcaggtgatccacctgcctcagcctcccaaagtgttgagattacaggcgtgagccaccacacctggccagatatatggactttagactcagacaacgtgggttcaaaccccagttctgctatttgccaggtgtgtgaccttgagcaatagcttaacctctctaaatgtcagtccatagctaagctgccagtaaatatgaagttcattgagatttttcttcctgagcttgtcattcagaaacaaaatgatagatttgcatggatgatggatttcccaacaggtcaattttcacatctggaatctactttaaacgtgctctaccacatcaaagtctaaggaagtcaatctcacttggaggcacactgcagagacaagtaggccttcttccttgtccctctgtcctttcagacttctccccctcttgttccctctctcttcttaagctttccagctccactactgctttggctaatttctttgggttccccctctctcattcacccagcaccagctgaactgatttaggtttacctggctatgctttccaaatctaattcgacaaatatttactgagtacctaggtggtccttgaatcaccctgagcacccaattccaggatatgacttcttcaaaggacagaattggaatgtttacataatatgagggaaaaaaaataaaagaaaacacttagcttctttagcaagctatctgataaaatagctgaaattcaagaagccctttagttaggagggagagattgcgaacacaacaggaagaagccccaggctgagtggcaaaggttgagattttctatcgtaagcacacctcacccaaacgcttgctccctgaaagctgctgacggagctttggcgagggctcatcctcccgttggctgataagcgaagccctgttttatatttaactcgctgcagtgcaggaggggtaggggtggagatgcgtcgtttataaggggagctgtgacaatcttcttgccagccctcttcctcccactcggctcctcttacggagtcctcattccaccccccttgtttccgcattcatcctgagtggctggtgggaacgtgaaaagggagaggaaaaggcgcaagaagccagagagaggggtgt

SEQ ID NO: 32570 - DNA, 2300 bp, Homo sapien
aagacttaagcaaattagagtcttatcagattaaaaaccactacaaatgtaagagcattgtcttcagtgaaacgctgtggggtctgagaaggagattctccgccaaatctccgggataaaatgcgtcatttaagcaccagataatgagcagaatgtaaattaatttaaccttctttaccaacaggctgctagtgtaatgtgtataatttagtgataagattgcaggacctaatatagctggatgtatgagcctcagctaatgcagacctgtcacatgaggatgtgttttactctgagcaggtgtctgtatgtgtggaatggggtaaagtggaataaaaggttaaaagcagaaatgctgatttaaagcttactatgaagaaattcctcccttgcagctaaattattcttaaagtgggatgatactggtgaagaaagactgaaaaacaattctcatgtgcgtctttggactgcaagtttaaaatggggaggagttgcagatagggtttgggggtggtcagggcaaaggagagacacataagttgcaaatatatttgtagtctgcttcatccactttgttccacatcgaataagtttcccaatcttgtgaacaaggacaaggagggagtgttttaaagatacttcatgctggcattgcaaatcattgactgtaatgtcaaacaaatacacattcagagatgataacactaactccatagtaaaacaatcgcccatgcagaaacccagaggagattagtttgtcctctccagctgacctatgctgggggacaaaaggactttcaaaaattattttgaatatgtttggatttctttctttaatttctttggaaattaaatttgcttggaaacagtgctataaagagttgatgtctccaaaggtgattttttttgttttatataaataaggttttgcttttgctagttgagcgcagttctaggcttttcgcccttagctcacacacaccccttctgcctgcttggactttaatggctcaagacagccttgagctcactgggaaaagaaaatgactgttaaaaattatccttgaaattggttatttggcaacattcttaattgtatggaaattcattaaggcatatttcatatataattagctcaaggttgttgattctacaggctttatggatttaaatctgattgataataaagtaaacaagagagtcgaatttaaagcgtggctctctcgggttaggacgagcttaatacagtgtacaaggaatttgaaagatctaggatatgtgtcttaatcaacgttaagtagaatggataagctttcagcattttgaaaacgctgggttagggtttctcttctattgtgtgttttctgtctggggactaataagcatcacagagaacgtgatctgaggcgactttttattcttgtataaatccagagtgaaccaccaaacagttgttcgtttaaagtcaaggtaattttcttttgacgggtccatttgcttctcgatttctaatttattagcctgccttttcagggctctgtcttctttgcaattaaagcttcttcagattagcgcagcattcacttgacaggctgtttggaaaatttaagatcggagaggtgatttgttgctgtttttcaaattttctagttttaagtaacgtgtctcctttttatatggggtgggggattggaaatggatgtagtgagacacaaagagtgggtgtcttgttgatccttgtacctttctcttcttgaccattccactctcttctcccaagccttcgactcctagcctcatctcttcacctttgggttcgtactaaaagccggatcgccttgggctgggcaggagctgaattcccgggagcttgcctgtgtagacccagtgcgcacggcgaggcagtagcccggccccgcactgctgataggtgcaggcaggacagtccctccaccgcggctcggggcgtcctgattggtgcggagccacgtcagtcgcacccggagaagggtctgggaggaggcggaggcggagagggctggggagggccgcggcggagtgacgtctcggcaccaggaagcccgcctctggttttaagatgttaggccaacagggaagcgcggagccgcagatctggtccgtcgctcgcctgggtgcctggagctgagctgcggcaaggcccggctcctgttcgaccgcccgaggggtgtgcgtgtgcgcgttgcggagggtgcgctcagagggccgcgtcgtggctgcagcggctgctgccgccgcaggggatctaatatcacctacct

SEQ ID NO: 32571 - DNA, 2300 bp, Homo sapien
gtcttttcagcgcaactcccttccctctccctgtgtctctccgcggatctctgaatctttctgtctttggttttctcattctcttccaacttttccatgagattgcctatcctcgccaccagctgaaggcaaggccgttctgctacgagcgcctcttaatctctacaaaatgaaaagaaaaaaagggaggattattagcccattactcagaggaatggggaggctgcaaaaatcgtcgatgggcagaggtgaagatgtctttctcggactgcactttccggtgtcctgtaactagagttcagttgtgggacttgttgaagaaatttgattttcttgcctcggcgagatttcaaaaaccagaaatagaaattctcagagtcagagaggaaatacaattaaacagcacgtgggcattttccccctcatttctctccccttaaataacactgctttgagtttccactgggtaaagagagaaagtttgagttttcacggatgttacgtggaggttagaaatggcttaaaatgtagatctctaatcagttttcttcgtggctgaagaggctaaccctttccataaaatgagtccatctgtcgactgttagctatttcaaagtgaagggatttagcactcaaaacaaattgagcaagtttgtttgcctgtttttactgctaactcaaatgaattcaaaacacggagtaattcaagaaaacacataacatgttccagacagcccccaaaagtagggaaagcccagcacctatatagtgactagggttagttttaagcgccaagcttttttaaacgtatctattttatgcacattctcccgagtcactatatatttctaaaattgcgagtattggtatattgatttaggaagagcaatacaacttttagagggaactttattctcaattagggaccaaagagatgtctttttaatagcgggcctgagttttgctctcaagcaggaattaatattggtgggaaaatccgaatccaggagcaatggctgtgttccggcactttccaaaaacatacattaacaggatgcccttgagattgaaaaaacattgtcccatatgcctggcagaagccttcacacctggtcctccaggcgaattatatttatagtccttccactcagaggcaggacagagccaaaatattctgctcactaccaaaatacacatctttgctcaagtcaagaaatcagaaaatcagggttcagaagtaaggcacacttttcgagtgagaatatgccctgtaatttcacatactctttgctttgcaggagcaaatgtggacttgagggaaactctctcccccacccccacttctatcccgtgcaatttaataccatcctcgccaggaaccttaacctcgtcattttaaaaaatgagatatccgtgacccagggtgaacttgttgaatgtaggtacagcagaggaaattctagactctatgagcgtctgagccttgtccagtgcaaacccttcgtgaacactgggtcagtgcgtggccgtgcccacctgtgcgccgacactctcagcatgcctggtccacccgccttgacctcgggcgcggtgtcccagctaagctgggcccagcgtcccggccttccccagctgacaagcctagctcgttcgctcccggctgtggccctcccaccctctcccactagctcactccattcttctagatttctcttcactcatcctctcccatccccaccgcgcccacctccactcccgccctctaccggtctctcactttcctccctccgcagtccctctttgctgtgacctctttcctcaactctgcaggcctgaaagaaggtcacacacgcacgctcacacccacactccacacgcctcgtcccaaacaaccccatgaacattgtcctttgttccgtctcttgggccactttccctgtcgcttcctcccagcccgtcctgatttgctccccaaaagtacgtttctgtctccccgctgccctggcgctccccctttgatttattagggctgccgggttggcgcagattgctttttcttctcttccatcccatcctcccttctggtcctcctttccacagtgggagtccgtgctcctgctcctcggttggctcctaagtgccccgccaggtcccctctcctttcgctctcccggctccggctcccgactcttcggcccgctggcatctgcttccctcccctgcctcgtttctcgtcgcccctgctcgctccccccggcgctcgcccgggcgctgtgctcgctcctggatcgccagccgcg

SEQ ID NO: 32572 - DNA, 2300 bp, Homo sapien
aagtgtgattgtcaatacaaaagtgtttagtacaatagctaaattaactaagcactctgtaaatattagtttttaccattattactaattcaaatgactagatgcattttgtgtataccaggtttcctgagttcactttgttctcaacaaatactattattcctagcatgtggcctatatcacacttcattagccagaggacatgtgaagcttagagtggaaagctagggcagcaggaagcattgccacactttacacagtcaaagccatttaaacatgtctgaatttgagctctgctgagtccttacttgcccccatctctcctgtgtgctccagcttactaataaagcaggtttaatataaatacactaaaagcctaaacattgagatcatgataatgaatatgagggctatgactataaaatatcattgaaccagagacctgctacgaaaccacatggtgaagaccacaagggaggaatctgcatacacaccgagtgccttgggatcccaaagtgggaagagtcagtgccccaattaaagagaaactcggggtagggaatcaaccacaacatcagtcaccttactgaacccaggcttgtttcagctgacgtagctgccaatttccaatgtcccctccctccctaattgctctcaatctattcctccagaaactgaaagcccatcaaagaggatatcttcccagagagttgttccagttactacaagctcttgctagaaattccaagaaagtttacaaggtacctttataaggtggcattgagtaagtcagaagcattccaagtaccaattatcatgcaaataagggctttacttttagattttgttgtttgtggtggtggtgatgctggtgttctctctggaatccagcccaatctccaaaaaagtaaaaggagtacaaatagtaatacaaattattattacttacaccaattaaaatagaagttttgaatgagcaaggagctagaggaggtaaaaactgggaacttcgtatattaaaaggtttttataatttgaaaactaagattatgctggccaaataggctgttttaaaatcagcatagtaatcaaatttgcttgtaatgaatgtagacccaaacagtgatgtcagacctgataaggacttgcaaaccctaaaagagtgcaaaaagaccatagaagaacaatattatattcctgcacttacagaaatggtcagctcaagagatgtatccagttcagggtggctgtaagcttcattttctgaacttgctaccagaagttaaaagaaattctgtataactgcttttgatggaaacacaaattggttgatgtaaatgaaatacataaagcagttggtgtcttattcattcccacaattataaatgaaattaaatgatcaaaaattatagactttggggatcttcttttcactgaggagcccatggaatttgtcttctctagtaccaataactgtgttgacctattttttcctgtctaactctgtatatattaaaactaggtggttacgaacaaaacccagaaatacaatttacattctaataaaatgactttaaaattattccactttttactgtggctttacctgttgtcccacaatgcaggtttctctgggcctctgcttagaatgactctgtcaatgtagatgacagccagagttgaatggggaatccagaaactggggattcgggctcttgatgcaatctatatgccaatctacttcattagttcttcttttatttacagtttggtaaagaatatgggtggagctgttctgggctcacttgcacacatgtccaaactgctttgaaaaaggaagggcaagaaagagtggtatccaagttggaatcaggcaggcatttcagatcaagagacgaactggaaagggaacatctgttagataccctgggtttgaaggcagtctgtgtaagttttcatatctctgagtgtgtgcacacagtggagagggtggagcctgccatcctcaaatctgaaaagattgagagatttcagagggcccagatgtgccaaaggtcagagggatcaatatacaggccctaccacggaaaggcggggaaaaggttcgaatagaaaactgctgcagaagggaagccactgagaggtaagggagtttctgaataattaaaaagttaagaataagcaaaaggaaggaggtcgggtgggggataaaaaaaagcagttgatgtggtaattaagaatttggtgggagcctgggcaggtcacctcctttctcagatcagagccccatcagaaattct

SEQ ID NO: 32573 - DNA, 2300 bp, Homo sapien
attcagtttttatttgcttaaaatatctttatatcccacttcatttttgtaggatatttacctggtcatagtattctaggttggtagttattttcttttaaccctttcaatattgccttctggcttatattatttgttaagaagacagatgcaagtcttaaaattatttatttaaagttaataatttttctccaacttaaaaaaatgtttctctctgttctggattttcagcagtttgactatgatgtgcttgtgtgtgtgtgtgtatgtgtgtgtacatgtgtgtgtgtgtgtgtacgtgtctctgtgtgtgtgtgtgtattggttttttggtttttgtatcctttttggggtttgctgagatttttgaatctgtgtgtttgtgctttcatcagtttggggacacaccaagccattatcaaatatggttcttcccaattttctctctcctgttttggttactcacattaaacatatattagatttctttactatgtgccacatcttttaggctatgttttatatttcctgtgtttttggtgtgttttaattttaatactgtgtgttgacctgtattaacgttcatcaatcctatcttctgctgtgccccacatgctgttaaactcattcactgtgttctgaatttcagatgttgtattttcagatctgctgtaatgagaaaacagtatgcctgaaaatgcagccaatagaaagaaataataaaatgtagagatgtagaaatactgggaatcatgacattacttgagtctctggacccagtgctgcttgaagctagtactatccgtgatctttccaattacataagtcagtaaatcttgtttttgttagttggaattcagcttccaattacttgaaactcaaataatccttacaagtataaatcaccaagttggcattcactatatgccagtttgtcatccagaggtccagaacggtccccagcacaacagcctctgccccatggaattgagtgtgccacctttctggcatgtggatatggtgaccaattcagaagccccccaaactccaccatgcaaagatttctatggaggttttattatttaggcatgataaatgaaatcacaagccattgaggactgaactcaatctccagccactctcacctccctggagttagggagacaaagctgaaagttctaactataatcatgtggttagtttttcttgtgaccagccctcatcctcaccatcggtcatctcactagcatacaaaagataataaattccaagggttttagaactccataccaggaaccaataatagaaaacaattatttatttttattatatacaataagaaatgaaaattttgatatgtagattcaatgaaatcccaatcaaaatcccaatacattattttgcagatatcaaccaactgattctaaagtttatatggagaggcacccagagtagtcaacataatactgaagaagaacaaagttgtatgactgatattaccagacttcaggacttactataacatacctacagtagtccagacactgtggtgttggtaaaagaatagacaaatagatcagtggaacataatagagaactcagatacagaatcacataaatacagtcaactgatctttggaaaagcagcaaaggcagtacaataaagcaaaatagtcttttcaacaaacggtgctggatacttacatgcaaaaacactgaatctagacacaggtattattcccttcacaaaaataaacttaaaatgattaatagagctaaatgtaaaatacaagaatataaaactcctagaaaatgaagtgggtgaaaatcaaatgaccttgggtatgatgatgacattttagatataatgccaagggtatgatccatgaaaaaaataattgataagctgaacttcataaaaaaaaaaaaaaacttctgctctgtgaaagacaatgtcaagaagataagacaaaccaaagactgggagaaaatattttcaaaagacacatctgctaaaggactgttatccaaaatatataaagaactcttaaaactcaacaataagggaggagccaagatggccgaataggaacagctccggtctacagctcccagcgtgagcgacgcagaagacaggtgatttctgcatttccatctgaggtaccgggttcatctcactagggagtgccagacagtggccgcaggtcagtgggtgcgcacaccgtgcacgagccgaagcagggcgaggcattgcctcacctgggaagcgcaaggggtcagggagttccctttccgagtca

SEQ ID NO: 32574 - DNA, 2300 bp, Homo sapien
tcaccaggctggagtgtagtggcgtgatcttggctcactgcaacctctgcctcccgggttcaactgattctcctgcctcagcctccctagtagctgggactacaggcatgtgccaccacacccagctagtttttgtatttgtagtagagatggggtttcaccatgttggccaggatggtctccatctcttgaccttgtgattcgcctgcctcggcctcccaaagtgctgggattacaggcgtgagccaccacgcccagccaaaaaaaaaaaaagttggtttttataagaaacactactaatagccaaaccaaaattccaagaatgaaaatgttgccttcaggggaaaaaaaatgaggcccatcagaaaggctactgggttcccatggtgatatttgtttctgattgtatgtatataatattaaatactcttttctggagttttaaagacttttaagaaagggaatgaaccagattcattttctttctaatttttgatatccaacggcatattttctggcccctagagagattgtttgtggaggagagacaatcagagagggcatgtgtgagaaaccatgtgtgagagatggtgtgtgcgcgaggttgtatatgtgtgagagagactgtatgtatgtgaaatcatgtgtgtatgagagagattgtgtgtatgagagattgtgggtgtgtgagaaagactgagaatctcctgactacaaaaaacaggaaacttctttaaaataagcctatgagattctgcctattttaattccttctctgggcctgaaaacattttaatagaagatcccaaataactcttactcttctccatgtgtacacatgtttactttccatatttacttttctgtattttacctgtacaataacccatcgttttcccaatgtacagataaggcatacacagaaaaaaaagtgatattttatttaaacacccttccattttccttgaataaaatggatggagtagtacaaaaaataattatcaattggatatattcccctcaccacccactgagaaagacatattcttacccagttacagaaagatacatcatttgatacaccatcaaacgacccaaggctccaacaaacaacacacactaggaagcactcaacagaaagggacaaatacacagaccttcagtgagacactaggaaaggaggctaaaggaacaagagggacagtgaaatgtgtcttccttgaaaaggacgggcagatactcaggcaagaacaggggtactctgctggagagtgtaactgggtgcatgtgtgtgtttctctctcacatacaaacccacacacactaatctcttatacaaatgcgctctctcttaaatatatgcactggctctctcacacaagtaatttctctttcacacttgatctctctcagtttctgttgttccctcatacaatctctctctcacagtctcttgcatacacatacaatctcaatctctctctctctctctctctctctctctttcccccccccctcctctctctctctctctctctctctgaaacggggtctggttctgtcgcccacgctggagtgcagtggtgtgatctctgctcactgcagcctcgacttcccgcgctgagacgatcctcccacctcagcctcctgagtagctgggaccacactgccgccaccacgcccgcctaattctatttttagtagagatggggttgcccaggctggtctccaactcctgggctcaagctatctgcccgcctcggcctcccaaagtgcatacaatctcttatacgcagtttcttttatatagaatctctctcacacacacacacaaatcacgctcagcgtctctctcacactctctaacggtctcttacgcacacacaatatccctcatacatacacacagcctctctcatgtacaatctccctcatgcagtgtatgtccatagtttttcacacaacacccttcttctctcagtctgtcggcctctctctcaatctcacacacacacccccgccccccaacacaccgttggccccgccccctgtcttggcccctcccctgtacggctccgccccgacggccgggggttgggcgagccagtgacaggaggggccgggctggtacttcaggcgcccaggccggcggggcgcgctccggcggctcctgtcagcggcgggtgcggcggatcccagggcagccttcgggcggcggcgctgcctggtgcgtcgcggcgtggtcctccggcggctgtccggggcggtaggagttggctgcgggatgtgctcagccgggg

SEQ ID NO: 32575 - DNA, 2300 bp, Homo sapien
ctgatttttcacacattattcagcaagcatttttccatattgttttaaaaaatatatttattatgtctatataacaagaatacaccagcaaatttaatcatccttcaatttttgagcatttagtttgtttctggctcttggtatttccaaataatttctcagaatgagtttcattatctgcagcagtttagaatagtaccatttcattgtatccttgcaaatactgaatatttctaactgtaaagctttgttaacttgacaagtgaatcaatacaaatgactaaaacatgcattttaatttgcattattttgcttagtgaagtttttaaatgtcttattcatttgtattgcttctgaggatcattcatatccttaactgagagaacagatttactataaaaaaattatttttaagtgagattcagttttaataacggtttatagaatgtctataggaagtgctgtcaagtctatagctgcatttttttaatcaaactttttatattgagacaattgtgtcacatgcagttttaagaaataatatacagatgaccgtgtatatctttaatctagtttcccccagtggtgacatgttacaaaactattgcaatatcacaaccagaatactgacattaatatagacaagatgcaggatttccattccctgacccatggcaatcaattattctgttgtccacttacataaatttatcaattctgagatgttacataatggaattacacagtatataagcatttgagattggctttttctttaaccataatttcctacagattcatttcagggtgtgttcatcaatactgtgttcctatttgttactaaatattccataggatagatgtaccagtttctgtaaacatttatagttgaattttaatgattatttcattaatacatttgtctaatttcaggggttggaaggagaaaagaaaatgctttcactaggaagtcattcggtcatcccaacattcactgaaagcaaaccattgggacaaatgttatcctatgcttctgattacaaaacaactaaaacccaaataaaataaacattagtaagtagcagtgctaagattgaaaccagatacgtatttaaagaagcaagaaaatgagttcagagaacattttatcatcaataaaaactttctaaaatgtaacaatttttctaggtttaattaaacaggctaaaaacttgatgtgtccagtccatgagagcatcctcctatccactggacgaggtgtctactaaaccacatcttatatctattgtgaggccaactgtcttgaggccaaacaagacgcgaattatatggtagcacttgagagggctgcggacacattagagcagctttctcttcccatctacagcagttctgggcagcatgcttggaatggcaacgctgacgtccccgaaaaaccccagccctcttgccaatttcctctgaaccccaactacccaacccaaaattatgtgaagatctgattttcaaacaaaacgaggacaataatgcaccattattacgtttccctaaaacattaacagtatggaaattaagacacaaaccagagaccggaaaaaaatcttggtgcgttcaaagtaacctcaatcagttcccgagtctattttccgcttatggtgcagtattaacaaaaactaagcacaccgtgcagagaaacgccccttcgcacttatgacttccggcctgggactctggctcctcacacgcctttgatacaaagttcgaaggctgagccttagccatgccacgcccagcgtgctccggacgaggatgcccgaaactgcaatgagagagggaaatttcctagtcaggtcaaggtccaacaaaacaaacgtccgcacgcaggaattgaaccgtctcgcaggcagaggcggctgaaccaggagcgagcggaagtgacgcacaggccggtcgccagagaaggcggggcaccgaggtagcgcgcccaattggggcgcgggagaggccgggggtgtggcagcgttggcggcgagcaggggcctgggcgcgctgggggcggggccagggtgctcggctcgcggggactggcctccttcggcagctggaggcggtcactcacgctgggctaggagctgaggcgagaagggccatgcggacggcgagggagtccagagccttgagcccggtgctcctccctcgcgcagcggtggctctgcggccgctggagtaaacactgcctttgttccctagcgcctcgtctttcgtcgccccgtgccctcacgccgccgggctctggccgg

SEQ ID NO: 32576 - DNA, 2300 bp, Homo sapien
aacaaaactaaagtccacagacacatcatgtagtccaaagtcaaatataaagttttttgcttatccatttagaatgtaagtactgctccctcaccaaccaactttcttggagttagaatttaacgccctgtaacacaactacaaataatagtaaaagccaaagattgtgtggcatctagttattgggcaagcctacttaagcagcttgaccttgtaagtttcattcacacacaaaaattataaatacttaaaccagatgatcctggatgacaagataaaacaactgtcatgtcccactcaagagtaataactcataaattagggaaatcgaaatattacactaggcacaaactgcaaatccttgcccttccattctagggatacttagtgtaaaaccttagctattttgtatcagagaggtgacacaatgcctaattaatgaatgagaatcctatattttataagatctccattaccaaagattcaaattatgatcatttactgcaatttatttatgttgaacatcttattacccaataatgttagttaaatggaacagattatgaaaaattagcaatctgtttcagaaagtgcaaaacagtcttagtccttacacaaactggcttggttcagattttcaattctaggtttgaattccggagggacatttaataacaacaaagccaaccccaaaggaatttgctctaattttttcaatatatatgaaataaaaaaacacaaaaacggaattatgaaattactattctgtggatggtgcatatacaaaacctaagcaatatcccaggtttactcaagagaagtgaagttcagaaggactgcaatttacctaatgttacaggacgtttgagtagcaatcagggcaaggaattcctctcgaaatttcaaaaacttaatacgaaaaaattacacattgtccctgtagttatgagcaccaagaatctgaatgcccattgggaactctgcaattcagcaagtctttgtagctaccagagttcatcagtatctggaaccttattttactccagcatccaaatgacttctacttaaaatcaatctgaggcattaactccggagccagatcccacctgctctgccagggctaaagagagggtcagatacagggatactagctttggcgttaaacctaagctcagcgcagggtgtgtccaggttgccgtggagccggtcctacagcccattagcgcgaagctaccccttgtttcctggagatgatgtctcccgtgactccttccccgcgtgacagggcgccctggcaggagggacaccccgccccctcttctacctctttccgaggaggccccaagaccggaccccagactgggcctccaagacgaccaccagtctgacgtctgctaagcagtgagtgtagcagggctctcgaccgccacctccagccgccgggggacggtgaaagggattccccgccgggggccgaagaggaggagccacgggggccgggcccctcccccagcgggcttaccctccgccgccgcctactcgctgcagccgccccgcttccttgcgaagcagtccgaagcactgcgtccagcagcagttccccatcgcatgccgcccaggcgccgccgctcctcctcctcctcccgctcaatgcccaaacccaggcccggcagctgcatccgcacggcacgagccgaaatggggttcaaggaccgagggcgggccggccagagcccggcggcgtgagggcacggggcgacgaaagacgaggcgctagggaacaaaggcagtgtttactccagcggccgcagagccaccgctgcgcgagggaggagcaccgggctcaaggctctggactccctcgccgtccgcatggcccttctcgcctcagctcctagcccagcgtgagtgaccgcctccagctgccgaaggaggccagtccccgcgagccgagcaccctggccccgcccccagcgcgcccaggcccctgctcgccgccaacgctgccacacccccggcctctcccgcgccccaattgggcgcgctacctcggtgccccgccttctctggcgaccggcctgtgcgtcacttccgctcgctcctggttcagccgcctctgcctgcgagacggttcaattcctgcgtgcggacgtttgttttgttggaccttgacctgactaggaaatttccctctctcattgcagtttcgggcatcctcgtccggagcacgctgggcgtggcatggctaaggctcagccttcgaactttgtatcaaaggcgtgtgaggagccagagtccca

SEQ ID NO: 32577 - DNA, 2300 bp, Homo sapien
aatcagatagcacgtcttatcttccacctgctctcatgttcatcagctgagagaaggtaccctgactgtcacttctagagaagaaataataaatgttgatgattaacaaaattgcagcccttacgggaatctgcctcacttgtaaatgtacccttctttccccacagtcactgtacttgattatacctagctctgacacagttcaaaacttaaccgcacccatagcacctctttatcaggtggacatcagtgtcattttattgccagtgaaactgatccacaaacaagcaactctcctgaactcaaggacagaagacagacaaggggcttccactcatttccatcatcagaatttggtttcccatgcgaagaagtaggccgctgtgatctcagccaagccaagttttgtcctccttcctctatctatcctcagtcttctttctccttctatggcaagggtccccaacctctgggccatggactggcagtggtccatggactgttaggaacccagcggcaaagcaggaggtgtgctcagggccagcaagcgaagcttcatctgtatttacagctgctaaccgtcacctgtgttactgcctgagctctgtttcctgtcagatcactggggcattagattcttataggagcaggaaccctgcacatgggagggatctaggttgcccgcttcttatgagaatctaatgcctgatgatctgtcactgtctcccatcacccccaaatgtgtccgtctagttgcatgaaaacaagctcaggacttccactgattcgacattatggtgagttgtataattatctcattatatattacaatgcaataataatagaaataaagtgcacaataaatgaaatgggcttgaatcatcctgaaaccatctcccgtggccccaaccccagtctgtggaaaaagtcttccatgacactggttcccaacagggattgctggtctctacagtgtctatcctctctctctctttttctttaaacagagtctcactctgttgcccagactggcgtgcaatggcgccatcccggcctcactgcaacctctgcctcccggattcaagtgattctcctgcctcagcctcccgagtagttgggattacaggcacccaccaccaagcccaactaacttttgtatttttagtagagatggaatttcgtcatgttggccaggctggtctcaaactcctggcctcgtgatccgcccacctcggcctcccaaagtgctgggattacaggtttgagccacggcacccgggtctatcctctcttgacacctactctccttaggttcttcacacttaggtgattccaaatcttttcactgaggcagaaaggtagcattaccttcttctaagctataaaggactcctgagaggtgtttcccatttcatcatgtaccagcttttacttgtggactctggatgtccattacgatgcaagcggcaggagagaaagcgactggactgctctgctgggtgtaaggcgagggcaacctggagcaagttcaaatcccgcctctgcgggaggcagaggttgcagtgagccgagatggcgccactgcactccagcatgggcgacacggtgagactcgtctcaaaaaaagaaaaaaagaaaaaaaaaattccacttctgctcgccacactccaccattctctgagcctcggtttactcatgtgtaagggggactgcgatgattagaggagctcgtgcatgccacgcactggcttgcttggtatccttggagtcaccgaaagattagttcagctccccgcctgcccacgccctggggcaacactcattttggggaaaagtcctccttaatgctgaagtgatccagttcccttcttttctctagctcgccaatcgggctggaggagaggccactcgtttgggaaggcgcggtccgggtcggtgtaccgcgcaccaaaccctgccagagaactgagagaggcggccagggggctgggtacctggtgagaaaggcgccagctgccgggtcacctcgagaggaaggaaggggcgggagcgcgagtggagcgggcggagcctgaaaacctccgcgccaccgctgcgctctttacaaaggccccgggcgcgagaggacgtgctctgccagccagtgggaaggcaggccgcgcgcgcgggagcgcgggaggatcggcggctcgcggtcactggtccctggctcggttccccgcaccccggggctcacacttacccgcgcggaggagcagcggccgggtgtccacccccatcctgcgcccagtctcctcgat

SEQ ID NO: 32578 - DNA, 2300 bp, Homo sapien
gcagtgagctgtgattgtgccactgcattccagcccaggtgacagccctatctcaaaaaagtttaaaatttaaaaaatttaaaaataaagacacatgtacaaatcttttttaacaattggaaattttatatcattcctgtatttccgtaaccttctgtttcatttcacttcatccatagaagtttatcctagtataaaacagtttatatacttgaaagtttttgtcatatttctttacagtaaaaatatgtaggccgggtgcagtggctcaagcctgtaatcccagcactttgggaagcgaaggcaggcagatcaccagaggtcaggagttcgagaccagcctggccgatatggtgaaaccctgtctctactaaaatacaaaaattagctgggcgtggtggcgggtgcctgtagtcccagttacttgggaagctgaggcaggagaatcgcttgaacccaggaggcagaggttgcagtgaacagagatcatgccactgcactccagcctgggcaacatgtctctcaaaaaaagtatatattgaaattaaacctttctggctgggtgtggtggctcacacctgtaatcccagtgctttgggaggccgaggcagacagacctgaggtcaggagttcgagaccagcctggccaacatggtgaagccccacctctactaaaaatacaaaaaattagctgggcgtgctggcaggcacctgtaatcccagctactcggaaggctgaggcaggagaatcgtttgaacccaggaggcagaggctgcagcgagccgagattgtgccactgcaccccagcctgggcaacaagagcgaaactccatctcaaaaaaaaaaaaaaaaatagaaaagaaaaaagaaattaaacatttctgttttctgtgaccatagactctaagtattaaactttcttaaagattgaattgtacaagtattgattcataattgatgaagaagacaaaaataaaatggtacgttttgatgaatattaagtgataaaatttattcaagtgtcacttctccataagatttctggagttttaaaaaattaattcacagctgaatgttacttatagttggaataaaacaacattccacaaaaatatacacatggaagaggagaggaactgtgtttacataaataaatagagatagaattttgttatagcaatgccatttggttatttaaacttctaaggtcatatattaaacattacatagcgatctatcacacaaaaaaaatgtgttttaagtgatcgagcaactgactattcaactatttcctcctattttgttgtaaacaattgacttgccaaagcatttatgacccagcttttggagtccttcactctctcagtttctaggaagtataccaaaggctttaccaaaatgtatcaaatgactattaataaaacctattattccttcactctagaggaaacttctttaacccagcaggctcaaaaaggattgagaaaattaaaatattgtttatgtcaataacttttccaataaaatatattttgacatttagaaatcttaggtacttttgatttttttgtcaaaatttcgagttgcagatttcagttgttccatggaaggacaatgtccactgtgtaactcaataagacacttttcactgtcaaactagtcagcctaatcagatattctatccaaaaagtcctaactttattttccagttcagcaatatatgtgtctctgtgataacaagctcacttctaagacagagcacagaatgaagccttaatgtgcatctgtcttttgctaacagatttcaacaatgtcatattcattgtttcttactgacattctctcttcttggctctaagaggactctccattcttagtctaaataataagtttttcttgcactttcattaggagaaggaacttttctgtagtaatacagctcccagaatacctttcaccgaagcaattcctaaaggggtgtgtcttatggtgcaagattgctgaaagtcccggaattgaattacacaaccatattctgagacagtcacaggattggttgtttttttttttttaattcctacttcctgaaactgaagccgtttatgagaaacagtgtgtttcagagaggctgtaccagaattaactctgctcagagttagatttgctggtcttaaagtacttttcctctttaagataaaagtgagtatcatcctttaaatgacaaaacgcagtagatggcataatatatgaggaagtatttgtcttaagtgttgactcagtttccatctgctgatcttgt

SEQ ID NO: 32579 - DNA, 2300 bp, Homo sapien
cttactctagatgagggtttggcttaagggagtgttgtggctggtttaattctctatccattaaaattttctccatatcagcaataaggctgtttcactttcttaccacctgtgtgttctctggagtagcacttttccttttcttcaagaaatttttttttttttttgcattcacaacttggctgtttgtcacaagaggcctatcttttggcctatcttgactttcaacatgcctttctctctcagcttaacattactagctgttgacttaaagtgtgagatgtgtgactcttcctttcacttgaacacatagaggctgctgtagggttattaagtgacctaattttaatatttttgtgtctcagggaatagggaagcctgaggagaggaaaagatagtaagaaatgactggtcagtggagcagtcagaagacacacaatatttatggattaactttgctggctcccagacagtttgtggtgccccaaaataattacaataataacaccaaagatcactgatctcagatcaccataacagatataataataatgaaaaatttgaaacattccaagaattaccaaaaagtggcacagagacaccgacggttagacttgctcttagtgactaattcctcagtatctcacttaagtgaatgccctttcaagtaacacaaattttgtatttgagcactctgcttgtgttcttcatcaacaaatacattagtattttaaatgaaacaagcctgtaataaccccaagctttgccttggcagttctagctctgtaatgtatgtgtgtaatgtgtgtgtgtgtgtgtttaaacacaaagtatatggagatacgaagtatacctgccaagttagtatgaaaaacacaaaatttagattacacagttagctcagctttcattttctgctcctgctaagtcacagaatagaaaatgagagagggaaaaaggctttcttgctatttcaaattcaaaaccaacttcttaaagttagttaagaaaccattggctagtagagcacatttaatcccaacaccaacacaataattcactgctttaatattttcaatggttacttcattgcatgcataagctcagagacagaataactagagccatccatatatctgttactttcttccctttcagactctcttgcttttggtaataaaattctacatgccctccaggagtgtctaaacctgacagcagctccactatctattctggcaatgtctaacttcctgtctttcatttacaatataatactttaacaaaagaaagatagacaaaaagatttgttaattgaataatgtttttctatgaatttgtcaggcatttttttttgcgctgttagtaagttatttcattcttgaaattaccttgacggcagtagctcattaatcacactaatatttgcataagaaatctctcaattgtatatacgttaaatgacaatataagtagatccatatgacagatccatccgtttgatggatttgggaaattgggttttctaggatatcagttctctattttacttggtaatgttcctggcagtgaagagctttaaatttggcatttgtcattgcctatcttggtccaaattatatcatgctaaatattatgaagaatactgcacaggggaaatcagcagtgggttattaccgtgtactagtgtctaatattagaactgctagccagatgcttcctgtggacttctagagagcagagagtgtggtgccactgagctccagaggcactgatgtgaagtacgcagaagataaatcatgcagtatattcatttcatttggcccatgtaactccactgacgtcactgtggatagataactggggtctgtaccaggcccctctcgcttctgcactctgaggccttcggaggtgctgcccatctagccaggccctgcagtaatttcacacactcctctaataaagtcctcgggggctgtcatgtattttcctctgtttgccctattatccctccctgcttgagtctcacagataattgatgatgcttcagttaatcatctttccctctcttttgttcaccaggtacttcggccttcaaggggctcctttattgagaatcaatgtcttctcctaggtaattgatcaccctagacccagggacacccaattcatcgtaatcatcatgaataatcaaaaagtggtagctgtgctactgcaagagtgcaagcaagtgctggatcagctcttgttggaagcgccagatgtgtcggaagaggacaagagcgaggaccagcgctgca

SEQ ID NO: 32580 - DNA, 2300 bp, Homo sapien
ggagatagggggtgataatttcagtgtgatacctgtaagccatcctcggtaatcagtgtgaatcattcattggcatagcccatgtgatatcccctcaatgccaaacagtccttccccaccagaaaacttccttccatttgcccagttcataaatggttctaaatggctcataaaaagggatcacagaccaagttagattttctctctccttttttcttttgttctttctgtcatatctcttttgctgtatttaacatgtttcacatagatactagatgaaccatgtcttttttatagatgatataaaaatattttcaaagggccagctagaagatgaaccttgtcttttaatcatactggtctttcacccatcatgatgtgacttataaaaatgatgagacatgatgcttgtcttcagggagatagcagtccagtgagagacagaaatagttacagagcagtgggatgatggctgaaaagagcctgctcccttgggtttggaagtgctcagagcaggcgctcaattccactgtgaggtcacggtggattgaggagaagtggcaatgtttgcattgagtgctgaagccagtgggcctgaatttggtcacaaggcactgggggaagtcaatccaaagagccggaacgggatttgccaaaccactgaagatttttattcagggcaatggactggtccatcttgtttttagaaaaacgaggcttgacaatgtgcaagagggactggacggagcaagattcagacaataattcaggcaagaattactgccaaggaagaggagaaaatggattttaggagccacaggatttgacaaccaattaggtttggggaagaagagagaacacaaagtctagactgactcctgggtttcagattcggggaacttagtaaatggtggtgccagtcattaaagtagagatttataagggaaaacagatttagaaaaaagtgatgagttcagttttggatgttgagcatgagaggcttgcaagacaagtacctagagatttatagctggcagtcatatatacaggtcctttatttatatggcagtcatatgtacgggtccatatatatataatcctttattcagaaccctggcatcacatgtgtacttcagaattcagaatttttctagtgttaggagggtcttctggtgcatgtactgtacatcacattcatgcttcagtagcaggtggagtgcagtcaaacacaaaaaattttgcagcaaaacatttgagcaatctcactgagtccttaaccaggactataaatagcctctagttaattcaattctgtttcgggtgccaaacttaagaaaaatttccagttgctaaagctgcttgtgtttccaaagtttgtataggagattatagaccattataagtagacttggtacccattaagagatttaatacatctactaatgtgaaacagggccatttcacaattaatttacaccatttcaaatctgatatgtgtttttcgtagttattttctgtattcaaatgtagtccatatcgaagggatgagaaagtgaagtcttagagaagcaaaaagaggttgtacaaattaacactgcatcatccacctgccacaagcccagaatgccattccatttcagtccctttctcattttacagggaaaataatatttccttcattcctttctctgattcttcatgcagagatagtcactaaagtgctttacttcctgctaaaaacctttcttaatgcctgactaccccaatttacctgtagggcaaagtcggccagggccacccctgacagatagctcctcactgttattctttgagtcagaaccaacagcttagaccagccagcaagaggcagggaaaaggtttttctctttttttttttttttttttttgccactgaggtgcttcatcataacattggtagctcaacagccttttctttgactgcaatttccttacctgaactctgaccttttcagctttactccccagcgagttaaggaccctgatccaggaggcaaaggaaatgaagtggcccttcgtgcctgaaaagtggcagtacaaacaagccgtgggcccagaggacaaaacaaacctgaaggatgtgattggcgccgggttgcagcagttactggtaggaagagccacaccacctgttcctctgatatccccaagtgaggcatttagactctaagtggtctaatagattaaatttctttgaagcacaagacagccccctacccttatgctcagctctgccagattgactaatgtgagggaaatag

SEQ ID NO: 32581 - DNA, 2300 bp, Homo sapien
gatggtttatttgacgaactcagtcgaagttttgagcatggcaattttagttaggctttttctggttggaaggaacagaagctcaatcaagtaaacacataaaaggggatgtgtattattttgaaaatacatgtggcatactaaatgagacatgtaattcctagaatggcactcatgaaaacatggacttgccttcagagccattcttggatcttcccttgtgttgcccataaacatggcttggctatactctactttcttcctatccttcaacaacaggcaaattctttctatattttttagttcagattgatacgttggttttttaaagcctggccacagaatcatgaggggtcaggttatcaggtagctactctcaatccagtggccttgatctggtcgtggggtggagaaaaaagggtgtcaaggccaagtagcaaaatacacagctacctcaaagacaggggctgtgggcacagcagtttccctagaaagggttatggtgtgccttagaaaggcagttattcatgtcagggtctttgggaggatctgatcaatagtacctctcttcctctcctggattctgagcaaatggagaaataagacaaaagaggcaaacaagagatgaaatattccccttaattctaatacagggtaagttagaagatatagctttgtattagacgtagggaatctgctagtggaaccccaaaattatatagacgtccccatttagtcacaggaattacagggtcaagcagaatactccatgtagggcggcttactagacaagacttatgatatagagaagtaacgacaaattgccgtttcctttagacagcttgttcccaagagaaaaaaggaagaagagaagtcatacatgcccactttattcttctaaaatttaccagtcagattagtcactccacccctcatgaagtagagtggggaaagtgatagaaagaggccgaggacgctacggtcattgagcttccgtcacatggaaggaaacatcgagaggagagaagagatattctccccaacagttggcaattctatcacaatgacagcaatgatagactcagaccaaaaagataaatagagtaaaaaattttatacttaataaacacattggcagtttaaaaatcttaacatgttaagtaagcatcagttttaaaaaagaaagattattgtgctggtatttggcaggcattacctgattgatgaaagcctgtaaatacaaatatcctgtaaccaattatgcatatggtatttattaacataatagtaaatatcagataattgactcaaaggggaccctctgcagatctctgaacttgctttgtgcaactctcttcttctggtactctgccctgttaactccctacctgggcctctccagactcccagcagctccatccggtttcctaacatagagtcaggacaacaagggagcatgtaggatctggatttggacctcctgtgttcaaaccccagctcttagtcatgtgaccttggcatatcacttcacctctctgcatctcaggtttcccatcttacagaagagaataataatagaacgtgcctcttaggattgctaggagaacttattgaattagtgcatataaatcacctagcactgtgcctggcacctggttttgcccagtaagtgttagtacttaggattatgtggtgatgaaagcagtactttgtgtagcaacattgtggtaggaaaatgggcaatacttacaatgctttctaggcttcatgcatgaataaacatgcccagaaagcactcagcatgatttagtttagcataggaagataatagtatttgggtgataaactcatttatgctactagctacgtaaccactaaatcaaaggtctttagtataacaccctagcagagcaaaagatgatgatgttttttcataaaaatttgattatttatttctacttctcgctctttatgttacactttcatttcatgccggttttcttctttttcttattttattcattaactaaacatgatgatataaatcaaatatggactgttatctaaaattctgtatttcttcctaattaaaatgtaggcaataaatgaagcagagtgtcatgaactaatgtggaagttctcccagatgatgatgattgaaagaagaaaacagcagaacaatatgtttagtgtgacgtcatttacgtatgagagagaaagagataggaagggtaggagaaggcaaagcaagacaacgatcaattaatgtctaaatataaataaaaggataggcgttctgg

SEQ ID NO: 32582 - DNA, 2300 bp, Homo sapien
attctatggggacatggtttgacctagttaaatatcatctttctattgggcagagactttttacacctgtctacctaagcggtttcttgccagccaattggttggtcaagtgcatcctcatcttgtattcatgattctgtaacaaaatgccatcaactgggtagcatatgaacaacagaaatttattcctcataattctggagcctggaagtccaggatgaaggtactgctttctggttcattgacagcgccttttctctgtgtcctcacatagtggaagggggaagggtttctctgggatctcttttatgagggcactcatcccatctatgaggaatctacccctcaggacctaatcacctcccaaagtctccagctcccaacaccatcaccttgtgggttagaacttcaacatgtgaatttaggggggataaaaacttccagactacagtacccctactgttgcaatcagcagctacttcttgcttaaggaacagcccaatgtcactgcccaaagcgggaagcctgggctggagccacctagtagtcaatgtctaacacagcttaaaagtggtagagaagctgggaggaagacagaaggagattcttctcttagcccaggaatcacatcaaaatgccctcctactatacagaaaaatgatttgaatgattaaaaaaacaaaaagattgtgaagcacttcccagaagagataaactacatggatcactaagcactggctattaaatagtagttctcaaccctggcgccacatgagactcttctggggagcttttaaaaacttccaatgcctcaccccagagatttccatctaatgggtctggagtgcggacccagggatcattatttcttatcacctctctggtgattctgcttaaagccactgttaagagcttctgcttcaaagtattccaatgttttgcctgccaccttgaagtccgactaaaatacaaatcacattgttaccaaaaaaaagcaaaaatttccagcaatagggttttcttactaactgtgagattctgcaattttggaatcacatttattacaatgaggtaactgctttcttcttatttgttatcgtttgctaatttatggatgaaatacattagaggaagcaaggcccaaaatggcagaaacagaacaatgattcccttcctcttttcttctctcaatttatcacccgtcctgtgtgtggacagacaactcaccttccatttccatccggcttctctaactgagtcacccaaccctggtcaccatcccgcccagcccacaggcatcccctgcccagaactgtcagtttatcttgctttaagtattttctctcccacgtatcccattcatttatctattttcacaatctagacaaaagtctttgttcacttcattttaatttcaaccaaagtgttgcactccttccttaggattcatgtgggtgtttctcctcaaagagatgctttcttgcttagcactgttcttcctttctataaggtggagactgcccctactttttcctcttatgttttccttttttcagttgagttcgcatgtttttacagcagctacattttctcaaataatttccaaactttctcaacttaaaacaatgaagagaaaattagggtgcacttgaatatataatgctaggattcccagagctgccatcagtagtagcttctgttatttgggatccccaggtaataatagtaagttgcaagcatgtgtcacttgtcccaaaatggtctctggggttttctgattttaaaattcctttattttccactactttcatatagaatcttcatgcttatcttaatcccttttcatcacaactaagggattttgtgactcaaaggctattcctcattgtaatttataaagtgttacttttttattatttctcactaactttttaatactgtagttgtcatagaagagatgaaaattagagaaaagtgtataaaaaagtgaagatttcaggtgagctggcgtaggacctgtgtcacatcagctttattcatgaattgtaacgtccttttgaaaataagattcattttcatctttttttttcccaggtgctcttttgttaaaatattcaaaaaaatctgaactgtggacggcccaggaaactattgtctatttgggggactacttgactgtgaagaaaaaaggcagacaaagaaatgctttttgggttcatcatcttcatcaagaagaaattctggggaggtattacttaaaaacatttgtataactaatgtaagatgagctaaccttgctc

SEQ ID NO: 32583 - DNA, 2300 bp, Homo sapien
ccataaattaacgctcatgtgtacagcaacaaaggtaagcacttctagcataatttttgcttggtcagactttttatgaggttctgattctgcaggttcatgatagacagaaacccaaagatatgtgagaggcaggtgttgtgtgctagaaacattgaaagtgtctctcttttcttctttcattttcatttctgcacttctaacacatgaaatttagctgttctaaaatagtcgaggaggaaactggcaaatgatgcttttatattttgggaatttgctttaaaaagggagaatatgaaaacacaaacatcaaagagcaaagtggaaatcatgatagttttcaagtaattccaagacagaaggaagtctgaagtttgaagaactgcaatgggtaatgctccttttcacaagtttctaattttcattttctttactttgtgccttccaatcctccttgttacctccctgaagaaaacattaaacaaattaaagccatgccaaaatactaacagctaatttaaccaccccgtctttggaatacagcttgtttctaagtcctacaaactgagggagacagaaaccagaagacagcattctctttcccttctactcttccactcctaacactccaactgtgccttgcctaaagttaatttgcaaaggggatctcaagggacgccactccggtctactgaagtccggatccatccccatgtcgacaagagggtgggcatgaacgtggggaaagtggggagggctaacgagcaattgagaacaagtttcccccgaggtccagtagcccttcagctcttttttctcattgaaaagcagaattgggaagatgggccccttgtccctacaacgccccccagcgcggagcagaggtcacagaaatgtcagcgcagcgcatttgcttgcaggagcagcagctctgccgctcctcccgctcggttcgctgccacccacgcaggaagcctccttgctgtccctccaggctataaactgggttaaccccagcaaaacctgcatcagtgcccggagcctcagtttcctgtatgtaaaatgagggggatcctttcagctctaacatgtgagtgatttcattctcacatcctctaaaagctcatcaactgctcccctatccgacctcccctcccaagagacgcctgtttgaatccccagtgtcctctcccttcactctcccacgccagtttcgacggaccccaaacacacttgttcacgaggtgtccacatctctccatccacgccattctcctcccctaaccaaatgaatccattttaaaatcgtttactatttgatacaacccctaagaggctttgccaagagacgcccggcagcaccacagggctaactgctttccccgggattctgacccccattaactaattcctagttcccatcacccgggagttaggagggccggcagcgccgggtgcggtgcctgcgcgcgcgccgggcggggggagcctcggcggcagcgaggacgaaggcgggggcggtagcacgggtccccccatccgcccccagcgctcgggcccctaatgagctgctgaaagggagcgggctccggtgcgcgtggctcgcaggcctcccggagtccagggcgccctgattggccagctgcgcctcgcgacctccattcattaataaattagcggcacgctccagccgagcgcgagccaccaatcacaatggacagcggcggcgacaacagccgcagcttgagcctctgcggccgctgcggcttcgccagctccggccgcagcccggagctccaacaggagctttagaaccattttatgttgattagataaagggggaaaagagaggcgggggtggtgggaggaggaggatggatggcagggccaagggagggggaaaggcggtgaagaaagaggaagaaatgaatgatgataatgcaatgaaaagaataagccagaggagggaaaagcgggggagaaggggggcaggactgacaggaggaggaggcggtggcgggggaggagggggcccggggcagatctgattgttttcttggtggtatataaggggttttaaggagagtcgtgtgccagacacgcagccactgaaccacaagcagcttcgcgttaactggagtgcctgggagtcgcgtgccaggagccgcacggccagggactgactgacagacagacacgcaccaccaccacaacacacgagacccgggcgggccgccgccgccgccgccggggctcttggcaaactcgccggtcgcagaggtcccccgcggagctgcgcc

SEQ ID NO: 32584 - DNA, 2300 bp, Homo sapien
gccttctgtgggtttatgcaaaacctagggatttccattgtagcaaactcatcttcccatgtgatgtctctgccctccttcttcctcaccctgtaattctgccatctctttagtctttttctgtgtgattcaagtggtactgtattaattgcagaatctgatgctggttcttttgttcagagcactcccaacctttaggttgatagttgatgaattatctttccagaactttacttctcatcttgtgtatgtatatgtgtactatagatatatgtacacacatatgcaaatatatataatttctaaaaatataaaaccatactgtatatgtctgtgtaatatttaaaaatgtttgtcttttcagatgatctttgggtggtttcaaaaaccctagactttgagctggatacttttatcgcatgtagtgctttctttggaccatcatctatcaatgagatagaaatactgcctttgaaaggctatttcccttctaattggcccactaacagtgagtattactatgctcattttagtttatatttaaaaagaatgatagacataagatgcactgtttgattaaagccaacaaaaaggacccaactctagtttcgactgttgtgtacagtgagttcctgaaaatgtgtatgaagttgaatatatagatatttctgtgaggaagaatggtgtgtgggggattgttttgttctaattttctaattagattattctgattttctgttttccatatatttctgtgaagtaattgaggaaaaaatgcaagaaagtgtttaaaaattatacaaatactactctgtggcacaagtgatatgttgattaaaggaaactgctggctgtgaagttgtgctactaggtactaactcaaaacaggtgttcttgttcatttgctgatatatggaagtccaaatatgatttaaattatgcagtttatgcatacccattataaaatgaatgagcagatagcatagtaatttaatgaatataagtttgggatctctgtgtgtgtttaagggtttgttttatgtcatgtgcttaattcagtagctgaactctgagttatgtgggcatttaacacagagtttttatggtccattttatttacatcaaatgtttattttctgcatcctctgtacagtggttgtccatgcgttattggtttgtaatgctagcacagaactgactactttgaaaaacattcaggactactttaatccagctactctacctctaacacagtacctgttaacaacgtaagtcattttttacctttgagtcattggtattaaaaaatggtaatcagaagtaaatatgaaaattcaataaaagtacagtatataaatgttgccaataaaattgtaattatttttcagactatgacattattctctgtcagtggttaaaaagagaaaaggggctgggtgcagtggctcatgcctgtaatcccagcactttgggaggccgaggtgggcagatcaccagaggtcgggagttcgagaccagcctgaccaacatggagaaaccctgtctctactaaaaatacaaaattagctgggcatactggcgcatgcctgtaatcacagctattcgggaggctgaggcaggagaattgcttgaacctgggaggcggaggttgcggtgagccgggtgccattgcaccccagcctgggcaacaagtgaaactctatctcaaaaaaaaaaaaaaaaaaaaagagaaaaggaattatgcattatttttcatctgtttattaaggtttgagctaataaatgttactgtacattttcacttcatcaagagataatttaaggatcatttcagtattgattttattttttattatctgtatttttatattacaaattatttaacatttaaaggaatcattttacagctggaatccagtgtgtatattgctactgattttattctcgatatagccatatctcattttgaatttctcaagcaccatgtccctttttaaaaaattggaagtgatattatattaaatgcattaaaattgataggaaaatccagttttcaatttggaatattattatctacctgtgatgttttatttttctcactacaatgaagtcctaggtaaaaaaataaatatcctttgatttcattatgttatttatccaatttgaaatgaattttcatggaaatagaaataagaccaattcatgtgatgtagttttacctgaaatgagggctagattaattatctaagttaggtttgtataatagagcatgggttttaaagtcagtccgccacttattt

SEQ ID NO: 32585 - DNA, 2300 bp, Homo sapien
gatgatcttcattttctcaacttggagggtagtcgttaccacattgctctaatatctgtctattcatttaagatgaagttttttatttgagagattattacactaaatatatcttagaaccagattcagtgtcatatcccttgaagcctttccataacctttcttcctttgaactttttctatcatagatagctattccaggtacaatattcccttctagctatctagttccttcttgtttctcctcccaactttgtcaacacagacccctgaaagtatcttctaccattgtcagttcttctcacagctgtaactccagcatctgacccctttacagccctttcctgttccagaggaatgactcattgcaagtgtctcatcaacaccattggttgaccttagcataaccttttagtgtctctttttgctttgggatcctgaactcttcaactgctgctaccacccttgcattcctaggactctaggttttcatatattttggcccttcactatgagtcagcttctgcttcttgatgaatataatactattctctaggatccctttcactaaaatttctttttttctcttttcttataatctcatcaatatatcttcccctgattctgaatttatgttgggtgaggggtgagttgtagatagttttttgattttggatggatgataacaaaaaattctgtaatgtgaattggtagttgggttagaaaaggttttatgggtgtggttggtagaaggcaacaaggtagagaagaatcaaatacaccggagtgggtattcaagaaaaagtgatatggtagtgaacagtagatgattttcacagttataccatgaatcttttactttaatggacttttaacttttctgtcagtgttacttgatcgacttgttagaattacagcatagcactttataaaagaatattcattggctcacctactgctctgctactttccagatgatctccagagtatatttccaacaagatagaaactctgtcaggaaggcacattattataaaataggaatccatagtattgtcagataaaaactataagcttgcataattctgatgcagtattattcatttgtttatatattcaacaaatagttactgcttcttagatttttaggaatatatcactaaagctgctgacacacagaaggaatcattaaactctttcagacagaatttgccatgagtttaccagaattatactcttatcaaacaccattagatcaaaataaagctaaaatctttttttactctgaagggtaacatgataattcatgagtgtaaaaatatataaaggaagttacaatcacatagtcatataaatgaaccatgagcttccgtctctgggaaagaatgtaaagtagatataaaaaactagtctaggttcttatcctgactctgccacttagtagttatgctactgctaagcctttgtaatctcatttgtaaaatgagaatgatgcatttttgttgttgttgttagctttaaagtgctttgaaaatgttaagtgctatataaacataatttagtaattaggaaaaaaaaaggaggagaagaaaaagagggacttcatcaaccctaagaatgtttcagtatatatgaattaagctttgaaatctttattttttgaggttaaaaccattaatttttttttaaggaaataaaataatgtgattttttttttcagagcaagttgctacattttgcttttgtatacccactgttttctagagcctaggtgataactagtagaacatttttatttaatcagcattctgttttctttcagggatgaaaaaatcccgttctctggagaatgagaaccttcaaaggctttcattattaagtagaacccaggttccacttattactttgccacgtactgatgggccacctgacttagactctcattcgtatatgatcaactctaacacatacgagtcttctggctcccccatgctcaatttgtgtgaaaagtcagcagttctttcgtttagcattgagcctgaggaccaaaatgaaacctttttctctgaagaatctagggaagtgaatccaggggatgtttcacttaataatatatctactcagagcaagtggctgaaatatcaaaacacatcccaatgcaacgtggctactccaaacagagttgataagagaataactgatggcttctttgctgaggctgtttctgggatgcattttagagacacaagtgaaagacagagtgatgctgtcaatgaaagctctttagactctgtgcattt

SEQ ID NO: 32586 - DNA, 2300 bp, Homo sapien
aggctgaggcaggagaattgcttgaacccgggaggcggaggttgcagtgagcagagatcacgccactgcactccagcctgggcgacagagcgagactccatctcaaaaaaaaaaaaaaaaaagaaatacaacttccacatcctatctccctcccctccggcgtacataaattgctgatgcctaagaatgccaagaagataaaagagagatcgagaaaaacactcctgggctagatatgctgtatacatagatgagaatacatggtacagacacagtgctgggcatgtggcaattattaatatcagatctgtttaatagctaccatttattcagtgctaccatatgctagaaactgttaaatgctttatttggaggttttgtttctgttggctttttaacttttctttttcttttacagagacagggtctcactctgtcacctaggctggagtgcagtgttgcaatcatagctcgctgtggcctcaaactcctgggctcaagcaatccttccagcctcccaaagtgctatattataaacattatatacattatattgttaattatatacattataattattatgtaattatataatatataactatattactgtattatgtaatatacaattatatgattatcgtgtgtaattatatatatttattgattacatactatgtatcaggcaggaattggacgagatactttacatacagtatttatcagtctcataatcctgaagaataagcattattacaatttacagattaggaacccagtatttactagtttaggataacttatatgctatttcacaattgcaagataaattctccattattttcctaaattgagatattacttctggaatgtacagtttaaaaagaactaagaagactgaaactcttaaaggatggttaaattcgattataggagaaaacctaaaaaaaaaaagctaactggatcttttaaaatttagaagagctctaatacttattcattgaaagtcaacaccctttcttatcttagtattaatcagaaaaaattattttagacaacagcatcatatatatttaagtgagatgcaaagagttttttccaagtgttcatctgtccacgtctaccagacaattcacctgttgaccgacttctaataggtgaaagattaatctccaaataagtttttaaagaccccagatgctctgtgataattatatacatacatacatacacacagatatacgtacatacacacatatacatacatatacattgtgctactatatgtacggacgcaatatatatacataaaactcggtgttctcagtaaagtatgagccattattcatttaaatactagatatttttcctttttttttaaacaaggagtattttttgaacctaaacctgaacctctaaatagttcggataacaaagttttggaatcatgaactcaacattgttaacaaaccatccagtccaaataaacaaaggaaacccacatctcatttgccaagattctaagaaccataatcctgtcaccaaatgacaatggagacttgatcctttctcagtcctaaatacaaacagcaaagccctctttggtcctcatacctactcgaaattgcaaagcaaggcctgggaaaaacggtgaagaggcaccacttactacaagcagtccgagtagctgtgactgcgaccaccccaatcctggttccaaacagcatccttcccggttctcttcttaaggagcagagtctttcgtcccttcgccccaaatcgctcaagtcattcctaggaaatcccgagaaacacttcacctcacctgtcaaattgcacaaaatccactttcgaatttctcccgcgaaacaacgtgacgtcattaacgcgggacctcaccagatgaggacccaaaacttggcccgcccacctccgcctaagccaaaaaccgccgctttcaaatcgccaatcaaattcttccttggcttcgagtctctcagccggccgcgctctccgatgcccagccctcctggaaccacctcgcctgtgacgtaggtggagcgcgcactgcctccgggcccgtctttctcaattgggaccggaaaacgttgtcgctcatcctatgacgcgaaagtaaccgagactatcaggatccggagacggaaatgtccgaaggccgcagtacttgaccctgtattttgggagtcgaacggagtaagttacaagcggcctatagggtcgcacagcttgggcgaagtctaattaactctccgtcctttttcttgcggtccactctatca

SEQ ID NO: 32587 - DNA, 2300 bp, Homo sapien
ttgtctaccttttggtagaatttcccgcaatttatcaccacggactctatgttctgactcaggaattcttaatctgaagtccatgcaactttggctggacaagaattctagtgggctccattaaattgtaaatgatacattttaaagataaggtaaaatcaagactcttgtacaaatataaaatgaatacacggtaaagatttaagcacagtcatgggttgcttaacgacaaggacacattctgagaaatgcacagtcaggtgagtaagtacatcattgagtatgtagttattctatgatgtattcacacaaacctaggtactattgcctattactcacctataatcttatgggaccactgtcatacatgcggtctgtcggtatgtggtgcttgactgtaaataagggaaccagttaagtgctaaaaaccagttcaaaggagaatttaaaaagcaggtacacaggcaatcaggaacgttgaaatgaatattaataaatactgctcaggacaataattaattgcatctttactggacaaacctaatttccatgttgctgtagcgagttacagggttgaaaaatagttcaaagaccacgaaagacatagataacttggaagagtgagtcagacaagacaccaagtcatttgtgtgtgtttgctatttaaaagtatttcgtaatttctcctgaggaaattatatgaaaaatgtttgtttggagacgcagcctctctcagtggcccaggctgcagtgcagtggcgcgatcccggctcactgtaatctctgcttcccgagttcaagcgattctcccaaccaagcctcttgagtagctgggactacaggtgtgcaccaccactccccgctaatttttgtgtttttagtagagacgagattttgccatattggccaggctggtctcgaactcctgacctcaagtgatcctcccgcgtcggcctcccaaagtgctgggattacaggcgtgagccaccgtgcccagcctcgcaaaatgttttaataggtacatgcacgttttcctgagaagctaatccatataattaagttttcaaaagaagtgtgccacaacaggttaagaatcattgttctggtcactgcttacaactcaagtccctcaacacgtagtggcctgtgtgttctgctttgtctgaatcttctcgtctaaatttccttattaaattttcaaggcccaggttaaatggcatcttactctttgagatcttccaccaccctgtgtcctatcatttgttttctcttaagtttctttgcaaacgcactctgcacaccatatctagcaagtgttagttcccttccgtaactggattttttactctttgaggacgatggcagagtcctgcaaaagaagatgataattttagaatataaatcctcacgttcgctatcttctggcagccacagctcagctccaatctgcgaaatacggcactctctttattgactactgcttctctcggcacccgtacttccgcaaggacgccgtcataggccgggcgcgccccaaacctccccacgccgggcccctatgcgcccttactgtctgaaaacgggaactacaagtgctgccgaagacttttgcgcgtgcgcatagataactaggccaaggaactgatgggtgtgcaggacgggggggcggggtaagaaggacgatagatgatagagtggaccgcaagaaaaaggacggagagttaattagacttcgcccaagctgtgcgaccctataggccgcttgtaacttactccgttcgactcccaaaatacagggtcaagtactgcggccttcggacatttccgtctccggatcctgatagtctcggttactttcgcgtcataggatgagcgacaacgttttccggtcccaattgagaaagacgggcccggaggcagtgcgcgctccacctacgtcacaggcgaggtggttccaggagggctgggcatcggagagcgcggccggctgagagactcgaagccaaggaagaatttgattggcgatttgaaagcggcggtttttggcttaggcggaggtgggcgggccaagttttgggtcctcatctggtgaggtcccgcgttaatgacgtcacgttgtttcgcgggagaaattcgaaagtggattttgtgcaatttgacaggtgaggtgaagtgtttctcgggatttcctaggaatgacttgagcgatttggggcgaagggacgaaagactctgctccttaagaagagaaccgggaaggatgctgtttggaaccaggattggggtggtcgcagtcacag

SEQ ID NO: 32588 - DNA, 2300 bp, Homo sapien
gcgatggagagtgtccacgtcccttaatcttacacttttcacttactgacttaaaagtgcagcttagtgagataaaggtgtaattttttatattattctaggataatctggccctgtgttttaaaaggtacaaagaaactaaagctatgatccctaacatagaaggtaaattatttttaaatttaatttattaaatataaaaatgaatgttctttctgtttgtcttctgatggccaaatgtgagtccattattctctcagacagttaaaggctaatctaaatatttaactatattagctattgtggtgatttaaatatttacatctttttcttgtaattcacaggaatggaaactgaaagtggaaatcaggaaaaggtaatggaagaagaaagcactgaaaagaaaaaagaagttgaaaaaaagaaacggtcacgagttaaacaggtgcttgcagatattgctaagcaagtggacttctggtttggggatgcaaatcttcacaaggatagatttcttcgagaacagatagaaaaatctagagatggatgtaagtttgcttcagtaaaggaaccaatttttagatatggttgcctttaaatttacttataaaataatatattctttttttttttttttttttgagttggagtcttgctctgttgcccaggctggagtgcagtggcatgatctcagctcattgcaacctctgcctcctgggttcaagtgattctcctgcctcagcctcccgagtaggtgggactacaggcaagcaccaccatgcccggctaatttttgtattttcagtagagatgggattttactgtgttggccaggctggtctcgaactcctgaccttgtgatctgcccacctcagcctcccaaaatgctgggattacaggcgtgagccactacacccagcctaaaatagtatattctataatgtgtatattcgtttctgtaagtgtgttccgtgtaatctgttctaatttttatttagtgaatgacaatcttctaaataaagactgttggtaacagtttaggctatattaaataagcaatttcaaatcaaagcttttaagtattttgggatttaattgcttcaataaccattcatcatgtgtaactcgagagtgctatactttagttcatacaagaaggcatttcacctagctcaatgttattttttgtttcatttttttgaggcaaggtctatcttttttccctaggcaggaatgcactggctccatgtctgctcactccaacttctgcccccacctccaccccctcagccccacccaagcgatcctccatcagcctccccagtagctgagaacacaggcaagcatcaccaggccggcttttttttctggcatttttaagagatatggggtcccaccatgttgcccaggctggtcttgagctcctgagctcaagagatttaccttcacccctgaattgctgagataagaagcattgagccaccatccccagttgctaaatttcaaatagccaaccttgtgcttgtttctaataggatgggatccagatgtcctctttgaatgtctgggtattgctaataatttgtgttcaaatcttaatctgcagttacatacactaaaatgtgtcattttaggtcgccaaatatgcaatgccatttagaccctcatacagtttttttttgtttgttttgtttgagtctctttctcccaggctggagtgatctcagctcactgcaacctctgcctcctgggttcaagcgattctcctacctcactctcgagtagctgggattacaggcgtgcaccactacacccagctaattctttgtatttttagtagagatggggtttcactatgttggccaggctggtcttgaactcccccatccacccgccttggcctcccaaagtactaggattacaggcatgagccaccgagcctgagggcctgaggggcaggttaaattgtaccaaattgaattaatcctgctgatacactaacatattaactttttcattttctttagatgttgatatatcactacttgtgtcttttaacaaaatgaaaaaattgactactgatgggaagttaattgccagagcattgagaagttcagctgttgtagaggtaagaatcaagaataactactgtttatatttatagtttataattataaagaatgttaacgtaatgattattatatgattatagcttacaattataaataatattagttttattaatgtaatatactattttaaagcttgatttggaaggcaccagaatccggaggaaaaaa

SEQ ID NO: 32589 - DNA, 2300 bp, Homo sapien
caaacctaaggacggagtcagtcgtgggaacccccaatttgtagccaagctggacaaaagtgtgggtaacctgggtacccactacttgtgatttttatttgaagttgggggcagtcttgtggaactgagcccttaacctgtggtgtctgcgttaactctgggtagtcagtgtcagaattgaattaaattgtagggcacttggtgtctgcagaaaattgggaaatttcttgatgtgaaaaacccacatatctggtgtcagagatgttctgtttcagtagaaacagtagtagacttgaacagttttactctttatatagcttatttccaatagagaacaaatggaaacaagtgctcttggaatctcatattgaattccacagtcacaagcatcctggtcaactcaggggaaaatatcacacacttggtacaaagcaaatagatgagttaaatattatatattaaatgacaaatttattatgatattagtaatttataattattagattgaattatttccataaaaatatgcaaatactattatattgattacaatatcaaataatgatattatagccttaattaacatataagaaaatggcacaattcactttaaatataagggacaaagacaaaataatgaaaaccaagggtttgcatattttgtgattattttataggaaacagctaattattaaactaaggaaaactaaaattaaatatttatttttctacttaagaagtgtcttggccgggcacagtggctcacgcctgtaatcccagcactttgggaagccgaggcaggtggatcacctgaagtcagcagttcgagaccagcctggacaacatggtgaaaccctatctgtactaaaaatacaaaaattggccaggtgtggtggcacatgcctgtaatcccagctacttgggaggctgaggcaggagaatcacttgaacccgggagggggaagttgcagtgagccaagattgtgccactgcacttcagcctgggggacagagcaagacggtgtccaaaaaaaacagtgaattctcctctctgctaggggagcattatattttttgtaattttagaattacatcatttctggtcacagctgtctaagcgggctatgattttgcttcataaagtcttattgattttgattattcttaccttaaagattacatgtgttaccatttatcctaatgaaattaagataaaacctgattttttttaccagcctttagattcagtattagacacagaacattttataaggatccttgataaggctcttacttccttgtcttatcacagaagtagaattagaagctctgtaacaaatatccaacccctccaccattttgataatctgtttttggactgggtatatagtaggtgatcaataaatgattattgaatgaatgaatgtaagcctgaatggatggttctgacttcctgtctgcttatctgcctatccgtccaggtctgtacatctatttctgttggactatatgtgaatcctctcaaaatagaattattgtgtattgcactgagtctcatggttacctcactgagattgcccatgaactaaactcagtggtgactagcttaaaacacacacacacaccacctaccaatattttatgacttaaacatatatatatgtatatatgtatatatagatatatataaactcttatataaaagatgatctactgaaaggcggtggggtatggtggtggtagtgatttatagatgaaatcactcccacggcattggcatcttggcagtagcttattcctcagcttctctgaactaggcgtggaactccagttacttcccatatatctgatacatttaggctgcaacaaattcaagtgcttttcttgcttatttttcccttcttttagaacagaagaaaccagaaaaaaaatattttgtgagaaaacaacagttccttactctgtaccacctgcttaaatgcaaaccaaaggcactcaaatgatgcaacccaagagtgtggaagaggctggcggatgggctgtcacgtctggctgatctgatgtcagagcagatcatgtggtgctctgtgggcagctgggactggcccgccgaaagcacatggattacagtctgaggctgtaatgggaaagtcggttcctgggctgctgtctcatagacatcagcttgcagggaagctgggggctctccgaattgccctgctccggggcccctcctgctgcgtgactcacaggcacattgcagagagaagctgccgctcccagtaagtgcttaaagaagg

SEQ ID NO: 32590 - DNA, 2300 bp, Homo sapien
ggctgtgaccacagtgggagttgggcttctggaggcttctgtagaagctctttggggttttgttttaaaaaaaaagagagaacctttgcctctttggcctggctgtgtgatccaagataccactgaagcaatggtgagagaatggcattggtggaatgggtctgctgaaacaggaggagggtggagggagtgaggggcagcaaaacagagttgactccagatgatgacgtggaggggccttagggtggtaaggcagagagaaggagcaatcctaacagcaatggggaaataggtgaatttttgttgctctgtctgatggaaaggtgagttctcaactgctgcagtcattttcacataaatatgtttcttaaggtacactttcagagttgaaaactgtctatatttgtaataataataagattagcaatagcaacacatttacataggcaccttccaatttcaaagtgcatttatatacactatctcgttggtttaatccttactctatttttacttctaagtatgctgtgtattatactttacgttcattgtctgggaataagggcaagtgtttagaatatacatatgtgcatttgtacaaagtatattaggttctggttgcatctacaagtgtgtatatatatatatatatatatatatatattttttttttttttttttttttttttttttttcaaggcggagtcttgctctgtcaccgaggctggagtgcactgggggcaatcttggctcactgcaaccttcgcctcccgagttcaagcaattctcctgccccagcctccccacacctggctaattttttttttttttttgtatttttagtagaggcagggtttcatcacgttggccaggctgttgtcgagctcctcaccttgcgatccacctgccttggcctcccaaaatgctgggattataggcatgagccactgcgcccagcctacaagttaatatttttaaatatacaagtatggccaccttaatcaataagtgaatttgggtttcttgttataaaaacaagccccatttttttaaaatcaagaagaattccagaactttatagtatacaccccttgagaggagggattgtgttttattcatcagtcaatagacacaattaggttaagaaaacttttgagataagttataaaatattgcaactccattagttttttatgtttttattactgatagtgtcttagatatttaacaagccttgattaactgcctttaatgtgccatggattatgcttggttctgggaaattcagttctccccctacccagacacacacacacacacacacacacacacacacacacacacacacacactcctgatctaaagctcttggcctatcaagaaaagatggttaggtatctgggcagttgtgtaatacattgtcacaggtatactgtcagaagcttacattggaaagagaaggcacaggagaagagagtggttggggttatctggaggttggagaagctgttctcaaggctttatgacagaagtcatccttgagtgtagtttcaaaagattatattttaaaccaagtgaatgacatctgaaaaacatagctttcttatattcactttaggatattaataaccaatccttttccttaagtagcctcttgactggctaaatgtacctcttcaggttcagagacacattctagaatgttacagttttctcattatgcattgtatctgttccgtgttgaagtacctgtaggaagaaaattaagtacaggttttgtgtgtaggttgagagctgatcctatcaagggtgtgtcagaaaccaaccagcagagtccccaaatcattcgagtccctggcattcttttttcaaggctttcttcattgtaaccggttcctgatggtaattggttgaatcagatttaacaatgcagtcagataaacagttgtggcagctgctgccatggcaacgtcaccgtccttaccctcccagtgcgcgccccttccccacccctcctcctcctcctgctttcctccagtaagtgcatacccgctagtggtctgtacaggcggcacggtttgatggcagagatattttctttccaaactgttcaaaatgatgaacgaagatgcagctcagaaaagcgacagtggagagaagttcaacggcagtagtcagaggagaaaaagacccaagaaggtaaatcgccggaattaggaatgtctgtgtataaatatgtatgtgtgtgcatgtgtgagtgtgtaatatcagcaaggctatggaaaccgtggagcattatg

SEQ ID NO: 32591 - DNA, 2300 bp, Homo sapien
taaaattaatatgactatacaaaagttatagctcctggcccaatgtggtggctcacacctgtaatcccaacactttgggaggccaaggtggacagatcatctgagctcaggagttcgagaccagcttggccaacatgacaaaaccctgtctctactaaagataccaaaaattagctgggtgtggtggcacacacctgtagtcccagctactcaggaggctgaggccagagaatcgcttgaacccgggaggcagaggttgcagtgagccaagatcgcaccaatgcactccagcctgggtgacagaacgagactccgtctcaagaaaaggtgttatagttccttttctcaagtaaccaccagtcttataagggaggcaagtaaacaacagactgttaaatggcaagaaatacacaaaatgagcaacatatgtgaggcttggagaatccggaggaagcagttgtctctcaatggcttttctcttttccccttcctcccccaccatctccatatgaagccttagagacctgggcagatcttcatcttttgttgggagccaccttcttatatattgatagactaatattttagtttttaaagacatatgcctcataaaaaacttctctgaaaacataattttgggaagtttgggtcagggtatgactgtaaggtttaagctggcagccaaggtgtttcaaataaattaaaaaaaggtttttttagcctgtcaaaaggtacttgtggtactatttcagaattaaccaaactctattaagtaagggctacttaatcaaaccatgaatgattttatggttagtttttgagaagatcaaattaaagcatggtttcatttattttaaatttttcttaaagatttaaaaaatactccttgttccaaaacacattttaaaaaaatctcatgaatcgtttgagagaggggagccatgtttaaaagaaagacacaaaaagatgtctatagtttgttatgctaatagtttgctgtggaaacatctaaaggtaagacattaggtactcagtgtaatggtcaccttcattcctaacagctgccctctggcagtgaaaagagcgtaattctctcttgtctgcttttctccaggacaacaatgagtaaagccatcacacagaagagggctgtggtgaaggaccagcatggaaaacgcattgacttggagcacctggaggatgtaccagaagcactagaccaggacgacctccagcgcgatctccagcagctccttcggcatttctgcaaggaggacttgaagcaagaggccaagtgaggggctgcccagttctcacaccagaaaccacacattcactcaatatgcagcttcctgtttcagtaggggagtgacctaactggcctaattaatgggataccccgacatttccactgttagcaaatatacggcattttgctttagttttcccccatcctctttaactataaagctaatttgtgaccaaagatggcatccttcatactggatgctgtatccaatactttgttgtgtctgtgctaacctgggaactggccacctccattgttctttgcttctgcacaagatccatgaaaatccattgatcagaagaacttcacctgcagacctcttcaagtgacactatgtaggaatccttccaaggaatatctatgtacaatgtatatagctgaaatgctcagatgaacaacatattaaaattaaaaccactgcctattgtaactacactgggcatcagaataaaaggcctctagaaattgctgaacaatggttaattaagatattgctaacacaatcgagtgataatacagttttactgcaaaagaagcacttcaaacctattatgtccttagaacttccagagtagccactgctcccagttaaaggtgggtcagtagccttgcagaactgtcctgagaagttattgctggtgctggccagccatggcttaggactccaacagccactctgagggaggggagaagggagcagaggccacgcagaatgaaccgatggggtattcagttgctggcagctacattgtgtggcattctagcatcttcaggtctttagatcttggacaagttggcagggtattttaaaagctataactactgtagttttccagttttcattgctgctttagcaaaccacgctgtcttacagtggtactttcttctggccactgcactgtagataattcattggaaacaagatttacccactacataaaaggttaaactccttcagtatgttggagtggtttctttttttttttctttc

SEQ ID NO: 32592 - DNA, 2300 bp, Homo sapien
attatcactacaaaaaataatgtaaagaaaggagaagtagctttcttatatagtcttaatataaaaaagtattagtaatgggaagttataagatttgattactttcatatactttggtgaaatttgtaattgggcagattaaacttcttgaagggttaaaatgaaatcttgctgaagctcctgtagtctcagattcttctcactacagcactccaagtagccctgattaataggtcagttttggcacaggaattgaagctgttttattacctctgctattactgcttatgagttgtgaaagtatataatacctcattttgaaccttggcataatatcatgatgacattggtacatgtagcaacctgtttgcttttattaagttttgcaaataattatgagaaagattgtataaaatttcattttcagatcaaagcagagatactttgagaagaatagaagattcttaagttctttttttctgaattttaaaatgtatttaccatatgtgatatgcagctcagtacatatgttggtcccttatcagatactctttaatatatatagttgtctacatagagggggagaatagatctaaatggttttatttattttagatacaacttaacttatataaaaagtaaatttatgaagaaattcactacttgagggaatgattcatgtagttgactcttccctgtttgatcgagtgtgtctattttttaaactttttataaatttatatttttgaagtttccatcaccagaatgggacacggtgactcctgaagccaaagacctcatcaataaaatgcttactatcaaccctgccaaacgcatcacagcctcagaggcactgaagcacccatggatctgtgtaagtaaaacttctccaaaacttcaagaactaaaatgaaaaataagctctcctttaatatattgtttatggatttaaaatagctttgcaaaaaaagatgaaactcagaatgaatgaatttttgactcgaggtgtttaagaaaattaattttatgatggtgaaaaaatgcaattttcagtagcaaagtctgaattgcatagattcttaaataaatattgcttgcagtaacaaaaggaatgagtattctccatatcaattattaacaatactcatgaacaaggttaagaaaataacaccaaaattaaatgtgtcccagaagaaaagatttaacaaagttcaattatttatcattaggcaactttagaaacaagtatgaagtttggcagctgacagtagagtttcagtggcgtaaaataatggtcatagtagtctgaatatattttagaaatattaagaagaatagtgtgaaatttgagggggatctggagacttcagtaaatttccaaatgtgtcaaatgctaaggtgataaatgtggcactaagtaaatgaaaggcagctcaatcaaaatgtgattgaagacattaaaataaagataatttgagaaattattaatattcatttctatactttctggtttggttttgttttgttttgagacagagtcttgctcttgtcacccaggctggagtgcaatggcacgatcttggctcactgcaacctccacctcccaggttcaagcaattctcctgtctcagcctcccgagtagctgggattacaggtgcccaccaccacgcccggctaatttttgtatttttagtagagatgcggtttcgccatgttggccaggctggtctcaaactcctgacctcgtgatccacccgccttggccttccaaagtgctggaattacaggcgtgacccaccgcgcccggcccatttctatactttctatacgtcagtgttgcatcttggtcacaagtagtcttggcaaaactaaaattttatttttaggtaactttggcaattgaatacttagaagttgatcctgcaggtgcagcaccattaataaatatttgatgaagtcagggacattattatacttagtgtgttttaaatattctcaattaagttactttttctcctcttcttctagcaacgttctactgttgcttccatgatgcacagacaggagactgtagactgcttgaagaaatttaatgctagaagaaaactaaaggtaagaaattttacatttttatggggaggtagatttgacagactaagaagtgaaatactgtgtgaggaaaataacttctagcaaaggctttcaattatgtagacctcaatactctcattattctttttggggctcttgggaaatggaatatacaccagaatcaaaactatggtgaaaagctggaatc

SEQ ID NO: 32593 - DNA, 2300 bp, Homo sapien
tgtttcattcttagattcagggaaaaatattaaattatttcattatcaccttggagccacattgctaaatagttcagatattacaaatctttagccaagaccaaattgtgttttttttttcaatttatagcccaattattaatatttagagaccatgtttcttttatgcagttcttggtatcatctttttctatagcactacattttacacagttatttcttgccttttacggctgggaatcaaaacacatacgaacttcaattttgttgtaataaacgttaaaatttgtgaacatttttagtacttcagtaaaaagctcactcattggcagaagcgttccccagatcaggaaaaaaggaattaggattatctatgaccacaaagtaacattaattaatagcagtctttgggagcaagcagcagcgcctttaaatcttagattctcttgtgtctgcaaattatcttttatctttcagctgtgaaattttgtctatgaagtaataccacgagcaaattagcaataggattgcaaggtttttatagtcccgtgctgtagaacaattggcagtaatttgaaaaagaccgtccataacgctgtttttggtctgcggctaaatttgcaattgcatagtttcattaaggagaactggaaagagggcccagaagttgttctagcaatcggcagcagtttatctattttaaatcgtaatgcatactttttttttcctcctactgaaaacaatggcagatatgctaaagggaaggacacattcttgaactgctaaatggtttttccagatagccatttacggagtgcactcaattgccactatctggctgaaagcaaaagcacacacgacggccccttttcttttttccctttgcaaagcgaaacagtctagacgtgttcacgtgatgtgaatgacgtcagcccccgccgggtcgcgtgaccgacacccagccttcctactacctccccctgaccgccagagtgggaaatatcgcgagaattcgccttactatcagaacttactgaggttgcaggggagttactcagaagggaagggaaggtgtggttgtgcggcggagtttttgctttcattcttttaacgttcacagccaaagcaaaggcctttggggattgccagagtctcagccaccatcctggaaaacagcgggggaggtgggcctggaggtggcaagtgtaatgtggctcaggggccgtcattgccccttgcagaaggggctgcgggggagggagaaaacctgcgcccggttctggggagctggcgacgcagtgaaccctgctgaggctgggttttgccccgacagtcgctggtggctgtgggaagggttgggacccttctctgagagcagtgaacagcccacatccggcccctgctgtgtcaactctgagcggcgtggagatgaagtggttgctctcccttgctcggcccaccgggtgtcgtggcccgggaaccggcctggagaagtccctgctgcccggcgcccaaaacaggggcgtgggcttccgcgacccagggcggctgccccgggccatcctcgagttgccctgcatcttcccgctcagtcagccccagattgaggcagccttctctgtgcgggtttaaatgggtaactgtgacttctcgcctcattcacccaaacctccagtcttctcccccgcacatcctcctccacccacctggtttctccctagactggtgtgctcgtgtgtgcaaccaaaggagggagtgcgagagatccacgaagggacaggcttggagtcgctagagggaggtgtgggaccagcgaggagggggcttcgccagggagggggtgctggcaggcggagggagcggcgggaggaggcgccggaggaggagacggaggcctggggacggcagaagaggcttcgcctgagccgagcgctctttctctcgccgcgccgtcttgaagccgcgcgggctcgtgagcagcgcgaggccgccaaggtgcctcgcttcgccggagccgctgccgcccgccggagggaagccggcctcgggcgcgcacgctcgtcggagccccggcgcgccccgcgcctgagcctgctgacagcggccgctgggctcaggctgtccgctctgggctccgcggcctcggccccgctgcactccacctccgccccctcggactccctcccctctgcttctactcctcctgctccagtgcggatcgtttcgcaactgcttgccactcgtcccgtgcctggctgtttttccatttcccggccccctcttcttgagtactttacccc

SEQ ID NO: 32594 - DNA, 2300 bp, Homo sapien
tcactctcttagaagccacccatcatgtaaagaattccagctactggctagaaaaaagtccatggggacagagacaaaaatcttggaggaagaaagatcataaagtagagaggtccagacaactcccagttattctagccatcccagttgaatggcagatttatagatgaagccgtcttagatcctctggcctttcctagtgaaatgtatgcaaatgaaagaattgtttgctattttcttcttttataaagccattgatgatgaaataaaacgaaattctgccaaaatagatgtcaagaggcttattctgagccagtatgagtgaccatggcctggggttatacaacctcaaggggtcctgggaaagtgtatctgaggtagtcaggttatagtttggatttatatgtggaagattctgcagggtgaggtgggacatctcagtgtggagttgggggttgtgtagtgggcaacttgtaagtcataggtgggttttagggattctttagttgacagttgattgagagagttaaactattgtccaaagacttggattcggtagaaaggaatgcttgagttaaggtttttcttatgtagataaagcctctcaggtagcagccctgggtgagaatagatgggaaatatctcttttcaagccttaaaggtgtaagactcacagttaatctctcctagatccaggaaaggcctagaaaggatagacctgcctgcattaatggagattctctacagatgcaaatttctcccacaaaatatgactttgcagggccatttcaatttgttggccctgtggtagttatttctaaatacatcaaataaaagtattttgggatgaaatattttgatttccttcaggatttgctatctatcatgtgatgctacaccagagtcaggttggaaagcaagccacattatatgtgattaataataaacatctaatgagattttgtgatttgtagggcaataccttctaggccccttagatgggaattttggcaagagaagaaaaggtcagattttagtcctcaccattaagtattgtggtgttttgttatacaataggaggtaactgaaatgttgtgtgaaccagatctggctaatgaggagaggagcttctgaggcacagagctgatgggcaggtacctttttttctttttgctcctttctttttctccttcctgaaacaggattgttgcaaatgcagcagcaattttatgatcaagaaatgaaaagcacgaggatgaagacctataagttaaggatagtggagaagagagagagagagagagccagagccaatgctaatgacattgctaatgacatccctgaactaccatgctttcctcacttctgtctatccatagaattcttgtagttgaataagcacttaaatgtttgcatgttaaatttttctattacggttgttgttccttgcccttgaatgtaatttaaatggactcagcagattttaaaattttcattagaattttaagactttacaaaatttatgacataattgtatatagcagattcaggttacaaatataatggtactaacagtaagaaaagtatccatttctgtctgtctattttataatctactggagatagaataggatgggatactactcctttttcatgtagtttttttttttcttcttcttctcttcacaaaacccgcaccactatctcactgatgctatgcccactaaccccaggctttagtcacacataggaaatagctgccattctgtgctttcataatggttaaccatgcctttcacttaaagaattccagaaattggctttaggagaactaaacattgaatgaatcttgtgaagtgtcccaccttgggaaggaatgctgaacaattgatgtatagccttattgctgctggccagaccaccaggtagcccattactcaagaaaaccatagcaacaagatgcgctgacctgcataccctacttctcatgtgctttgcccagctcagcctgcatactttacccctgatgtcaattcctgtgctttgcttaataaaaataaaaaaatacctcttgcagattttaggctttttcagagagccagccagaggatccttccacctcacctctgctgtctcccttttgctcaaccacaagtcccaaaataaaaatcttgtctgggaaatctgcttggccctgtgttaacttctgttacatgggagccaaagagcctgtggtctgtaacaggttctctggcaaccatgacgggattataggacgtggtgagcatttttctccaagg

SEQ ID NO: 32595 - DNA, 2300 bp, Homo sapien
tcatggcccaagtgaaaattcatacacttgtgtaataataaccccttcttggaaaacgcccttggcaaataccactggaaagagaaaaatgcaagaaattaacattcacttaatttttaacatattagaaagtgttatgctttcttagactattttataagtgattatagttttttaaaaagagacactgtgggaaacatacataaggacttattacctgttgtttttggaaaaatataatttgtagcactagctaaaacatttattctaaaatgatttttaaacaataatgtattgtgtagtcagaaacctctatctcgtttcagagatctaacagattagagattaagggccaggcactgtggctcacgcctgcaatcccagcactttgggaggccgaggtgggcggatcacgaggtcaggagatcgagaccatcctggctgctacggtgaaaccccgtctctaatttaaaaaaatacaaaaaaattatctgggcgtggtggcaggcgcctgtagtcccagctactccggagggtgaggcaggagaatggcgtgaacccgggaggcggagcttgcagtgagcctagatcacaccactgcgctccagcctgggcgacagagcgagactccgtctcaaaaaaaagaatgaactattgttttacaatcaaacaggagatttttctctaatttttccttgtatttttagtacttaagagttagcttgaaataaatgatctcaggaaactaggagctaatgatttagaaggcccctaggttaaaagcaataataataataacactctgattccgtatatcttttctcttaccttgtcagttttcagtcatgtaattaagagattaaagtgtattcaaattaattccactataagaactttaaaagactttgaggctgggcacagtggcttcgcacctgtaatcgcagcactttgggaggccaaggcaggtagatcacttgaggtcaggagttcgagactagcctggccaacatggtgaaaccctgtctctactaaaaatacaaaaaaaaaaaaaatctgggcatgttggtgcatgcctgtaatcccagctactggggaggctgaggcaggagaatcgcttgaacctgggaggtgaaagttgcagtgagccgagatcacgccactgcactccaccctgggtgacgactaagactccgtctcaaaaagactttcgagataagtggcaaaattttactttcaaaagtactggcttagattgaaatgcatttcaaatgttaaataggaagttaattagagtaagacttgtgagtaaagagcagaaatgctgaattggtcatttatcattggggtcaattataatttaacaatgatgcccatagaaacattttttaatttagggatcattgttttatgtagaatatctcttttatcctgccctgataacaatttttttctcttttcttaaggtatcagatacacaccggacttcaacattctatcataagacctacccaacccaactgtttacctctggacaatgccaccctacctcagaaactgaaggaggttggatattcaacgcatatggtcggaaaatggcacttgggtttttacagaaaagaatgcatgcccaccagaagaggatttgataccttttttggttcccttttgggaagtggggattactatacacactacaaatgtgacagtcctgggatgtgtggctatgacttgtatgaaaacgacaatgctgcctgggactatgacaatggcatatactccacacagatgtacactcagagagtacagcaaatcttagcttcccataaccccacaaagcctatatttttatatattgcctatcaagctgttcattcaccactgcaagctcctggcaggtatttcgaacactaccgatccattatcaacataaacaggaggagatatgctgccatgctttcctgcttagatgaagcaatcaacaacgtgacattggctctaaagacttatggtttctataacaacagcattatcatttactcttcagataatggtggccagcctacggcaggagggagtaactggcctctcagaggtagcaaaggaacatattgggaaggagggatccgggctgtaggctttgtgcatagcccacttctgaaaaacaagggaacagtgtgtaaggaacttgtgcacatcactgactggtaccccactctcatttcactggctgaaggacagattgatgaggacattcaactagatggctatgatatctgggagaccataagtgagggtcttcg

SEQ ID NO: 32596 - DNA, 2300 bp, Homo sapien
tcacaagaagtcactatctccccaaataaaaggctagattgaccagaatgtttgcatctttcccattcaagcacctggctaggcccattaagcctagggccctacctctcaatgcttttcaatcccctgacactcagtactctcattacatatttggtgacttaatttacagaattgctaaactcacatttctgaacatggcttctaaaactgactatctctccccagcttagccagaagggctgcaaggaagaacagagaccagaaggcctacagcagctagcaaggttaacttcatggagcaccatcgtgcctttcaaagttcccatttcacaaagttttgcctgggaactcagcaggaactttagcaacaggagagaattagaaataaatggctaaatgaaacctagatttatgtttcagtcaattgagagaatctgacatgttatgtgccagcccacagtaggtattcagtaagtaactgttgaataaatttggtggtagaaaaaaatatctcagtggctcttggcattcattgcctcttctatagagactatactatacatccctctgctgcctttgagcaggactttaaaactctatgactctagtaaaatcaagagtattttcacaaccaagataagtttttacaatggttttcctccacatggtaaaaaagaaagaaggaaaaaaaatgatgaagctccctgaattactggatgggaaacactggcttctttaatgcaggaatgcagactggcttcggggttcttgaaggagaaatgcataactcttcctctccaggcttttggctggagacaccctgtgggtaagttaggggagaggtaagagggagcgggcaattccagtattttcacatagggaaagggtaacgaagaatcaggctgtaaaagccagctattgggagaggaaataaaacttaaaaatttgtcatcgttactgaaaaaaaaaaaaaaaaaggtagggacaaaaggaataggaaaatgatgggggtggggggactagtaaaggaaaacctgcaaaggaagttggaaagaggaaagagtgtcatacgcattttgtttttattcctgctccttctctctcactccctccagaagctagaaaaagtttgcaagcgcaactttagggatgggagacggggctcttcaccaacagccccacgaaaagaagtgcccgctttacccttccccattcgcgccgccgtcctttccctctagcggggtgatgggcaggaggcgacactcttgggacgcggtagcccaggcggatcccccggaatcccgctgggctggagcagcacgcagctctctctctggcaaagcctcctctgccttggccatccacctcccggaaaagaaaaaggaaagatcgagcctctaaacagtccttttcccccaccccctcttcccgggggagctcaggaagaaagtaccgttctgtgattcactggagagaaaagagggaggaggcaaaagaactcggagtgccaaagctaaataagttagctgagaaaacgcacgcagtttgcagcgcctgcgccgggtgcgccaactacgcaaagaccaagcgggctccgcgcggaccggccgcggggctagggacccggctttggccttcaggctccctagcagcggggaaaaggaattgctgcccggagtttctgcggaggtggagggagatcaggaaacggcttcttcctcacttcgccgcctggtgagtgtcggggagattggcaaacgcctaggaaaggactggggaaaatagccctgggaaagtggagaaggtgatcaggaggccggtccactacggcagtttatctgtctgatcagagccagacgcgacgcgtccacttcgcagttctttccaggtgtggggaccgcaggacagacggccgatcccgccgccctccgtaccagcactcccaggagagtcagcctcgctccccaacgtcgagggcgctctggccacgaaaagttcctgtccactgtgattctcaattccttgcttggtttttttctccagagaacttttgggtggagatattaacttttttcttttttttttccttggtggaagctgctctagggaggggggaggaggaggagaaagtgaaatgtgctggagaagagcgagccctccttgttcttccggagtcccatccattaagccatcacttctggaagattaaagttgtcggacatggtgacagctgagaggagaggaggatttcttgccaggtggagagtcttcaccgtctgttgggtgcatgtgtgcgc

SEQ ID NO: 32597 - DNA, 2300 bp, Homo sapien
gcagagactgatttattgcatcattaccttcctgtcctctagcattggcccagctccccaaatacttgttgagtggaagaatacctcataaggttgatatagatggaaaagaaataaactgtatatagcactatataaacaaacatacccagtcagtcctctgtattcgcagggtctacattatgggactcaaccaactatacactggaaacattcaaggaaagaagaaaaaaaaataacaatacaacaataaaaataatacagtccaacaactattttcatagcatttacattgtattaggtatcataagtaatatagagatgttttaaagcatagaagatacattaatatgtaggttttatacacatagtgcaccattttacataagggacttgaacatccatgaattttggtatccctcagggttctgaaactaatccctgatagatgcgactgtatatgtgtgtatgtatcagtatatagaatactatggttagcacatggtaagtattccatacattttgattgttttttattattattgcttggaacctcaactgaaaatgtgtctccttcttgcacagaacatggatacttcttgtgctatgtcacaagaagtcactatctccccaaataaaaggctagattgaccagaatgtttgcatctttcccattcaagcacctggctaggcccattaagcctagggccctacctctcaatgcttttcaatcccctgacactcagtactctcattacatatttggtgacttaatttacagaattgctaaactcacatttctgaacatggcttctaaaactgactatctctccccagcttagccagaagggctgcaaggaagaacagagaccagaaggcctacagcagctagcaaggttaacttcatggagcaccatcgtgcctttcaaagttcccatttcacaaagttttgcctgggaactcagcaggaactttagcaacaggagagaattagaaataaatggctaaatgaaacctagatttatgtttcagtcaattgagagaatctgacatgttatgtgccagcccacagtaggtattcagtaagtaactgttgaataaatttggtggtagaaaaaaatatctcagtggctcttggcattcattgcctcttctatagagactatactatacatccctctgctgcctttgagcaggactttaaaactctatgactctagtaaaatcaagagtattttcacaaccaagataagtttttacaatggttttcctccacatggtaaaaaagaaagaaggaaaaaaaatgatgaagctccctgaattactggatgggaaacactggcttctttaatgcaggaatgcagactggcttcggggttcttgaaggagaaatgcataactcttcctctccaggcttttggctggagacaccctgtgggtaagttaggggagaggtaagagggagcgggcaattccagtattttcacatagggaaagggtaacgaagaatcaggctgtaaaagccagctattgggagaggaaataaaacttaaaaatttgtcatcgttactgaaaaaaaaaaaaaaaaaggtagggacaaaaggaataggaaaatgatgggggtggggggactagtaaaggaaaacctgcaaaggaagttggaaagaggaaagagtgtcatacgcattttgtttttattcctgctccttctctctcactccctccagaagctagaaaaagtttgcaagcgcaactttagggatgggagacggggctcttcaccaacagccccacgaaaagaagtgcccgctttacccttccccattcgcgccgccgtcctttccctctagcggggtgatgggcaggaggcgacactcttgggacgcggtagcccaggcggatcccccggaatcccgctgggctggagcagcacgcagctctctctctggcaaagcctcctctgccttggccatccacctcccggaaaagaaaaaggaaagatcgagcctctaaacagtccttttcccccaccccctcttcccgggggagctcaggaagaaagtaccgttctgtgattcactggagagaaaagagggaggaggcaaaagaactcggagtgccaaagctaaataagttagctgagaaaacgcacgcagtttgcagcgcctgcgccgggtgcgccaactacgcaaagaccaagcgggctccgcgcggaccggccgcggggctagggacccggctttggccttcaggctccctagcagcggggaaaaggaattgctgcccggagtttctgcgga

SEQ ID NO: 32598 - DNA, 2300 bp, Homo sapien
gttaatggtgaatgattacaaaacttatataatatctcacatatggttgtttatattttccaataaagttatatggggtgaataattataacaagtatttctgaaaaaaataacaattgagaatactgatatatatagtccacagaaataatgagggaattttaataccatactccacattggctgaaactttctcactgcaggctatgctgtcccattcaacattctataaactaaagatgatagggagaatcttgtttaatctgaatgggagcttgaaggatacattaaatatggaaaatatgcatccttccttaaagagaagtagcaaatgttttcattattcatttattcaaccacttagccaataatgttaacaattaaaggtgggagcattaaaaaaaggaaaagtggggtggggcggtgaaatgaacctcactgatttcttgcttttatcatttcaaactccaaaagtgtatttcaactattcatatgatgattgaataaacttgttttacattatggaacacccttactgtgtagagctgtgagaaattcaataatcagtatttaatgtggacaaaaatagatagattagagaaacaataaacatggacatatctacacataatatatactccttttctatccaaaaatctgacaaaaaccttacacaatggtcagtttacaccattttaaggacaaggatgtggtgaaacaattttaaacatttttatataataaaagaaaaaagttgttttaattgctaatgatcaagtttttaccaagaatttacatatgcatcatcaaacagtagcttgaaactgaagcttgacctttgagaaataaagcttttaaagtaaatgtctaaattctcttttctttattatgttacatttcatttactttaggttttctagtgcaatttaaataagaaataaatagagagtatggtaatcaggtacaaaggctgtgaaaatattccctgcattttgcacagggaatatgttcaaattcctaatctgcaaagaagaaaagtgcattttcttttttgaaatggcatttgaagatctctccatccatgaacattcttgagcatatggattttacaataacagcagtgtatattagttttttaatttatcattaactgataacatatacagtaaaatataatttccgttttcttatctaagggcagaaaatcccaacctatttctgaatctcactttggaacaaggacagaatgacctgacatggcatttttgatttccaacgtttaaacgcataacgtttgtgtgctatggaagcatcttagcttctggaatttatgctcgacacgaaacataaacaataaacaattcagtccacgttatatagacatatctcatatatatatgagatatatatatataaaatatcttacgcacatgcacacttagactttctcggttttcatgaaactcacaatctacctcaggcgctcaaaggcactcggcctctcaggtctgaggcaccacagagaggcttccttgggcacagttgcttgctggtcaagacgccaacttggcaaggttatgctgctggcaaaggcagattcgtcagaataaagtcgccacaggctcaaccaggcaaatcatgaatggccctttcagcaggagcctgagaggagggatgttattcagcccagcaaccctatttactttttttcaggatccccaaactcgcgttttttaaggctttccgctacaagagagccagaattgaagcctgggttggcggcagtgcaggtacctgctcacctaagcatccctcttttaattttcctaactcctccacccacttgcccaagtataacttttgaatggattcagcagaagtgaggcaggaaaggcaggaagatgagaaaaggcgcgacatcaacacgcagagctcactgagccgccttgatgataaaaggcgggcacagggactacgtgggtggtggcagaaagggcgcgggacacgcctcgcaaagagggaagagtgggcggggccacgtgccgttgtcagagttcgcaactcgagcgcccagagggctcgcgaaaagtcccagcctgcaagccaacctcgctcagcggacgactggccggatcccaacgcgctgccccttgcccagcctgcgagcgcgtggtacgaaggcgcgtctgcatccatgccccagcccggggagctggaggcgctcgcagtcagaggcgagtgatgctaggctgagcgcgtggcggcccgtgtcgtgccccgctgagccaagtgcggaaggg

SEQ ID NO: 32599 - DNA, 2300 bp, Homo sapien
ccattgttccatcatcaagtactcacctctcgaatatgcaagaagtgacagcagtgagcagtagctgctggaatacctacctgttttggcattagtcttatccctggagttcatatttccttgtaaaatatctcatttttccttcttcagatttgtgagaaggcaacattggagagacacataggtgaggcagtacagtagaataaacatttggaaggtttttctaagatcagctccttaattttctttcttcactgatcttgtaattgtagtcaactttactatagaatcagtatcttctccaaagttaattatttttaaagccttataataatgtaagtgacatttatattatatgtttgtaatgtgcattacttttacttattcttaatggtataatttcaactttcaaatagtttgaaacttcccttagagtaggagaggaaaaaagcatctggaaatatatgtattttagagttcaatcttgttattggaagaatctattagttgcctgctattgatttctttacattgcttgtagtgtttgaatgtttagaaggtatagttgttaaaactgcgtttagatgttgggaatttatacaaataggagggttaatgtattctaaggagtaaaaatagatatcaatttggttatatgtgtgttggtgatgtgtgtataaatctattttgagatttttgaaatgtgtccagtttgcatgagcaattgtttagatcttttttctatttgggggtctaatttagagtctaagaattcattatattgaataggttggtgggtgtatttgcacactatatggtccccacgtatagtatatttatctctaaaaacaataaaagacaactttattacacatatctgttaacatgaaaaggtaggagaagtactggccctcaagtgtacaggcatcctctgacttgacatttgcacctgagttaaaggtacaacatagaagtgtggtctgagacataatcattcatcagtcctttttcaataagtatttactgagatccattaaccctcttgagcttttctattaaaagtttctcttttacataatgccctgaaatgcatcagcaaattgacatagattacataaatatagattgctaggacaactatggtatttaggtaaagggaaaatatatgttaaagatcatttttcctctggaaaaaagtcttttctgcagaattaccaaactaccattcaaaataattattttctaaaacaatctttctttggtatgctttgattataactgcaaatgtaaccattgaattaaaatgatttaaataagagacacgtgctgatatacctggaaattaaaaaggtcagctcttcttcctgggattaacattgacattcaattagaagatgaacagatgttccatagatatttcatagatattcttccaaaaagatatattatgtgtcattcagccttatcaaaatgttatttcaaatgtttgaaaatagtttactgattcaattttcttcccaaacagatccatttttaatatatttcagtttatgtcaactttgctttcaattctatacttaaacataattgatctttcaaaaataaagaggtaattagaacaaatatcaggataatttttaatagtgattttttttgtatgttagtgtataatactatagaatgcattctttttttttattattatactttaagttttagggtacatgtgcacaatgtgcaggttagttacatatgtatacatgtgacatactggtgtgctgcgcccactaacttgtcatctagcattaggtatatatcccaatgctatccctcccccctccccccaccccacaacagtccccagagtgtgatgttccccctcctgtgtccatgtgttcccattgttcaattcccacctatgagtgagaatatgcggtgtttggttttttgttcttgcgatggtttactgagaatgatgatttccaatttcatccatgtccctacaaaggacatgaactcatcattttttatggctgcatagtattccatggtgtatatgtgccacattttcttaatccagtctatcattgttggacatttgggttggttccaagtctttgctattgtgaatagtgccgcaataaacatacgtgtgcatgtgtctttatagcagcatgatttatagtcctttgggtatatacccagtaatgggatggctgggttctagatccctgaggaatcgccacattgacttgcacaatggttgaactagtttacagtcccaccaacagtgtaaaagt

SEQ ID NO: 32600 - DNA, 2300 bp, Homo sapien
attttaattactcatctctggattttttgaatttcaaagttcatgtttcacaaatatttaaaagaattttacctttaataagaatatcttctattaatattttatatagcatttttacactgtgaaagtagttacctcttcagcttaaaacattgtttatagtttaatgctagagaagaagttgatcaacatttttcacttgtaatcatcaatggatatcagctctagtttatcactagagccgaggatataaaccctgctccatgttttaatgtgatgggttttatcttcagatcactgtgttgccatttagttccaataaatgaaaatactctgataaagtggcattcttgagttgtgaaatagaactatgtcaataatataaagatgttgagcatttataatagtttttcatttaaattatttttctaaagttaagacttaaaaataattacccaacttgaataaagaagaaggcattattagtaagccaaactacatacaacagaaaaatcttcaattggcttttacaatttatgctattttatgttatttatcaactgttagtgtttcccatgatgctactctagtaataattattttattatgacatctttgaaatatttaactgcagtttatttatccattttgaattttgatgtgtatcactctgaaaattctgacttgacttcaatgcatctttgcattccaaatgttttaaaaggtagtaagaagtacctgaacgctttaattatttttaaaatataaattttttctttaatatattttagcctgtgcacctgaaaaactaactgatacatgacctatgagttactaggttttatttattgcttatgaataactggtaaatattttttctaacttgctagattttttttccctattctctgtatggcatatgtctatggcttgctaaccctcaaaaccttgtgcagtataataatactagtaatcctggatgcattaaaattattcttctgaaagaccacatcatcaataaatgctgagttttgaaggactccctcctacccctaccttccagtcttatagaggatttcattgaaaccacaccagtatttcaagtggaactactacgtacaaccaaagacacccatatacctgaggaggacttggagttgagaaaagcttgtagttctgttctgcaacctattaggggtgttgaaccaaattctcattagcctatcttattccactaaattaaatggtagaaactaagggatgtactaaagcaagaaaagcccagggaatcatgtagtctggaatgaggagaagtacctgaaagcactttacttttacttttacatatatcctaatgaataagtttaaagaactttacataatgtatataaaagtacttgataatatctttatgtgtttacacgaattaatagaaaacaaagagcaggtaattttcaacttatattgccacgttaaaaagaagaaaagagacatagaaaagaacttttccataataatccagtagtttaccttaattactaaaacaatgcacacaataaattcacacgcacatactctttcttttcttctaacatttatcatggtctaaaatgctgttattaacttcaggactatgtagcttactaatacttgtccgagtttcctattgctcattgttggcttttgttgagtttgtaatttttgtgtttaactggcacacatttacagcagaaaatcctgctttgaacttttcttattttgtccaatagaatctcgtggaacagtgtcatagctgcaaagtggaattctatcctcaaatttcataggaaatagtcgaactgtacaatgaaagattatgcaaatcttcaaggagcatctaatcaatcaccgcggtgtgagcggaatgcagcccatcgctgaattagcttctgttggaatgtattcatgtgtaacatcccactgactggatgacatcacaacagctccaggtccttgaaagtcttgaggatgattagctgaaggaattggctgtttctgccaatcataatccggcaaagctgcctttatagttctggagatgtgagagagagggagggagggaaagaccgactacagctaaacaagaggcacagcagcactagcaacagcagagcaggagcagctggtattccggtgattaaatagttctcatagcctttttgctgtactcggtctgctccctggtgtaattctcgtgtccaagaaggaagctgcattttaacggtgtgctgaacagaggtttgaatcattccagctggctg

SEQ ID NO: 32601 - DNA, 2300 bp, Homo sapien
aacacctatttgaaatacagtaccttaactatcgtgagaacttttattgatatttttaaatcaaatgtttcttataacaaaatcaatatagcattttaaatagataattcgaccaatgcctggcaatcgtctgaatacatgagaccaagaaagattgaggataatcagaaactgattcatatgttgttctgttgattccacctgtaaacttgtttattcaacgttaattccttgaagtattaatgtgtaattaatactccagaattaattctataatcaatgactattacatgacaaagacaaagataaacagtattacgttaacactatttggcttctagtgtcttttatcttttaatatatgcaagccaacatacagaaacaaatcaacttataatatttaatccatgttttagggaaaaaaatctttcaccatttcctagaaaggaagattggactcaaaccaaaatctaggaactttacctggatgtatcttatagttattattgattattgactgctgtgtgcatccattttctcactcgtagatggaagtgtctgttgcatttttcctacgctttgggtgtgtgggagccaaaaactttattcttttagttcacaagtcttcagaccaagagtaagtacaacaaaggataggactttcctttatctgctcctggatctgatttagcttacaaaaatatcctgtgtaagaagcctgaacctgatgctatattgatatgagactattgtttgcattggaaggaaaaagtgtatatttcatgtcagaggaaacaaaatttattcccaacggaaaggatgtggctatttttaaaaaattagcaaatactaggtacatttctcattaaaagttgatgtgtatggtccacaccctcccctccatcctcactccaccttgaagtaaaacaggcttgtgcctaccttggtattgaaaattatataatataacttctaatactaggtcataaaaggccatttactttctgtcttgcttgctagaaatcccacttttggagcattaagccaccctttcatgctaatgccaacaatgcacctagaggccataagtaggcattctggtagacagtcctagagtaccttaaccttttcaaggcttcttataaactttgtgtttataagcatgaattagctttatccttagggcaagtttagccttacttaaaacagtgtagctttccttggatcttgtctgaatgttgcaagtgttcaatgaggattctactttctggctgttccagtcttgaaagtttccaaatcctacgtgaagtcttgggaaacttcaattcacaattcctccatatatgcaaaacctacacaaatgacatatgaggttcttttctgttataatgaagaaattaagttttgagctttgtagccaaaaagagacctttccatgaactaatacatctctccctctaagtgccagtctttcaaaatactggctagacgttatcatttcaaacattattattattgcaaataggggaactagttttaatatgctatcttgttgacctagtaaatatttccaggtataattgatttacaataagagacaatacagcgtaatagtgaaaaacaggcgctctggagccggactggatttaaatctttgctctaacccttactagggaggtgaatttggccatattacttaacctctctgtgcctcagtgttttgtctcttgaaaaggggtgggggaggggagattatcacagtatctacctcactgggtgtttcaggaaagttaaattcataaatataaataaaatgcttagcacagcaactggtaattagtactgggagtttgctgttattattatgctattgttgttataattaatgatctgaagaataaccagagctctataggtttatcatgattactaatgaagatgccactaaaaaaaagaattcaggagcatcttggcggtggcagcgagtttgaagatgcgacgatcaacgttgaagatcaccgctcgcaaccccgggcctggcgccgggtaggggcgcggcgctcgatttccttccctgcctccgccgtccccctggtgcgcatgctcagctcagctcggccctcgcctttgatttattttttttctgggcggccgctgcgacccgggactgacttcgggatgggaagtggagcccccggagctgctaccgtggcggcggcgctgtgaggagcagccagggggaggcagctgcggctcgccggtgagtatccgggaagcgccaccatggggctccgtaagaa

SEQ ID NO: 32602 - DNA, 2300 bp, Homo sapien
ggaaattcagccaatgatagaaattgccgtcatatcctttacgtttcttctgaattaacagtaggagttccctgtcagactcatctaacacaaatggtgtcatatatcatctcaaccatgtattcaaaaagcatgtatggcttacttactttgtgtcaggccacaaatgctacttgccctctagttccttagaaatcaggaagaacatacataaaataacttggtaaaccacaaattaaacaaaataatggtagtgacatgaggaaaataaagttctaagattgagtttctgacagaatgggaattctttagatacttttctcaagtatgtctgagataagatctgagtgacaggaaggagctgacatatttaggtcagagtaactgtaatttaggcagaagggatagctgttacaaaggttctgagcttgaaacacacatgatgtatttttttcaggtacaaaaagaaggtcagtgaggatgaagtgtagtaccagtggggaatagttttaccatatggcatggcagacataggccaggaacacaaacattttaaatttgttatctcagttaaggcatttagattgtattctaagtttttagaaaacactggaaggctttaaataaaaccccttttaaataaagagctagatgtttgttgacaaaatattagtgagtgtgagaaatcctgaaatttaaacataataattatttaagtcagaatagtcaagattatggtacagtaaacaaaactatcctctaatctctcaggccaaatgaattcattgtctttgctctggacctaggcacatggattcacttccatctgggcaatgtttgtactcatgcaaaataaaaagagaaaatagtgaattatgtgctggatcctggagtttctgctccaaagtgatacatgtcatttccactcactttctttttttcatgaaagcaaattccataaacaagctggaggcttatgtggcacagaagtaataatccttcaccaaggtaggacaaaaagtatttttaaacaatatagtaaccaaataatgcatcatgtcactgatgtacttcagtaactaatcatattgcaattcttaagctaatattctttgttatcatatattgaaaacaacatattttagtcactttactggagttatatttctacaactaataaacacacacacacaaacagaaacattataaacaatatcgtaattctaaaaaacctgccactcaaaaactaatattaaagaattttaagaaatgacaaggacttacctattttatactctccacaggaatcttgatttagataattaaagatgagatttcagaaaatgggaaataaaaataaaaaataatgttaacatagaatgaaaataaaatgagaaagaaaatacggcagagaaatatagatgtcttcgtcatctattatgtgttttctagtgtgatatagctgttgatttggggctaggcacatggctatctagaatggtaaatctgttcttcagaactgtttgcaaggaagtgtggacatatgacagtattttggtcaatgaaatgtaagtggcagtgtctcatggtgacttctagaagcgtttctttaaaaaaaaacaagcaaacaaacaaaccaagaaacccacaaaaatattccatttacagttttctttaaaatttattgattctactaccttccacctcccatagaggtgctttcctgaactatgagggtaagagacacaaatcaggaatggtggagcagtgagctggggatagcctggtccttgtacttacaagttttggaggattttcctctgaactcatacttatttgagagcaaaataagcaactatcttttatttcagaacttgtttgctctcttcagaaagagagcaaagagacaacttgatgtcaggaatatatattattgctttatgcagaaaaagatggtgtcagaaactttggtctcagtcctcaacttgttttccttactcatggatgaaaggtacagattatgaggttagaggttcttttagttttaacagctgagatgaacactcaatttaagacaattttatggtccgtggtgctctgggatcccgcgcttccgagactcgcagtctccgagagttgcctgtttttttcctgcctggacgcgcatgagggcccggtccatggaccgcgcggccgtggcgagggtgggcgcggtagtgagcgccagcgtgtgcgccctggtggcgggggtggtgctggctcagtacatattcaccttgaagaggaagacggggcggaag

SEQ ID NO: 32603 - DNA, 2300 bp, Homo sapien
agaggaggtagaaaaagaaaagaaaaagtgaatatcatttctgaatctgcctacattccctgaaacatttaggaatttatgaattcatgaatcttgtctattctctgaaatcttgtagaagagcctgacctcctacagctatatcaatataagcgactgaagggcagagagtggtcctgcttttcttttttcaatattattgtattcccagagccatttagtaggtgttcaataatttttttgattactaaaatgatgaatgcatggctgctcggaagacagagcaggctctctcttgggtaaggagtacatagaaaaataaatgtgggttcttaaaattcttaaaaggcacaagacttccagggaacactccaactaaaaaataaataaaaccaatctaatacatgttacttggccaaagaattctagcatcctgacatttttgtgggcttccagaaggagcaattggttcagtcacatctgtaacccctccatcacatagaacaaaaaggatatataacttcctgattttaaaacacaattccaactaaccctttcaggacattgggttctaattgaaggtcttgaactacgaatccaaataccctgataaagttaataaacaaccagaatatttaattactgtatcatcgtttgtgtctctttcagtttcaagggacagcaaatgcagtccaagctgccttaagacaaaagtgaatgtggccagtcgcggtggctcaagtctgtaatcccagcactttgggatgccgaggtgggcggatctcgaggtcagtaaatcgagaccatcctggcttacacggtgaaaccccgtctctaccaaaatacaaaaaattatccgggcctggtggcgggctcctatagtcccagctactcgggaggctgaggcaggagaatggtgggaacccgggagacgtagcttgcagtgagctgagatcacgccactgcactccagcctgggcgacagagcgcgactccgaatcaaaaaaaaaagtgaatgtatttgtttatgaatgaaaatatccagagatagaacttatttcagctacagctcgattccaagctcgaaaatctccatctgggtttcacttttctccaactctcagttctgccttcctgagtatcagctttattttcagacttcaagctctaagctcacatcttcattatgcaaagtccagtagaagagagtccactttcttaagagaggaaggaaaaaaaaaagtcccagaatggtggtttttttctgtttttctctctgattggccagacctgggttacatacctacccatgctaccaggacagaaagccatcactggccagacctgagctgtgggtctaccagtgagtcagcagcggctgacatcacctaaagcaaatgggctgcggggtgagatcaagtggttggatcttccaaaatgaacaggagtactgtttcaacaagagtgagtgctgggaagcaaaaccacaaatggccaatacaaagtatcattagtagaccccacttaatacaattcacatgttagtggaaccaaatgaaatttttaaaaatatatatcattcgattcacacttctaatcaaactatagttctggagagggtaacctcacaccttgaatccaaaatatctcttcagttgctggccttccacttgtcttcaggagctgaaacacatggcatttgaaaaaaactggcgaacagaggaaactcttgcagcctcgcagccgccctggtccagtgccaacggcaggagcaccacaggaagggaccgcgcgggtgcgccccacccttccagcgtcgcctcggggactcgcacccctttccctggccgcacaagacgtttcatccttggcggccgccgccaacccgccgggaggggcggtcggaactggcaggccggggcggaacccccggggtctccttgtcgaggcccgggcagccagatcctcagggccggtccgggcgggagcccggtcgatggaggcggctcccgtcctcagctcccgctccctccccttccccggggcgggcgcgcgcgggccgggagctgggaggcggcggctcccgcccgggaggcggtggcgagggcggcggaggcgcggccgggcgggtcccagggccgtggttctccagcgcaggagtccccggcgcacccgctgcgctcgccccgcagccgcagcctgagcggccgaagtcgccaccagctgtgtccgcgcagatcccgggcgcggaggggagaggtcgcccgcttgtcgcccccgccggaccccgggcaccgcgt

SEQ ID NO: 32604 - DNA, 2300 bp, Homo sapien
tcgcggtggctcaagtctgtaatcccagcactttgggatgccgaggtgggcggatctcgaggtcagtaaatcgagaccatcctggcttacacggtgaaaccccgtctctaccaaaatacaaaaaattatccgggcctggtggcgggctcctatagtcccagctactcgggaggctgaggcaggagaatggtgggaacccgggagacgtagcttgcagtgagctgagatcacgccactgcactccagcctgggcgacagagcgcgactccgaatcaaaaaaaaaagtgaatgtatttgtttatgaatgaaaatatccagagatagaacttatttcagctacagctcgattccaagctcgaaaatctccatctgggtttcacttttctccaactctcagttctgccttcctgagtatcagctttattttcagacttcaagctctaagctcacatcttcattatgcaaagtccagtagaagagagtccactttcttaagagaggaaggaaaaaaaaaagtcccagaatggtggtttttttctgtttttctctctgattggccagacctgggttacatacctacccatgctaccaggacagaaagccatcactggccagacctgagctgtgggtctaccagtgagtcagcagcggctgacatcacctaaagcaaatgggctgcggggtgagatcaagtggttggatcttccaaaatgaacaggagtactgtttcaacaagagtgagtgctgggaagcaaaaccacaaatggccaatacaaagtatcattagtagaccccacttaatacaattcacatgttagtggaaccaaatgaaatttttaaaaatatatatcattcgattcacacttctaatcaaactatagttctggagagggtaacctcacaccttgaatccaaaatatctcttcagttgctggccttccacttgtcttcaggagctgaaacacatggcatttgaaaaaaactggcgaacagaggaaactcttgcagcctcgcagccgccctggtccagtgccaacggcaggagcaccacaggaagggaccgcgcgggtgcgccccacccttccagcgtcgcctcggggactcgcacccctttccctggccgcacaagacgtttcatccttggcggccgccgccaacccgccgggaggggcggtcggaactggcaggccggggcggaacccccggggtctccttgtcgaggcccgggcagccagatcctcagggccggtccgggcgggagcccggtcgatggaggcggctcccgtcctcagctcccgctccctccccttccccggggcgggcgcgcgcgggccgggagctgggaggcggcggctcccgcccgggaggcggtggcgagggcggcggaggcgcggccgggcgggtcccagggccgtggttctccagcgcaggagtccccggcgcacccgctgcgctcgccccgcagccgcagcctgagcggccgaagtcgccaccagctgtgtccgcgcagatcccgggcgcggaggggagaggtcgcccgcttgtcgcccccgccggaccccgggcaccgcgtagcacccaagcgccacccggacgaggggccctggggagcggctgaggccgaagacccgagggaaggaggagcccgcggacggctgcagccccaggtaatctccatggaggacggggccggtctcctcgcccagaaacccgatccgggcgccttggaatgcggactccagaggcggcatctcgaccagacaagtttctcgcggcttggaatgagggagtcctgaaaccgacactcgttttatttaaccagcttttttctcctgttttaaataagtttatttagacaatggaaagaaaaaaacaaacagcctcttgagtgactgtgggtttgtaaatataatcctaaaagtttttcatggtgtggttatttgcttgctcatatttattaacctgttaactcttccgctagtcagaaaattgacatgtaaaatattctttgaggaacgttacaagtttgctgttgtattcgggcatcctgttattcatcagcttagttagcatctgtcttcccccgaagtggtaccaaagccggtcccttggcgacgggtcttgcatgtgacactcttgccctctagtgcctcaccagcttggtagcagtttgatggctaatattaataagatgttacataacatgagagtactgggccaggactggtgttgctaccacttgtaaagtcaaaaagcctgagccgatggtaacgagtggtactgtttccgtttcttttcca

SEQ ID NO: 32605 - DNA, 2300 bp, Homo sapien
ttgctttgaactttgaatgatttggaaaacattgtaatggcactaactgtaagttactcaattatattctcaagtcttgaggcaaaggccatgtctgctcaataaacatttgctggagtctagtaaatgtttaacaactgaacaagatgttcagaactgacaagaatattttaatatagataggagggaacgtccatctcctctcttttggacactatgctttttttttaacactagatcatactgcaatacactatacttttattactgcagcaaaaccaatttttacagcagaagtatcacgctgctagtatacactggaagtttagatttgctaagtgttttaagatagaaataagtccacaggttatttcctcactatattttctcctattcatctcagcattcatatgacagatgtgccattctatgttaaatttttctgatgactaccagtttcaacactaaaccacaaaaggaaaaaagatatagtgcagggaaaagcattgttgaagaataaatattctataatgaactgttcactccatgtatcaaaagcagaactgaaatgttacctagccatcatttgatcagttctaacaggttcaccttgcattctatctttaaaatccttaggctgggcgcagtggcttgcacctgcaatcctagcactttgggaggccgaggaaagaggattacttgagcccaggagcacaggagatcagcctgagggcaatatagtgagggcttgtctttcaaaaaaaaaaaaccttaaaaaaaaagtagccaagtggtggcacacgcctagcaggaggctcgcttgagcctaggaggtggaggttgcactgagccaagatcatgccactgcactccaggctaggcaacagagcaagaatgtttctaaataaataaatacataaaataaaatccttaagccaatcttcatttaccaaccaatttttaattcttttatttgttaccacattgtctctcctgaatatccaaaggctcaaagccttggtttgaatgcagctaaattcattgggtttgatctcaagtcaaacttagaaatactgtcatctcagccacaaatttcacactaaagtagatagaaaccactactaaatcactactttgtcttaaaatgaaagtataatagactgtaaggttataattgcttttttaagttaaactttgttttacatttacagaaaatttgcaaaaatggagtccccacacccccttcatccaatttcccctaccattaatatcttacaataccatggtatatctgtcacaataaagaaatcggtattggcactattacctaaattccacactttgttcagattcgctagttttccattaatgtcctttttctgctggagatcccagccaggataccacattacatttaatcattatgcatcattttctctggcataatagtttctcagacttttcttgtttttgagtagtgattaggtaatttgtaaaatgctaaccagcgatctcagctcaccataacttccgcctctcgggctcaagagattctcccacctcaacctcccgagtagccgggactacaggcgttcaccaccacaccaggctaatttttgtatttttagtagaaacggggtttcgccatgttagccaggctggtctccaactcctaacctcaagtgatccgcccgcctcggcctcccaaagtgctgggatcacagacgtgagccaccgcgttcggcccctttttctaatattgtctaaaataagtatcctaaacaggaaataccaaaaaaatccccctcgctttcgtgacctacaccggtaagcgtcaggatctttcgctatgcgagaaccttttggctctcgtatgtgcgcatgcgtctggatccggagccaggtgacccgctcagacgtggaccatgtgcgggggaggggggaaaggagccgcgaagggggtggtagacggaacaggtggagccgcggcggggctaggcggggcggggagtgaaacagcataggctccgcccctcgcggcgcttcccccggaatagcgtcatcagttctataagagagcgtgtgccgaaggcctcggcctttcacattcgggaagcgtcgggattaggtgaaagtacgtagttgtctttcgtaagttaaaatgataattgggccgaaacttactgccttacctaaaaggcagcgcagtcaggatattggtaggtcgggggcggctttggaaacccttaagtttacaagcatgcgcggacttgagtgctcattaggtcgccgggcgtcca

SEQ ID NO: 32606 - DNA, 2300 bp, Homo sapien
tgtgtagcctaaggtggaaaagctagtcagaaagaaaaagggctgacccctgatagaactgtcacctattatttcaaaaatctgtgattgatgagctctgccaaccctcactaaaatgaacaaatagactactccagatatatattttatctttcattgtcttccacaagtatagatttaactatgcttttggagccagaaaagtattagtaaaaaaataatgggtaaaaacaactggaatgaaaacaacttgaataaagatttgacaaatacatccctggactcttaacatcatttcttttacccaattctctctaaagtaaaatcaaatatttcattaataggagtgaaacaaaaaacaataaaacgacccacaaaattaaagatggattttttttttttttcttgagacaacgtctccctctgtcgcccaggctggagtgcagtggcacgatctcggctcactgcaacctctgctcccaggttcaagcgattttcctggctcagcctcccaagtagctggaattacaggcgtgcgccaacactcccccggctttttgtatttttagtaaaggcgggtttcatcatgttggcgacgctgttctcgaactcctggcctcatgtgatccgcctgcctgggcgtcccaaactgctgggattacaggtgtgagccacctcgcccggctaaagatggcttatttaaagctagtagtgaattaattcagttcctaattgaaacctaggttttaacaataaacatttgaattttgttcaagttttcttcagggtacattatattatgagacagcattgctttttcacaacgaaacgtgaccatgccagaaaataaaatgttgccttctttacgggcttccttctccttgtcaaactttggtagcatagtcagaaacaactgaaaggcaaaatactaaaacatacagctccagtaactttttttttttaagattctaagccaacagttttttggagcctgcgggaggggggcgaggagtgttgaaagggccctactaagctgaggtcgagccaacagtgaagcttcaaaattgtcagcaggcagagtctctggagaggcaaatgaataggcttaacagaagtcccttgccctgcaaaaaacgaggcaggtgctaggggggtggactttttggataggatggaaaccgggacggatgaagtcttctctggttagagaggaaatttggtattaagagagcctcactgaatcccaataataaccaaacaactggtgttgtccagggcaccggctggaaagtgggaggcaggaagcagaaaggctcaagctcctttccctgagtcggttcaggattttaatttcagccaatgtttattggggcacggtgttaagcacggtgatatcaagctgaataaaacgtggtcttgtccttgaagagcgtatagttcagtgaaatggctttaacattcctcgtgggttttgataacttttatcctgggagttgtcagggaagagctgcatctaaatccatccatactttggtaaagatttcaaaacagaggaagcaagatacggggcgacgaggttggaggagagatgacggcaggggccggtgccagatttgggagccgccaacgccgggctgtgctggtgctgcatgctggcaaggggcagccaagaccgtgctccgcgcgggcaccctcgggctcggtcccagcagctggcagtgccgtgcgggcggactgcggtgggcctggcaggggccgagcgtaggtccggagcagcttgcgcggccggcgcccgcccccagggggcagagttcccgggctcgtgcctgcgccgctacctggggctcaggcccaaccgctccccgctgcgtccgcgccttctcttttccggtcctctccgccggccggggctcggctgagctccagatttccccacccgcggccgccgccaggggacaggagccgaggcgcggcagggcaccagcggcgggaggcaaggttggggaggcgagggcggtccgcgtgcgggggcgggagggggctgggggattcgagggacgcggcagccccgcccccgccccctcctcttctccgctccaagcccgagaagctggggagcatggaccagaccccgcagcgctggcaccatgacgctcgcccgcttcgtgctagccctgatgttaggggcgctccccgaagtggtcggctttgattctgtcctcaatgattccctccaccacagccaccgccattcgccccctgcgggtccgcactacccctattaccttcccacccagcag

SEQ ID NO: 32607 - DNA, 2300 bp, Homo sapien
agaacttattccccatataaataaacagacttcctctactccttcttctttagcattaacatctgcaagtagaatacgagaaagaagtgagtctttggatcctgattctagtatggacacaacccttattctaaaagacacagaagcagtaatggcttttctagaagctaaactacgtgaagataataaaactgatgaaggaccagatactcccagttataagagagacaattctatttcaccagaatctgatgtagatacagctagtacaatcagtctggttactggagaaactgaaagaaagtcaacccaaaagcgaaagagtttcactagcctctataaagataggtgttccacaggttctccttccaaagatgttacaaaatcatcatcttcaggtgctagggaaaaaatggaaaagaaaacaaaaagtcgttccacagatgtgggttcaagagcagatggtcataaatttgttcagtccagtgggagaataagacagccttcagtagacttaacagatgatgaccaaacctctagtgtacctcattctgccatctctgatattatgtcatctgatcaagaaacttactcttgtaaacctcatggacggactccacttacctcagctgatgagcatgtacattccaaactggaaggaagtaaagtaacgaaatctaagacttctccggtggtatctggttcatctagtaaatcaaccacccttccaaggccgcgacctaccaggacttccctcttgcgcagagcacgacgtggtgaagcttcagacagtgaacttgccgatgctgacaaagcatctgttgcttctgaagtatccacaacaagttctacatcaaaacctcccacaggaaggcgtaacatctctcggattgatttattggctcagcctcgtagaacacgacttggctcactgtcagctcgtagtgactctgaagcaacaatttctagaagtagtgcctcttcgaggaccgcagaagccatcattagaagtggagccagactagtaccatcagataaattttctcctagaattagagctaacagtatctctcgactctcagactccaaggttaaaagtatgacctcagctcatggctctgcttcaggtaaattggatccagatttctaatagcattagcatgttgtatatttgggggctccttttttttttttgaaaaaaaggtaaggttctagttgtcttcccaagatactcattcaaaacaaaagttatgatatatggggcagtggcgggggtggggggaggtctataaaacagttttatttagcatagtaaatggaaaatcagaagttatatatacttccaattagagtcctggcgcaaaatagtgatttcaaaattaggaattcattgagctgatttaggagttttaattttccagttggtgatatatttggatgtgtgtgtcaaaattaaattatctggaattatctggtttaaagtataggaattaacattgtgcttctaaaagcatgtgtttaacctttaaatatcctcacataattcaaagcccttaagaacttgaagaaaagcagtgtatgctttattactctttcagagttaaatgaaataatcaatgttttgttctttttttcccctacccattttgaaatgtctcacatactttacctatactttttaaagttaaatctgtttatagttggagcaggtgaaaactaaccttaatttatttcagtggaagaagatggattcatggggaatcactcagcatatattggccaaactgggctgtagaaatttaactggttatgagcattatatcacaaagtgctgttatatcatttaactctagtaattaggtgtaattgaatataataactacaaaaactacttactttccaccagaatttaactgatgctgttatatttgtttgcttatgtgctttgtattcagagctgaagccattgagatacatgtgtgaccaaagagtgatgaggtggatatttctttgtgtcctatatgcatgttctcattacttcataatgagcctcatatgtgggcgtggctgcaaaggccagtgtgggaggccagctgttacaacagacttgaagatgtgtgattattttcagtaggcagacatctaagtaagccctaagtcttgagttaagagtggaggggaattgatatgaaatttcatctttttatttttgattggtttacatctaccacaccatatcctacaagaccctaaaggaacagtactttgcatatgatacttttttcacttttcttcctctt

SEQ ID NO: 32608 - DNA, 2300 bp, Homo sapien
cgcatgaggcaggggtcaggcctgcaactgctccaccctcccaagcctgcctcagcttctcccactcctgggtatgtgttgagctcttggatggtgttggttactgcaggacgttcaaggtcaccatcaagctcagatgcagcaagaactgaaaaagacttcggtccatttttgtgggctccagctcagctccttattgtggtttcacgttgctcttcctcttttttttttttttggagacagagtcttgctccgtcacccaggcgggagtgcagtggtgctatctctgctcactgcaacctccgcctcccaggttcaagtgattctcctgcctcagcctcctgagtagctgggattacaggcatctgccaccatgcccggctaatttttacatttttagtagagacgggtttcaccatcttggccaggctggtcttgaacacctgacctcatgatacacctgcctcagcctcccaaagtgctgggattaggcgtgagccactgtgcctggcctgctctcttttaatatccatctttcctttctgatatattaatagtttgtatacttgtcccacccaaatctgatgttgcattgtaatccccagtgttagaggtagggcccggtgggaggtgactgaatcatgggggtagaattctcatgaatggtttagcaccatccccttggtgctgttctcacagtagtgagttcttgcaaaatctagttaaaagtgtgtggcacctccccccatcctcttgctcctactttcaccatgcaacatgcaagctcctgcttcgtctgccatgactgtaagcttcccgaggcctccccagaagccgatactgcagctatgtttcctgtacagcctacagaagcgtgaaccatttaaacgtcttttctttataaattacccagtctcaggtatttctttacagcaatgcaagaacagcctaacacacttctcaactgcccaccctatagacgtcaacttccctcagacacaaaaacagcttttcagagatgacttaaccagctcccacaattgcttaaggttaaatacctctgtcaacctaaataacagagagaagctctctaaaagatacttatttgggaataaagcactgcagtggaaatatgcatgcagcagtaaactatgttggtattcagggcggttaaaggaagacaaagatttttaaaggaaaaaataaggaggattacataattgtttttgaaataattatcctgggctacagagaacaatagcaagggtgatgccagtccgagagtgtataggcagtcgctgggcagatgtccttgcaggagtattttttatgtaaggttgtgacagcctttgtgctaagttgtagtttttattgcttttggtggtcgtttctgttagcaggcatgtaagcatgagaatcctcttcatgtctttccctggctctatttgtcaaggttatcttaacataagtgactccatttcgatgctgacaaattacatacctctaacaaaaccctgtatatatctatttctatctctattatctctgtccctaccatctctatctctatcttcatctcatctctatatttctttttctatctctcatctctgtttctctcgtctatcatttctatatctctaacacctgtatctatatctctatttctatcttctataaaatctcctaatgcttctgcttctggttgaccttgactgatacagttgctatggtcaaatgactcccaaccaagtaagaagaaaggttttgaggaggtgaagcaaatgtccatattctggagtctctggagaagaggaaggggccttgctaggtggagcaatgctgactccactttcctgagcttgggctggactttcacttcctggttcacaggctgctggtaagatttgtctctctcttttttttttttttttttttttttttttgagacaaagtctccctctgttgccaggctggagtgcagtggtgccttccgtgacgtgaggcttccgtgacgtcacaagggtgcgccctccgtgacgtcacaagggcgcgccttcgccgacaccatagaggtgggcctttggcggcgtcagaggcgcgggtgttcggctacgtcactggggcgctacggttcctggagctgggcagtcttctcgtcagagtggggactggtaagagcgacctccccgccaggtcctgtgtgttgccggctgaagaagggtaggtgaaaaattcagacccagcacagtgtttatgttggtcaaaaatagaaaactatgtctggcgcgttcgaggcg

SEQ ID NO: 32609 - DNA, 2300 bp, Homo sapien
tctgcccaactccaacagttttgtaaatattacatggaagtacatatctgcatcagtacagttccaggcaggaaaacaaataattaaaagtattttaaacagacgccattcactatggagaaatagttaagcagatattgaaggctagaagagcaaaaagggagaagtaagattaaatcagaaattttaaactgcaggatggctaccagtccttgagctggtggaacagaaggtagaagtagtagtatcatagcacaagagcaaactcactcactgttaagggtgtcactttcttaaggtaaggaaaggaggggctgctccaactggctctagactttgtaagggacatagtcatcgctctagatgccagaagcagagagtaaaataaatggacaatagctttcccatgttccaccttttgatttcctgcctgtgcctcctgtgggcagagtcttacaggaagccatctaacaaggaaggctgggaaatgtagtttgtggactccctgcctagccatcatctcgaagcagagggtaggtgagtatggggttcaaagattacaagcaagtaacctgcatagcaacttatcaggaaaaagaaaaatcctccattagacagtaaactcataaagaaaaaccgactttagtttttaatctttgacagactttatagactctagggcctatcacagtgcttgccatataaaatgctcaatcaatatcaacagatatttaagtgaataattgcctattctcaccattggtaaaatttaaatcagtattcaacttaaatgattgccagataatacaactgatttttaaagaaatacactttaactcatatggacataaatattttacagtatccaagtagtgctgacattactcaaggaattgtttaggactacttgttcaaaattgtctttcagacctagttcttcggaaatacattataattatttctataaaagtgggcatgactaagtagaatctagtcttgcccacttttggcccagcctgactcaactggttttgatctggatgacttaatattatttctgaaaattaaatctactctgaaagaacagacttattactaattttgttaagtacttaccgcgatttccaattaaacttgaggcaacatgatgtcttactccacttccgccactgtaggcttgaaataagatggcaagtgtggtgaataataatggtaataactcaaataagactttggcctttgctgccatcctatgaagacagaatcaccaccccccagccctcacccctcacccccgcaatccgagtaatttcaggaagctatttgtttccttatccttgggttattttcagttaagacaaatgtacaagcacaaaaaggagtctcttagcttctgactcctaggacataaaccaagacacgctttactatcacatactcatttccctaaagggaagaagccaaaaaatgcatactatagtaaaatgggaaacatttcaagggacagtaaggtgtggggaagagtgggcagatgttgtggctgttacctgcgtgaaggtaaataaaatattaacaataacaagcacttctacaccgctatgtgcaaggtgctatttatcctttcaatcacagctctgtgaggtagacacttatgactcccattttacagatgacaaaactgaggctcacgaaggtggttaactagccaaggccactcgtctaggaagtgagaggccaaggttcaatcctaggcaatctggcttaagtttgtgttctgttaaaaaaaaaaaaattaaaggttatctggcaattttttaaacgtcaggactgtcatctgtggaatcaattgaaaagggaatcaacacttcagaaactgtaatacaccaagggaacctgctatcctgggaaagagagataaaggagaagtcagctgactgtcctccttcagactagctcagaccaccccaacctgcgagggccctggagacccctgtggcgcaacagatcccttactgggtcccttccaagtggcgtcacatagcaagcgtccagaaggaggcgggacttccgggccaagcgagccaattccggccgcgccggaagtctctactgaggaaagctatgaggatactctgttcgtaagctcccggtgaattttgttccacagactcggaagaaaggttggataagagttcactggagattgacaagtactcgggatagtgaaaagccggagttggaacatggatagccgcttgcaggagatccgggagcggcagaagttacggcgacagctcctc

SEQ ID NO: 32610 - DNA, 2300 bp, Homo sapien
agccatattccacaaatctgttcatcagaccataaagaggataggtttcagaagtccatttactaaaaccaagtttcattactgaaaaataactgcaagatgactaattacactctatgagcattgctcctatcacttttactgatctgaatagtagaatggaaaatacagcctcgattttaagtagaactgtgcacaatctgtattttctgcatgtgcactctactaatcagcaaatgttaacttactcatacacaagaaagaagtgaaggacaatggtttagaagacaagctttggggagacaaacctaggttctatttcccagcagagaagtgagcgaccaggagtaaaattccttaacgtatggagcctttttcattacttgataagtgaaggtaataatacctgtttcaggagattattgtgactaacacagagtaagatttcaaatattaactgtggatgtgacaaggatactctatataagatgcagaatctaaaatttacactcaggctacttccagtgttgtcttcagaaagatgtcaaagaaaatactgtaaacgtatttcataatgaaaccacaatctcaagaatttggggctgacgacgaagaaaagaaagaaatagatgaccatttaatagtgaagagaaatgtaggggataacatgacactcatcctggcgtgaacatgccagacactcggtgggagttccacaaagcttaaaggctaatcctggcattcggtttagcaccacaaagaccgcggaaggaactggaaaaacattcgggacaccgcgaaaattgagaactacaaaggcagaaccagggatcaagatcgcaggaccagaaaggccttaacagcggcaggtagagaagggacagaaaaaggcggggtgtggagggaggaggcggccgcgcactcgcattctcgatccctcccacaggggacaccagggccgcggacctgctgcgcgaggagctgtcgccgtaacttctgccgctcccggatctcctgcaagcggctatccatgttccaactccggcttttcactatcccgagtacttgtcaatctccagtgaactcttatccaacctttcttccgagtctgtggaacaaaattcaccgggagcttacgaacagagtatcctcatagctttcctcagtagagacttccggcgcggccggaattggctcgcttggcccggaagtcccgcctccttctggacgcttgctatgtgacgccacttggaagggacccagtaagggatctgttgcgccacaggggtctccagggccctcgcaggttggggtggtctgagctagtctgaaggaggacagtcagctgacttctcctttatctctctttcccaggatagcaggttcccttggtgtattacagtttctgaagtgttgattcccttttcaattgattccacagatgacagtcctgacgtttaaaaaattgccagataacctttaatttttttttttttaacagaacacaaacttaagccagattgcctaggattgaaccttggcctctcacttcctagacgagtggccttggctagttaaccaccttcgtgagcctcagttttgtcatctgtaaaatgggagtcataagtgtctacctcacagagctgtgattgaaaggataaatagcaccttgcacatagcggtgtagaagtgcttgttattgttaatattttatttaccttcacgcaggtaacagccacaacatctgcccactcttccccacaccttactgtcccttgaaatgtttcccattttactatagtatgcattttttggcttcttccctttagggaaatgagtatgtgatagtaaagcgtgtcttggtttatgtcctaggagtcagaagctaagagactcctttttgtgcttgtacatttgtcttaactgaaaataacccaaggataaggaaacaaatagcttcctgaaattactcggattgcgggggtgaggggtgagggctggggggtggtgattctgtcttcataggatggcagcaaaggccaaagtcttatttgagttattaccattattattcaccacacttgccatcttatttcaagcctacagtggcggaagtggagtaagacatcatgttgcctcaagtttaattggaaatcgcggtaagtacttaacaaaattagtaataagtctgttctttcagagtagatttaattttcagaaataatattaagtcatccagatcaaaaccagttgagtcaggctgggccaaaagtgggcaagactagattctacttagtcat

SEQ ID NO: 32611 - DNA, 2300 bp, Homo sapien
ctcactctcattctttactcccaaagaataatttagttatttatggagggggtcagtcgggtggggagattttacagtggtaatccatggccacattttcttcctcacctcaaaaacattgaataagattgtcttcttgttttctttcattctttaactccatttttttggttttgttttcatgattagattttccttctcatttaccacctgtttttcttccctctgccttctataatccaatctcctctgattagactttttagtcccaatagtgtcattgtgggccaacctcacccctttgtggtatttaggatcacagatttctgaactcttaatatgacctcattaattagaagcaaccagtgaaatttcaatctgatattttcaaaccaaatggacatgctttatacaggaatctaagaacattcttgatccttgatcttgataacatgtaaaatggctaactagtaactagaccagaaatagcatcggggcgatctatctggttcctgcatctttttatcatagttttccttggctgagaaagtaatccagtaccaaatgttgttaaatgaagatatattatgctagagaaaaaattagaagagagtgttctactcttatgaataaacatatatttaactgtccttggttctttgaaaggagattagaagttgacgggggaaacaaactgcaaagtagaatcattctgaaatacgtttgcctgagacggttagaaagttctgttccccacattccttacttagtacatcatgagaagagacttacgatatgaatttaagatgcagaataaattctaacagaccctcagggacattttcttttcagtgtggattctgataactctatatccattttcatcatcaagacagaaaactaagccaggcatggtggctcacgcctgtgatcccagcagtttgggaggctgaggtgggcggattgcttgaggtcaggagtttgagaccagcctggccaacatggcgaaaccccatctctactaaaaaaacaaaagttagccgggtgtggtggtacatgcctgtaatcccaggtactcaggaggctgaggcaggagaatcacttgaacccaggaggcaaggttgcagtgacccgagattgcgccgctgcactccagcctgggcaacagagtgagactccatctcaaaaaataaaaataaaaaagagagaaagctaaaaagaaaccattaatttatagatcagatatttcatttatctgtttgcaagttattatctcgtatgtataatttttcttttggatatgtccttgttcactgacttgtgctattaagtggaaggaagtgacattcagatcagtcaaacttgattattagctattctaacaatattgatttaggagaaagttaaacaatataggacactataatttcttaaatcatcaggttgtgttcctagaattgctgcattgtgttaggttgtagtatctcacaagggcatgtactttggggcagttagaatgaggtcatgtgagccaaagtgagggtggagagaaggtacaggtagattatgaaggtagaattaaaaggatttgtttattaattgagggtaaagaaataaatgaattagggttcatctggaagttctacactgaataggaaacatgggaggaagaacgtgtttgtggaattgtaggagtttgattttgcatgttatcattcattaatgacacatctaaatgcatgaagcatttccttttttaatctatagtactgcaatctctttattatgttttatgtatttatatgtctatccccagcgaacttcaagcatcttacaacatggactatgccttattcctttttatatccttgacactttgcacagaacctatgacacaatggcatttaatatttttttgatgagtttaagatgcatgaaaagcataacggaagagatatcctgttggcagttagaaatgctattcttgaagtggaaatataggttatgaaatcatttttaaaaaattttattaaactatgtatatatctaaacatatatatatggtatatcctatgtgctaggcactattgtgctttacaaatcatttaattatcataacccaattatgaagtagatatactattattccatattcagctaaaaaaaaaaaacactgagaaaaagacagggtaagtaatttgcccagggtcacacacctgctaaaagacagagctgggattgcatcctaagcagtgagtgggtagtgctgataacagctacaccagactgctgtagcacta

SEQ ID NO: 32612 - DNA, 2300 bp, Homo sapien
cagcactttgggaggccagggtgggtggatcacctgcagtcaggagttcgagaccagcctggccaacatggcgaaacctcgtctctactaaaaatacaaaaattagccaggcttggtggcaggcacctataatcacagccactcgggaggctgaggcaggagaatcgcttgaaccctgtaggtggaggttgcagtgggcaaacatcatgccattgcactctagcctgagtgacagagcaagactctgtctcaaaaaaaaaaaaaaaaaagtgccattaaaagacttcccaaattatagtacctagaaatcctatactcacctgttcatttaatttttcttgcttctccatagagtcccctttacttggtaaatcacggcgagagtggaccagtcagatgcaacaggtgcaaggcctacatgtgcccatttatgcagttcatcgaaggaggaaggagatatcagtgtggattttgcaactgtgtgaatgatggtaagcagtgccattaaaagctctttgtgaaattctttattaactaaaatgtattatacttcttagtttaggagaagcatacattcttttttctgctatatagcagtaccttctttataattttctagaaggaaaccaactatgacaggctctatttgggaaatttaagccccttttaaccttaggtaactacatgagccccacatggaagttgaaatgtttcttaaaaaactcaaatgtagggggaaaaattttatttcttaatccccttccacaaagcctcagtgggaaacaaaataagatttttacctcttatgattacagatgataaacttgggagacttttcctcttttgtcacttctcaaggttattcttgaaaatcagctcattgatacttaggaaaagcttaggtataaccaagggctttaacacttatatagattttttttttcactccgatgtaaatgttggattgtttaaggaggaaggaacattattaaaaagggctttcccgtattcattatattttgttttattccagtacgaatttactgattttgaagaaaactgctaagttgctgaaagtgttttcacatttattacatttataacatgtctatatatttttaattatttgttgttaaatgaggtacatactgaggctgagaacattcccatattcattgacattttttgaaccatgtgatgattactagagtatgagttttcttctctgtttcttatctttgtagacaggcttccctgcaggtaattagatctgaagaacatatagcactgtctgcctgtgaacacatggttctacccacgggtgctgactactccctaatgctgactgagctggggacagtattcctcctacatcattacattcatggcatcttggctctgtgagcattctctggtgggagagcgttgcttgccttcttatttccctgccaccttatctcgcacacacacagtccatggctttacccaacttagggcgccagagactggccttgcgagtgcttctcatgcagacctttggtcagttcttaaacgcaccttgctgtggagttgaatcattggcttctagactcatcccagcctatggcctaagcctcttggtacgtctctctccttacattaactatggtttccactcagggcaaattggatatcccattgagaccagattgttagttctctaccctcacttctctttctaaggaagatcttgtttcctctctcaacctgaatgaaatctgcaaccaaattcatggctatcattcagtcttgggacctggatttcaggaaccctgtgacaattcatttctctgtgctttagttttagaggaaaaaatcctgagaagggacagaggcttctcccaaagcatttggacaaagtcctccagcgagcccaccagctcctcagatgtcttcacccaagcccccagctttcttagaaaggtgaccaaaatcatacccaccatgaagagcagcaaggatcttcagtttgctgtgactctttggcctcctacccaaagtgtcggctcagggccttaaaaggcccagccacttccaggaagagaaaaacgactcagaattcttgtgtctcaacacagcagattatgttccctcaggtatccattcctaggaagctgccatgtttattttccaatagaattattcacactaggcttaaatatgtgtccctacaaggaagccagactcccatagatgtatgctgacacctgtcttcttttaggtttaacaaagacagaggtttgttggagttagaaagaacc

SEQ ID NO: 32613 - DNA, 2300 bp, Homo sapien
ctcccaagtagctgggactacaggcgcccaccaccacgcccggctaattttttgtatttttaatagagacggggtttcaccgtgttagccaggatggtctcgatctcctgacctcgtgatccgccctcctcggcctcccaaagtgctggaattacaagcatgagccaccacgccccgcagacaaagtttttttaaaagacgaaaaagtattatttcttaaaaagaagaaatgttttcgtcttaggaaacaatggatttacaaaacagacctttaatgtaattcttgaaatcattttttagtgatcacaacatattttaaatgtgtcatgcaggactagaattatattttttgtgcttgtgtttcaccagtgtcattaattgattagagatataaagaaaacttttactgtgaaaagttaatgtttgtattttctatcttttattcattttcttccaaaaagtatttaagtcaaagggtgcttagcctaactgtgttgggctttttgaaaagtttgacaggagagaaattggatagttttgtttaacagtatttttgggttacaatgttattcattccattatttctagccaattttctgctataggatagcttgtacttgtgcgtacaatggaaagaatggaaagaccattttcttttttttttttcttgcaacatgtattttattaggcagcctttctgtatcattacagaagagtcctaaattataaagtcaattccggctaccgataaaacatagactgcagaaataagctgttcagaggtatgagtggaaaagagcattttcatcactcacctatttatctcaaagtgtgagatactattctgcaaatatgcttaatgtcatgcactcagagtaatggttggaaggttaattttctgttttgtttataataattattcaatttaaacatatggagaaaaatgacaagataaaattagtgtgatgctttgaatagtgcactcactgaagacctggaaaaacgctggtcctagtgttgtcacaaataaattgtgggacttcaggcaagcactggcttccctcaggctctgctcctaacctctcaatggcagtagggggcagaaggcaagacatgggccatggggaaatagtttccagttttcagatagagaaattgaaatcagagtataccatttgggaaaacttaatttaaaatttaaaattcataagaatttataatgtgactctcaggcaggctttaatcgcatttggcagattaaccatgctaggcacattgtccagatagcggccattgtttaatgcagaacaagaaaaaataaacgtctaataagttcaagctaaatcaaaggtaaagcatgatgtaatttttagattttttttttttctctttgggacagggtctggctctgttgcccaggctagagtgcagtggtgcagtctcagctcactgtagtcttgacctcctggactcaagtgatcatcttacttcaaccgcccaagtagcgccaccactcctggctaattttttattttattttgttttattttttgtagagaagggggtctcactatgttgcccaggctggtcttgaattcctgggctcaaattgtcctcccacctcagcctcccaaagtgctaggataataggcatgagccgctgctcctggctgtattgttttcttgattttcattctgttgatgattaactttagtatagataaggctctggttggctcagtttcccaaattgatttccagaactggttttatgctcacattaggattttttttttctgtcttggcatgttcagcatgtgagcataaatataagatgatgctacatgatcatattgagttcatgtcaagcttaattaaagatttagtatataatatcagtcattttcctaggcctactagacaggcttaatttaattttacaagctattaacattattgtacgccatttgcttgagacgctgtgatattgtttgacatcctgttttcctctctcagatttccaggccctccacctgtcaacaatgtggcatcctcacatgcaccataccaaccctctgcacaatcttcttatccaggtcctatatccacttcatctgtcacccagctgggcagccagctcagtgctatgcaaatcaacagctatggtaatagttttattattagtgtttattgactgccttgtgtcctggtcatttttaatgagagaggttttcttcatttttaaaatagatgtaactagggcatactgtgttgaagtagtatttggacatttttaataa

SEQ ID NO: 32614 - DNA, 2300 bp, Homo sapien
attagatgattaaattgaattcagttctcactgaatattgaattgaatactcatatcgctaaagtcccttccagattttattttttgtttttttgagacagagtctggctgtgtcgcccaggctggagtgcagtggcgtgatctctgctcactgcaagctctgcctcccgggttcacaccattctcctgcctcagcctcccgagtagctgggactacaggtgcccgccaccatgcccggctaattttttgtatttttagtagagacggggtttcaccgtgttagccaggatggtctacgatctcctgacctcgtgatccgcccgcctcggcctcccaaagtgctgtgattacgggcgtgagccaccgcgcccggccaagtcccttccagctttaacatttaggaattaaaaactgttttagaattgaaaccacaaattgtcctggtttcagacaagtttggtacctgagcaggaggtgaggatgtatttacaattcaaaagtagtggttttataggggtaacaagtcaagcaggtcatcacatggtgtgactgtttctgactttactctctcctatctttgtatcatagcttcactcgctccttgtaatgtagctgttatatgacaagttctttcactgcttttacaagctgtactgcttcaacaccggccaaaacttcctaaacttccactgaacattttcatcacattgagaatacaagaaacaatttaaaacaaaaatttcaatgtgggttttcaaacctgatcagtgttgaagctggatgtaggccagatatcttaccttaaaatctttttttctttttcttgagacagggtctcactctgttgcccacgctggaacgcagtggtgtgatcatagctcactgcctcctggcctcaagcaatcctccctgcttggcctcccaaagtgctgggataacaggtgtgagccactgtgccttgccccatgccttaaaaacttttaagagtgggataaatggaccatatatctttactgctaaaatgacttaaaattcctgcacaattcatgtagcatttcgggagtagcaacatccccatgtacgtttttacctaggcagttcatcagtaaaggtatttgtcaagtggctttcttgtagccgggaagaaagtgcatgttaaaaacaacaacaccgggctggtttttactttgtaagtttgagcaaagtggtagctataccaaacctgggagtggctgaatgtctttctatttagcagtgaaagatgataggaaaccagccagatggtcctgattttagggtgagatagagaggtaagctccagatctcatataggttgcctttatttctgagctgtttctcacaggacggtgagctaaacgctgggtgcttttccatgcagagattcctgtttggggctgggatcagccatcctacttcacaaacaaggaatatgcggaagaaggagtatacacaacgctaacaaccccaatatcaatggaaaccccacttcccacacttttcctttgggacatctcccccaccccccactcctcccgcgttacacgttgccaggctgctttgggcgttccttcctctgtagtgcattgcacgggtacgtcatcaaatgtgcgtgtacacgtgccagattcgcctttaaacggtaatctcccctaggtccagatcgtgtactttcccgtatgtaacggtagtgcagtacctgaactattagttatttaagtaatacgtaatgaatgaagagctgaaactgcaacctgttgatggaagaatgaatgaacgcgctcccctccttcctgcggggctgcgccgagaaaatacggttctgatttagccacgacgttaaaggctttgacctgtagggggaggggaaagaaaagacgggaaaaagaaaaccaaaaaacaaaaaaccggaaaaagggaaaaagcgaaaagggggaggtcgctcggccgctcgcaggctcagcccggtggccccgccccgcggcggccggtggctgtgcgcgtgcgcaggcgggagcgcggcggctggtccaagcccggcgctgggggcgcgcagccgagaaagggtttgacgtggcagttcccagcccagctgcaactccgagcgtgagtccaggctaaggggacgccggccggggaagaggcgcggcgggagaagcgaccgcagcgggagcccggccaccgagggctgccggcactaggcgcagagccgccagcgctcggaagcccgcggggtgcgggagcgggaacaggtaaagcctcccacccgcggacgccttca

SEQ ID NO: 32615 - DNA, 2300 bp, Homo sapien
cctttgagattattattattattccttcaatttttaaagataaaaatactgaggtttagggagggtacacacagcttataaaggacagaaccagaagtcatgacttggtctgactgcagagcctgattgatctcttgcctgccagattgatttttaaattttcattgctggctgccttatactacctccagttcagatttgtctcctagctgcagacacacgtatctcacaggtgactggacacttccacgtagatgtcccacagatagctcaaaatgaacttctccaaaactgaacccatcccctccccatatcggctctcgtttttgtttccctcaccccttatatagctctaccattcatccactaattctcacagatcaaaaatctgagtgtttgtctgtattctgcctcactttcctgatttctgtacccagtcccattgatacgccttctaaacctctttcccacctgtctgtcctctccacccacatctccactgcctttgcttaggccaccatattctcatctggattattgctgacagtgtcctaactcttctttaccccaccagtcttgccttttcctctcttccactctttcactaactccagactgatctttctggaaagaaaaaaacaatccactgtgtcattcccatgcttaaattgttccattgcctttccagtgcctttgagggatccatgagctaccctagcctacctgcctaatctcgtttgctttagaaacccatgtccaagctgtacaggacttatagcccctctgaatgccctatgttcctcatcttcctcaactcattcatgctattccctgctgcccttcagccttttttttggccttattactgtcctcaggtcctcagctcaggtgccacctccaccagggagatgtcactcactttccaaatctgggttaagtgtcccttcttacatgttctcatggcaacctgtgtctcttcatggaatgaaaatgaactatattgtaattgcacatcctgccagaccagggggcaccaaacttttttctgtaaacggccagatagtatatattttaggttttacaggccttatggtctctgtcacaactacttaactctacctttatagtacaaaaacaaccacagaatatatgataatagaaaagcatggctgtgttccaagagaacttatttatgtccactgaaatttgaatttcacataattttcatgtgtcacaaaatattaaaaaaaatttcaaccatgtaaaactgtaaatgccattcttagctcgaaggctgtacaaaaacaggtgggtaggccaaatatagcatatcagctgccactggctgatccttgcactattccatgagcttctcacagccagggcagtgtctcatctgactttgtattcaagttcttagtacagtatccagtttatagtaggtgtttaataaacgtttgttgaataagtaaaacttgcacagctagtagtaagtgacagtgtcaggattcaaacctgagtcaatctgagttagcagtgtgatgtcccactgtccattttgtgattgaagctgtatgtgatgtagtatacttacagcatgatatttgagatatcaaaaaagtaattctagaagcaccttgggtattacttgaactctattattactgttattagttgctactcagcctaccctaccatgtacccttcccatcatccccgtttaacttgaccttatttactccatttccaggtatttaaaatagtccaggatttggccacttcaatttttttttttttaaataaagcttcttcaagctgttttcagctttggaaccagaaacctccaaactttgtaagttacataaatgcttagtacatcataaccttcaaaaggttgccaattagaagaaatcttaagcattgtcaggaaattccttctctctatatatagccttatgcatagtagacttgttgctttctttcccttttaaagttggaacatagaacataaaaccccagtacgtcggcattgtgaggtccttgtgacctcacctttcaaataggatatggttacctgggaaactaagttaattacatatggaacatcagaggctaagctcaggtggcaacaggatgggtcagatcaaggaagactgagactccggaccaagcctcacggctggtgagggccagggactcaatcacaggaacaaggttaggagttagtcacctaaggcataggcacttggggacaggacaagagaagcaggacgcaaaccagaagcccgtttcatttaaaa

SEQ ID NO: 32616 - DNA, 2300 bp, Homo sapien
ttaaaggaaagactgggaaagtcaattcgtgtttctgaaaagaatcaaacttgggatgagtatctggccctcatgaccttcaaagggtctcttccagtgccacaatctctgatttcattgtcctcactccagtgatgagtcacaaataaaatcacttgatgcctttggcttctggggagcatgggctgtgtaaaatgttcattgtaccacaggtccttgaataatgccattttattcaacattgtttcatgacaacattgatgagaaaaaaaaatgtatttccagctggggccactgtttgtatggagtttgaaagttctccccatgtctgtataggttttctccaggtcctctggtttcctgccacatcccaaagctgtgctcatgagatgaactggcatgtctaaatggtccccatctgagtgagtgtgtgtgtgtgtgtgtgtgtgtgtgtgtgtgtgtgcaccctctgatgggatggtcagggctgtccagggctgattcctgccttgcgccctaagctgcagggagaggctcaagccactggagatcctgaatgggaataagtgggttggaggaggaatgaatgtatggatgcaaattattttcaaaaaaaattcataaaatatatgttaatcacacaaatgcacagcaatagatgatgctgtatgaaatttctcagtgagcctgctatatttgtggtggttttgaactgcattgtgacaggaggtactccttataattttccttttgcaaacatttattccttgattgaatccaccaccactacagctgccctcactcactgattcaccaaaaattgggtccatgattatcttgtttttattaatctttcttaaatgcatgtgtagctgacatttatttccatgtttaatattagaagtgttttaatcttatttaaaagtttggtgatgtctttgtgaccagaaatagactgtagtcacttaaccttgtttttatcaattagtcgatggtaaaattggttttaaagtcacagtttccatgaacctatctgtgacgttttaagtgaggacttactgtatatagtgcttcttagtgctgaaacaggcagcgtgtctggaaattttgtttggtaccacaagtaacacaaacaaactttcccaggctcttccttatttagtatgtttttatgtggatgaatgttatggaaaacaaaagtattataggaaaattaaaatgtcctttttgtacatttttggcagattgtattcagatttaaaacatttaaatatttggaatatacaaaatctgcttttatattggaccacccagattcatgacatgggatgacaaactataaaaataagaaacctgtaggtgacattgtacattttatgcagttgactaactgttgggtttgggtttaagaagatcagcaggtagaaagaaaacaaaacacgttaaaatttaacatacccaaaactatgcaatagatgtaattataagaatgtagtttccaggagaaaaattcatattcattttctctctttctctctccctttctgtctcttctcttcccctttctctaaatatatggttcagaaaggtacttttcagagctggaggtttattaacaaaaagtttgtgctttcttttgtttcctcttataggaataattcagcagaatgcagacagaaaagtagtaatttaactcattttaactcttttttgtctattccattcataaatgtggcaagtctcaaaacatttatttgagagaatctaatcctctagtagttgaattcccaacgctcctattttaggacgtcattcatggcgtggagattaaaccttcatgtgtcctttactatttacagaattattaaatgtaagtttttcaatcatacttataccattaactgcttggatttaatctgttagtgcaagataactttggctctcccttccgtcctcctttcccttatctcgccccacgtgaggacattctcctgtgtgtgaagctgctttcctttcctcgaaggtgggccgagcaaaggagagtgacgcaagagtgggctgtgtcctggatgctgcgagcgcctctgcctccttgagaatgagcccattagccgcacaaattcgcagcaggcggctggggcggcggctggggcagcggctgcagcagcggcggacgctctgcattacccagtcttgcgtcctcggcaggcgcccgaagctgagtgcgcatcctctaccgcacccaagcttcgtctgtctcgtcaagctcttcatgctgcccaactaaaaggaaaacatgg

SEQ ID NO: 32617 - DNA, 2300 bp, Homo sapien
agtgccagcaaaaagaacaggaatattgcaggaggccaaaaggagaagcacgacaaaacccatgtttacttttaaagagcccaaagtaagcccaaatcctgaactcttgtcactccttcaaaattcagaaggcaaacggggcactggagctggaggtgattccggaccggaagaagactacctcagcttgggggcagaggcttgtaatttcatgcaaagctcctctgccaaacaaaagacccctcctcctgttgctccaaaacctgcagtcaagtcctcatcctcccaaccagtaactccagtttccccagtctggtctccaggagtggctcccacccaacctcctgccttccccacatccaacccatcaaagggcaccgttgtctcctccatcaaaatagcccagccttcttaccctcctgcccggcctgcaagtactttgaacgtggctggtcccttcaaaggaccacaagcagcagtagccagtcagaattacacacccaaaccaacagtttccacaccaacagtcaatgctgttcagcctggtgcagtgggaccatccaatgagcttccaggaatgagtgggagaggagctcagctctttgctaaaaggcagtcgagaatggagaagtatgtggtcgattcagacacggtgcaggcccacgctgctcgagctcagtctcccactccatctctcccggccagttggaagtactcctccaatgtccgagcacctcctcctgtggcctataatcctatccactcgccgtcttacccactggctgctctcaagtctcagccatcagctgcacagccctccaaaatgggcaagaaaaagggaaagaaacccctcaatgcattagatgtcatgaagcaccaaccgtatcagctcaatgcatccttgtttactttccaacctccagatgcaaaggatggcctcccccagaagtcatcagtcaaggtcaattcagccctggccatgaagcaagctcttcctccccggccagtgaatgctgcctcacctacgaatgtgcaggcttcgtcagtgtactcggtaccagcctatacctctcctccttccttctttgcagaggcctcctcaccagtcagtgcatccccagtgcctgtgggcattcccacctcgccaaagcaagaatcagcctcatcatcttattttgtggcaccaaggccaaagttctcagccaagaaaagtggtgtcacaattcaggtgtggaaaccatctgttgtggaagagtaatcttgtagctgaagctgagtgtccactttgcttgaaatgaattgtttgcagtgtttcttgagtccctgagaatgcctagcaaagtcctcaacttacttaatttcagatatgtcacctcctaatctgggtccaaggagtataatatttttaatgagtcaaaaatccaactcagattgacctaaaatatatttatcttctttgcacacttaaaaaatccaggagcaccccaaaatagacatgtaccgttatattaagtaagcaggagacttaggatttgtgctgtagccacaagaaagacagtgatcagtgatatcaaacatcaggaatcagcctttatgtaacataacagctgtcctcctatggtgaaaggttcaaatgtagtgaaggtataacctatattgactgagatttcccttttaggtagtgccttatctctattactagtgttaaaggaataaggaatctatgaaggacagggagcagctctggtctgtcaatctcagccacctgtttgatatcacagagaagatactcggaggattgttggaatgtatatagtttagtaagaagtgggtaagaaagagggtcttaattactgagcacttattatgtattaggttctttgccagatgtttttacatatataaactcatttcagaaaacttatttaaagtaaatggggccgggtatggtggttcatgcctggaatcctagcactttgggaggctgaggtaggaggactgcttgaggccgggagttggagaccagcctgagcaacatagtgagaccctgtctcaataataataataataatagtaataatgaagtaaatgggataaggaaagaaggataattatctttaaaggttgattcccaccctccctccccagttacttaaggaactaagtgagtacatctccagttgcccatgaaagcataagtttgttttcctcagctgaggcaagtggtagagtatacaggataacgaagtaacatgtaaaaggcaggacgcacataaaggtgtacatggctattgtttcac

SEQ ID NO: 32618 - DNA, 2300 bp, Homo sapien
ggtctcaaactcctgggctcaagcgatccacccaccttggcctcccaaagtgctgtgatttacaaccttaaactttcaatcctatgatcaggcaccaaaatgtataaccgatttcaatcttataaaatacaattcctcccacaaatagccaccacctttgtacattcaagcgactgttcatttgaattccaaactcatgccaaacctttaatgcattctgcagttaatctccaacctactcatttattcattcattcaatgaatattgagtgcttaccatatgccagatacaattccaactgctgaagatacaaagcccaagccattataggattcatagtttagtagaaaaaagagatatcacataaatagatgcaacctctacctcctggactcaagcaatcttcccaccccagccttcagagtagctgggattacaggtgctagtaaaactgttgaggacgccatttcaacctttagaattgtacataacataaacttttgctagatagatagatagatagatagatagatagatagatagatagatagatagatagaataatgttggcatgttcttagtgaaaaaactgagttgtcactcagcaacaattatttctttgttagtaagttatgtatgaattttaattgggctcatgaccacctagaatagaagctacacttcccaacctttcttgagttatgtacggctatatggctaagttctgcccaatgggatgtaaacagaagtatgaacaaaatatcagacatgttctgaaaagaagacagtgttcccttctcatttttttttctttttcctgctggttgaaatatatgcatgctgactggagctggggcagccaattaggcccaaggggtctgcattttagggatagtggagcaaaaagttagagggtaactgagcccttgataattatgtcagtcatgcaaaccctcaattacttacttctagactaagcttacctgtgagagaaacatcttccatctttttacagttctgttttgggggggtttctgtcactcccatttgacttttatcttaactaatagaaaaatataaagaaaatgaagcagagtaagggactagagagtggcacagtgtgatattttagacaaggtgataagggaaggattttatgagggattgttatctgagcagagtcctgaatgcatgactgtgccatgtgagtagagggaaagtatggaagggggaaatagtaaaaggaatacagtatctattttcattttggaaaccaaaattaacataatgattatctgttgaggacaccatttcaaccagggaaagggggaaatagtaaaaggaaagggggaaacagtaaaaggaaaagcccagagatgagagcacgtttttgtgtccagggaccatcaaggaggccaaaccttttgacaggcaaacctttcaaatcttgtcaggcctgcaaatgaaaatccttgaccctagacattgtaaagactggtcaactttgcagggactggtctctgtaggcccttcaaaaagcatgacccagttatgagtctcagcttttacccagcttcatggcttatcctctaatggttcatttcaaaatgcttcctgagttcactattcaaatactacatacttttctcaacctagcatgagttctcactacagcttaagaactggctctattgatccaccccacattacttcctttcttcttgagtctacatagatattactgcctatattgttcattttaattatgaaaaatctatcattctgttctgattcatgcatgtgtctcttgccacctcaattaacatgtaacataagagctagatgtttaaaagtgtttaaaatcccttttggctactatctgttcaacagaaagtgctcactaaaaactttctgcatgtccaatgaacgtttcatttaaccatctcacaaactagaaacacaatggagagagcctaatctttccctgttcctccctttcgccaggaagatatgagtagctaaagtatttggtgctatatatagccagttgatgtcagctgaatgccagtctcttcagaaaagctcagtccccagtttgagtcagagtagggaccatgctgtcccaggttcaaggataaaaaccatcaggcccaagtgccatccatagtccatctccagagtcttcctccacaaactgggattcatccccgctgaaaaagcacaatctaacagcaaggtgagtatgttgtttcctaaaatgtttcattagtcagttgtccaaggatattcagagttgtga

SEQ ID NO: 32619 - DNA, 2300 bp, Homo sapien
gccattattatccacagttcaaattatttctcaagggtggaggtgggggttactctgtcaggtacatttgcagagaaataaatatagtacaacataattgttataaaaataagtcccaaaagggatgacaattttgtctcagaaagttatgaaaagatccatggagataagcattcgagagagaaccaaaggatcttgagagaaccaagaacatagaaagcaaggactttagaaagattaatgtggaggaactggaggaagaatggcgatgagtttaacagtgtgatcatgaaaggccctgccggtgggtaatgaaaaattcttagcagagaagtataatgatcgtattttcacgttagaaaaattattaatagaatggaggttggactggtgtgggaaataactagaggatatcttgtgaatattgcaatagtacaaggaagatgagtcataagagatggtgattacttgaaggactaagacagtgagagtggaggggtggacctgagagatacttaaggaaataagagtcaaaatttgatattagaaaagaggaaatgaaggaaaagtaacaggggtactcatagatttctgacttgggcagttgcgtgtcattttctgaaacagggaatggaaatggtgtaggttccagatgggtgaagagggacatggcatcaggaacagattatagtaaagatgtccatgtcaatttgggacatatttaagatactgtgtgaaatccaaaggatgttgcttaaaaatgtccgacgtatagatatacacctgagagttcttggtgcacaggacacgtggtaggtaaatccatgatgggaaagagactgctcaaggagacatggattaacattaaacagaaacagcaaaagaaaatggagtgctggcgaacagagaccacgcagcggaaaaacagtatttaaagtgcaccagaaaagtagctgcagaatgaggagaaaatgacattagagaaacggagggaagagttaatggtgtgctcttattgttttaaaaatgcagagtaggatctttttttcccccacccctcccaaagtttttaatattttgagggcagaaaccacggctttatttcatcctatttctgacagtgcctagttcagtaaagggaacatagtaaatgctcaataaattcttaatgattcagcctcagacattacaaacgggtcctatttgtctcctgtatcaacgaccaatatttcttccccctctttcttcaaataaacttttagaagtgcctctgggtttactgaaatccatttttacaattagtatgttcaacttacaccagctttggaatgagttccaaaaccttctttatttacttgagagatattcggtatcagtgacgatgggtttttcctttactactattcctaagaaaggtttattcaaaatcaaagtttagcccaattcccagcagtaccttttaacttaaaacctgttcgaaagcacggcaaagaggcggacagacttttctgacaatcattaaccaggtcaacagacttattaaagctatctaattaaaggcaagaaacaactgcttggggaatacacattcacgccacaggaagccatttaactgcaaatagatcgtctaacgactcacggaaatctaaaggaaactgcgtgtccgcatggggttctgatgccaaactacggattgttctctcaggtaacacctaacctaagtgaagtccttggtggatccgcgttcttgagcttagaaaataccgaatgaactaccaagagcaccagaataatcgcctcctcctgaagaactagcctctttctcaccacaccagacagcacgtcctacaaccacctttcccccaacaaccaaactccagcgccaagctgccgcttttgcagaaatgttctatctcttggtctcgcgcgatctcgcgcctccgaggaagccaactgtatcgcgcacgccatcaaatccccgcgggaatagaattccgcaggtccagaaagccgggaaatcgcgagcggaggcggagttacctcggtgagcgtgaaggcggagcccgctccgaggggcgggctcgaggcggggagaggggcggggctccagggacctgttgatcgcaggtgtcactggcctgactggtccctgggtattggggcgtatgcgcatgctccgctcacagggtcgggctctgggcggcggagaccagccgcctgtgctccagttcccggtgagcctcggtactgtggcagcagtcagtgtgtctggcgggtgtcggcgtgaagcggggctgggc

SEQ ID NO: 32620 - DNA, 2300 bp, Homo sapien
aaggaaaagaatacactagttggaaaagtctaccttcccattaaaatatcttttttaaaactatcttatgcattgtttagtgaaaatattaacgaattgattattagtatcaaattccatgaacttacacaatctacatacatttttaaaaatatttgttaaaattcttaggaaaaaggaaaggccagttcttagtctcttttttacacgttaggaagaaatacacaaacctcccagtttcattaatgaaaaaatcttaataaatcactttcatggtttatcaccagtaaacacgaacctgcacaaattgtatcaaggagcttattttaaaagcctttgagatacaaaacaaaaaccttatttctcagactataattaactcctacttacaccgagtttgtctatttggaattcttatgacaacagcaggtaaatcatatattacttttgcagagtaagttttgttccctttggttttttttttttttttttaatttatctttaacaggacgaagggtctttgcttagaccatcatcacggaactgaaaagaacagaaaataacaattatcaatgtaactaaaagttcatttccaacagacattttgtgttagcacttgctactcattttaaatagtgaaaatcagcaagccttttcttttaataactaaaagtgaatcagatcttaatcacaaaaaccttcctaagtgtactgcgtttttttgtttgtttgtttgttttttggagacggagtctggctctgtcgcccctgctggaatgcagtggcgcgatctcggctcactgcaacctccggttcaagcaattctcctgcctcagcctcccgagtagctgggactacaggttaagtttactattaaacctacctcaaaaatagccttagatattctttgcaaatatatatatttatacatacatacatacacacacacacatatatatatatatatatatctatttccagataaggaaactttcggaaaactttgctgtccaactggtaattccctgcatactttgcattgataaagaaaaccttgtagcagggttacaaacctcaaaacatcctcagattgcaggttttagaaaccctccctattacacctgtgcaagtacttcctgttctccaacactgtttaaaaatagtttggtaaatgccccgtaagccgccctttagaagctaaacattaactttatatacatcaccactaccactgagaaaccaccaccccaagaatctcacgagtccagtcatctctcttctccaaggagggagcataaccatcctggacccctttaagtaaaaaactgtgtgctcaggcgaggcaatgtggcttggacagccaggggcaggagccaagtaagggtattactcacaatcccagcaggactccagcttgtcgccgccctcaaacacggcagcaataacatccaggacccaacaagtacagcacctcctcccgcctcgcgagcgcctccagcctggccagaggcatctccgccagacgcggcgagaaggggcgaaagggctgcgtgacctctggcgtctgaaccgcccagcaaagagagtgtgtgtgtgcccagagggccggggccataggaggtcgccgggctgcgaggggagagacgagctctggggctagaatgagagtgtcccggtcaggcccgcgggggtcgcaggtctctggatctccaaccagagggctagtttcggagacttaccttgagctctaccctccttgcgcgaggagcgtgcggtccaggtagagaaatacaggccttccactcccacagagctacctcccgctggcccagccccgcttcacgccgacacccgccagacacactgactgctgccacagtaccgaggctcaccgggaactggagcacaggcggctggtctccgccgcccagagcccgaccctgtgagcggagcatgcgcatacgccccaatacccagggaccagtcaggccagtgacacctgcgatcaacaggtccctggagccccgcccctctccccgcctcgagcccgcccctcggagcgggctccgccttcacgctcaccgaggtaactccgcctccgctcgcgatttcccggctttctggacctgcggaattctattcccgcggggatttgatggcgtgcgcgatacagttggcttcctcggaggcgcgagatcgcgcgagaccaagagatagaacatttctgcaaaagcggcagcttggcgctggagtttggttgttgggggaaaggtggttgtaggacgtgctgtctggtgtgg

SEQ ID NO: 32621 - DNA, 2300 bp, Homo sapien
atatcactgtcagtcttcaactgtttcttccacagatgacagtcttcatctgtcaaacagttgatgactgtttcttcaacactgaaaatctgttaattagtgtagccactttcattagttatcttagctagatttctggataatttgctgtagcttctccatcagcatttgctgactcaccttgtatttttatgttatggagatggcatctttccttaaacctcctgaatcaacctctgctagcttcctacttttctttagcttcctcaccctctttttctcagctttcgtagaattaaagagcgttagggccttgctctggattgggctttggcttaaaggaatgttgtaactggttggatcttctatccagaccactcaaattttctcactatcagcaataagggagtttcactttcttatcattcaggtgtttatttgagtaacacttttaatttccttcaagagctttccctttgcattcacaacttgggttacttactgcttgatgtaggaagcctacctttctgcctgtctcaactttcaacatgccttcctcaccaagcttagtcatttccagcttttgactgaaaatgagagacatgcgactccttttacttgaacacctaggggccattgtagggttatgaactgacgtcatttcagtactgctgcatctcagggagtagggaggcctgaggaaaagagagagttggggaaacagatggtcagtggagcagtcagaatacacacattcatggattatgcttgctatcgtatatgggagtggttcatattgcctgaaaacaattacaatggaaacatcaaagataacttatcacagatcagcataacagatacagtaataatgaaaaagaattactgaagtgtgacatagacatgaagtgggcatatgctgttgggaaaatggtgctggtagattggcttgctacagggttgacacacaccttcagtttgttaaaaaggcagtatatctgcaaagagcgataaagtaaaatgctataaaacaaagtattcttgcatttgtttgtttttaattcataggtttaacatttaaagtccttttaatcaggagtgtgcgtttgttgataccatggaaatttaattcaccaagatttatttatgacttaaaggtttcttttgaataattatacatatccatttacataaaatctgtctttttttggaaaaatatgattctatgtaagaaggataacaatatattctagagcaatttagtgttgacagatacagcataccagctgaaatataatttattctagatttttggataatattttccttaggaaaccatcttttgaacattgagcttaaggtaggtagggattgatgtcacattgatattttaaaaatgtaaatgatgaaatttttaaaaatttatattagaatgctatcagttctaatcctttttatgacgagttttaattctatattcaatatttgtgttcaaatggtaaagttaagaattttcttatttgcatttgcttttatttaaacttttttttcttttttgtagatttgctttgaggtcacattgatatgaaatatggagtcaccttttataacttcacctgggaaagagagagaaaactttcttgttaaaaaaacataaggaaaacaaacaaccaaaggaatcatgccaaatgccaactctacatctttttgtattattaacatattttatgcatcaagacaaatggcttatgcattaaaggggatgattcgttcatcagtatttttagccattaaaaaaaatcgttttcatattaaccttatacagctcccataaaatttaacacatataaacatctttaacgccttgtttaaaatagctttcttttttagtgcttagaacttcaatgtttatgcaccctattgttacttgtcagagtctttaagagtttataacatcaggaaagatatggacttggaaacttacattattaaaatagactgcagtggatttaattggacaattcaagacatccattttattgtccaaaatattacataaaagtgtacagtttttagcctaaatgcaaacaaagttgcttgaaaatggcatgggtaaaattcttacggaaacctggtggcaatcttggaaaagtttatcagcctggaagtatgctatcactagcccctaccaaaggcttgttaaatgaaccaggacaaaacagctgctttcttaatagcgctgtacaggtgagaccataattacttattacattaaaaaaaatacttttcagaaaatcctttgt

SEQ ID NO: 32622 - DNA, 2300 bp, Homo sapien
tcagcactttgcttgaattacttagtactttgatgtaggagtttattaagtttcatcttgagttgatgtgtaacaacatttgcagcttctactttgcttttacatagtttaaattgttcaaaatttggaggaagaactggctgtattaatcaccctgtgaagttttttattttatattcacattgactcctcaaagcctggccaacatggtgaaactctgtctctactaaaaataccaaaattagccaggtgtggtggcacatgcctgtaatcccagctactcaggagatggagtcatgagaatcccctgaacctgggaggtggaggttgcagtgagccgagaccgtgccactgaactccagcctgggcgactgtgagaccttttctcaaaacaacaacaacaacaacaacaacaacaaaacaaatggactcctcaagtctcttggaatccccagtgaggagggtaaacagctgaatatgtgtagttcaaaaaagctcatcagaattgttcttaaaagtccccttgcctgcaaaaatattctagaatgctttgtggtgtttttgtttggttggttttgttttgcttttaaatcaattttatagaggtatagtgcacaaacattaaaatacacccattttaagtgtacagttggagttttgataaatgtatttacctatgtaactaccataatcagtacacagaacatgttcatctgctagaaaaattctgtcaggcttctttgttgtcatactccccacaccaccccaggatgaggaaatcactggtctcattatagattagtttcactcattctacaattttatataaatggtctcttacagtatgtactactgtgtatctgcctcccttcctttagcataatgtctttaagattcattcatgttgtttggattcacactttatttttattgtgtgttttatggctgtacaacaatttatccgtttacctgttgaagtatgagtaatctgtgaacatatttttttccgttgctgttagataataccttgaagtgggatttctgggttgtgtggtaagtgtctgtttaactttacaagaaactgtcaaattgatttccaaagtggttataccaatttgcattttatgagagcaatgtatgagagttcctgttgttccacattctcagcagcacttcgtgttggtattctttttaatgttagcccttctcgtgtatgtataatattatctcactgtggttttcatttgcatttcccttgtcattggtaatattttgagcatcttttcatgtgcttgtttgaccattcttacatctttcttttggtgaaatgtccaattttttgccagtatttcgcattggattatcttcttattaatgtgttgtaggaattctttattctgcataccagtcctttattagctgtatgttgcttattttttttcaatttcttaatggtgtctttccaagagcaaaagttattaattaatttagattaagtccattttaaaaatatttttcttctatggtttggtatgctaagaaatctgcccttccccaaggttgcaaagattttctcttttgttttcttctgtaagttttagtttttgtgtgagccattctgagttcatttttttgttgttgttttatatgaagtcaggttaaagttatttttctcatggtaaaagttctttttctccagttgtagcaccatttgttgagctgactcttatatttctccattgaattgtcttgaagtctttgtcaaatgtcagtcaaccacatatttggaaagctttttaaaatttaatcaccttgaagtttataatctttgcccgtcaaatttttaaaagataatgtttaaaatatttttatttagactagttactaaatacagttaattatatgatacatacttgaactactagcagctgcatatctaaattttttaaaaatataaagtaactcagagtctgtcttttcatgtaacacattgattacaaggttttgttttgtctttattcattgtgtttttttaaaagattggaactagatggaaagatgttgtctccaaatgcattcgatgccactttcagccactacttttgttttatgcaaacccagatggcacagcagtttctactgaggatgcactcaggcaggtcatcagctggtcacattacaaatctgttgcagaaaatatgggtaattctttcttttaaaaattctcaatgtttttctattatcacagtcaactaggaatactagtactctgaatataaaatgaatatagaggataattt

SEQ ID NO: 32623 - DNA, 2300 bp, Homo sapien
gaagttgcaaaacttgtggtggatacaagttttcttcaaacaggtgtcatgcttagtattaccacagcaaaagtgctttatgcatatttcccatttcctcatatagaataacaaaaagatgtgcaaatgaagtaaattaataaaataattgttactgtttcatcaagcattctttaagtaaaactggcttaaaaaacacaagtatatggcaatgaagaatacaattagtacagtttagtgttactgccttgaattatgctaacatttttacccattattgtttttgcgtcatcagtgtaaatggcaacacagtcaaaaagtaaagtaacatcttaatattatcatgaaaatagtttgacttcatagaccctctgaaagggtctcggagacctcccggggtccaaggccacacttcgagaattgctgaacaagcataatcttaagacttggtacatattgggtattccataaactgtagctatcattattgtggtggtacatgactaaaataattttatacagttttctgcttctcatttctacgataagtgggtgatgatgttcacaaagtaattaaagatacttttgtgctttgttgatacattggtggttgtgacttttctatcagtatattggtgccccaggacccttgtgccttagtaaaggaaaaagctccctgtagaccttcaggttctcagatataaagcacttgttctcccataagggggaatcaaaaactgagatggtgttaggtaaactcctgtacaaatccaaatgtcttagttcccttttcttcatctctaccttttaaaataatttttagttttcagggttttgtttgttcagttgggcctactttatctgtagtctggacattaatttaatttaattgtattaaagattagagggcaatagtcatttttattagagctgttttagttaaggtcatgttttgtagagagaaatccaaatgtagataatgttttactctgaacattaatattgttaaaggctctccagtgaattctcctagaatcgttgttcagagggaaatagacctgctgtattttatgtggtgccatattgacctttaggttctaatcaatagctagctataattagagagagagaaaaaatgattaatttggtatctgaaatctcatgtagcaggcttggaagacacttggaagtaacaaaagtcacactgtaaattagtataacttttttcataagacttcattaaaattaaattaaaaaactatttggtgcctattaaatgtcagaaccaggagagaagttaagtatcaattattaggaagcattatggcatcatggttaagagcacggacttttgagtcataaagatctaattctgtagtatatcgatatatatacttaacctttctaagccactgttttctcatctgtaacatcaagttgctagtcatttctttataaggttattgtaaagattaaatgaaatatccacttctcacaacttgagtaagcagtcaataaatggtagctaattagtagtggtatattttatatgctatcataataacctcctaccaattttaattcagtttaaattcctaatattcccatgaggtaggtaaaatggattatcattatcccattatataagtgagggaactgagattttaagaggttaaaaggcttgtttacctacccataattagtgagtccaaacttcaactcaagccagcgatcttcaaatgcagggtttttttcactgttaacacttggtcagtaaagatcttgtcttaagtaacagggaaaacacatacacagatctgcatgacccagcaggaacagcactattccatcatggatgacaccctcaagtgataataaactgaagaaattttgcataaagcattccaaaaagaactgttattttgagttgggtcttaaagaattcatttttttaaattggaagagattaccttttatagaaagctttatgtaaatatagaaaagtataaatgaaataaattctgtaacataatttaaataattttgttttcctcatctcttctccccaccccacccaaccctaggctttagaaaagaactcaggaatttggaagcaggctataaatctcatgaattccacccagaatcacatttacaaataaaaaatcatttgataaaaaggtaaccatattttttttccctaaatacatgtattataggcacgttgtttatcagaagggcataaatacatattattactttgaaagcaatgggtctatagtattgagatgcctttctta

SEQ ID NO: 32624 - DNA, 2300 bp, Homo sapien
ggaagtgttggatcatggttgcagtgcaatgattcaatctgtagtccctggtgcatatttttcagttgaacatgtgaagtagaaagttcaaggtggttggacaagtgccgaggtattgcatgactgacagtgaacctggatttcagtacagtactttttaaaatttaaattgctttgataatggcaaatgccaactgagcaaggtggctcatgcctgtaatcccagtactttgggaagtcgaggcagaaggatcacttgaggccagtagttcaaaatcagccataacacactctaaactcatttctgtaatgtggaataatcaacaatcagtgggacttttacaagggtaaagtcggaaatagaatctttcaactgaatttagtttaaataacccctccttatttgcactagttgctcttccaagtctggcagacgttcctgactctagaacagatcatactgtcaacatcccctcatgatgagcatgtgactctgggccaaagacaagtttaaaaccatttcaagacctgttcagtttatgtcatgcttcttcaacactaataatctcaataattttttatcaatcctacttcaataactaggagtaattgatcctaccttgtcagcgagaagaatgcttccatctctggtagaggcaattgtttatttgcctttcctaatttttgtaaagattcaatgccacttaagcccagggtctttttgtctactaccatcagacaatctgtattacagcacacaatctaattaattctcaggtaatggccctctcatcccagaatctacaaagcatttttcttgaaaggtcgtatactatctttgtctctaaaacctggcaattgatttggaggcaaattggagcaaggttaggaagctatggaacagctttaagagtgctggatttggagttaattttaggctttataatttttttagtaaccttagacaattcactccttttgtgtctcatttcctaattctataagatggagtactgccccttcaaagaggttttacgacgatttaatgactttgtaaaaacacaactacagtcttatctccatttactatgcaccaagagaaccacttatatgtctgggtgcccgttattttctgaacaattcaggaatcataatgtgacaagaaagagaatatttgaaattggacccacgaggtaaaatccaggcagtataggtcattttcttcctgctagcattctgttcttgctgaggctcacactcaaagtcaaataacctttgggttattcttcccacccccatttccccccagatggagtctcgctctgttgcccaggctggagtgcaatagtggcacgatctcagctcactgcaacctccgcctcccgggttcaagcgattctcctgcctcagcctcccgagtaactgggattacaggcgcctgccaccacgcccggctaatttttggatttttttttttttttttttttttttagtagagacgggatttcagcatgttggccaggctggtctcgaactccttacctcaggtgatccgcccgcctcggcctctcaaagtgctgggattacaggggggcgcggccaggttattcttaaacccactcccttgaagtacctgcaaaatgctcacgtgctgctctctggcccgtttggaaactcagtcccgtgagtaggacgtccacctcattggtggtgtttaaatattaagtgtcaaatgctagagacagtacaaaacccaccagagggggccttcctaacacgttggcataaggatccaaacggaatacggggataggagaggtgacctcgtgcagtttcagggaggagtccatcacctgactggactgggcctttcagggggacgagaacgtatttcttccaacgaaacctgaataaccagctatctgcctgggacgccgcgaggcagaagtaggcgggcccattgacttagtgtcaaggcggaggccgcgcttcatgccagcggtcacggaggcagcggaaagccgagccaggcgcctgcgcgctgggaagagtaggttcagagtgcattccggaacccggggcgcggcgcactgcgcaggcggccggactccgctcagtttccggtgcggcgaacaccaaagtccgggaacttaagcattttcggtttctagggttgttacgaagctgcaggagcgagatggaggtggacgcaccgggtgttgatggtcgagatggtctccgggagcggcgaggctttagcgagggagggaggcagaacttcgatgtgaggcctcagtctg

SEQ ID NO: 32625 - DNA, 2300 bp, Homo sapien
ttcttggttgctgtaaacttttgactgttttccagcattctgaaaaagttatttcagacagcttttgcttgtttttcaatgctgctgtggagggacaggaacttggagttgctattccaccattttgaacatgggtcacccaaggtgactttttgacactagctttcactagaacagaaaaacaacaacaacaacaacaacaataaatctgttctccaacaggcatatttatagatatgaacaagaaagctgagcttttccagtagatgccttaagccacattccctgcatctatctcttccattccatgttggtccttgagtaaactccgaggaatcatagcattccatgaaatttagtttaaaaagcactattataaatcattaaagccccttgatacttatgtgtctactgtctgtgatctgatgccataaacagttaaataataattttggactagactttgtcttgtttattttctaatttactttttttcaacaaactttccaacttctagttaataaaatgcattttcattgagaaaatttgaaaaatatggaaaaacacaaagaatgaaactatctgtgatcccatcttccaagaataacttctgttaacacggttacatttgtcacacttataagtctaattctggtcaatattttatatatagcaatgatcaccttagcatccatttatttattctaaattaacaactgtttaattccaagcataggttttaattccaagcacaggtttcctatgcttggaaacctataatcttatgagataaaaacatgtcatgtattgactaacttttgagactccatcctcaatgactgcctctctaacacctttcaataaaacaaataacaggttgattgctgatgattagcttaatgaaatttcaaagttgtaggtttcaacatctttgtcatttgtgcctactaaactctgctctaccgaagtttttaaacttttaaaagcagaaggatgctttgttttgaaataaaatcttgtatgaaactctaaaatataaacaaaactaagtttttatggttgaagtctgtctttacatgtataagtacagacatgtacatgtataatacatgtacatgtataagcagaaagaggtttaattgtatctgactagtatgttcacagccagttctgttcagcctttcaaaacccaaatcattatgcagaaccccaggctctgtgatactgttcgaaaacttcattgctctgttatatgtcctcagtcagtatttttaatgaatcggttggtattgcttccataactcttatggctccttggacaatgcctgacacacagcaggtaataaaaagtatttactgaaattaaagaaggaaaatccacaaaggggaaaggattggcacatatccattactagtacttcaaaacatctcagaaagtatccctgctaagagtatagatcaatagtgttagatcccactggtatcatacactattatgttctaaaacacacaattttacaagtatttttttgactaggattgtgttagtggttgcagaatataacaaaatattgttgaatacatattaaatttcttccatgaggaagacactgtttaaagagctgtggagattgcaaagatggcaaaaatactgtctctcctttaaagaacacttaataattgctaggttcagtggctcatgcctgtaatcctggcagtttgagaggctgaagcaggaggatcacttgaaaacaggagtttcactgggcaacatagtgaaaacccatttctacaaaaataaacattaataaaaagcaagcctggcatggtggtgtgtgcctgtagtcctaacaactgggaaagctgaggtggaaggattgcttgagcccaggggttcaaggttgccatgagctctgattgcaccactgcactccagcatgtgtgacagaccaataccctgtctcaaaacaaatgaacataacttaatactctaacaggggagaaaatttacataaaattgctacaaagcaagccaatgtgccagacaatatcaagaaaatttcagtgttttttgagtcagaggtagggaaattttgaaagatgaccagtctaataaatagccccattaataggagaccattacagaatgtagagggaaataataggtgccaaaggaaggcaaaaaactatggaaacaaatacttcattcactgccttgatcttgagaaaataaccctctccccaagaagaaaacatgacatagaaggtggagacaagttaaatgtgaagttttcacaatt

SEQ ID NO: 32626 - DNA, 2300 bp, Homo sapien
gtgtattaggttgatagctcccaagtgatacagttttaattctttgaaaaaagattaaaaaatcacaatgtacctaattttgaaagtaaagctaaattatgaatgtaaaggacttcccattatgacctttgtccccaactcatgagtgtgtatatgtgttttctttccttttttgacatttaaaaaattatttattttttagagatgggatctctctgttgcccaggctggagtgtactggcatgatcacaactcattgcaatctccaactcctgggatcaagagatcttcccgccttagcctcccaagtagctgggactacaggcatgtgccattacacctggctaatttattttattataattgttacagccaggctctccctatgttgcttaggctggcctcaaactgctggtttcgaactcctggcctgaagtgattctcctgcctcagcctctctaatagctgggattacaggcaagaaccactgcaccaggcaactctttttcttttttgtttttttttgttttttgtttttttgtttttttgtttttttgttttttgagacggagtctcgctctgtcgcccaggctggagtgcagtggcacgatctcggctcactgcaagctccgcctcccgggttcacgccattctcctgcctcagcctcccgagcagctgggactacaggcgcccaccaccacgcccggctaattttttttgcatttttagtagagacggggtttcaccgtgttagccaggatggtctcgatctcctgacctcgtgatccgcccgcctcggcctcccaaagtgctgggattacaggcgcgagccaccgcgcccggcctctttttcttttttaatgaaataatagagctagtagaaaatagtttgctttttaaagtgcttacttaataaaataaaaagtgggcaactcgaaataaaaaatcaaacaatatctaacatgtttaaaagatttttaaaaatcaaaatataaaataatatcaaaatttaaaaactgggattctgttccccaaagttctgttcaaatctgttagatttatcttcccttgaccctaagtaatatcttgggcaagccctagagcttctttcctgacccttagttaataagatgttatctggtcacattcagtcacaataatagactcattttagtaataaacatcttaagactagtaattaaaactctttacttcacaccaagtttcctccccaagcttggcctgttcctggctggcagcctgaagtagggaaaggagagatatggtgaccttttctttgtacctttctagctaccctctataccctgaccctacatacataattgagctgtggcttctgactctactgggtttggggatgagaggcattgagagtaaaatgaaggagtggttttaattaatggcacagctaaaactggattttgttctctctgcacatggcagatgtttaaagctcattctttcttttatgcaagtttttacaccatccagcctcatttgtacctcttgaatttttgctcagtggcctatcaccattcaggatcaagacaaaaatcaatgagcacttattgtgtgtcatgcaccctacaaagtgccaggatatttatccaaactcctggcaatgctaaacacaatgcaaaaagacatattagaaaacgaatcttattaactttaacttttcaactgtatttcatcataaagtcttactttacaagataattgctgttgtgaaaaagggaaaggtcatggtctcatttcccagatgttatttgatatatgctataaattatattacctccaacatagtctgcactttgaacttagaaaaacaatcttcagacggcatgcattctaattcttgaaataagtatgcccacaaactgtaatttaagacagaataggtatgcttctcatgttttaattcagttgaatttcagaagatctcaggaatgtacagaacgagaattaagaattaattaataagaattaattaattgcttgacatagttaggtgatttcctgaactttaagcttccacatcacagtatgaagttggttctaagataagaaatataataaattctcgcccaaggacagacctgaatctctagctgcctagaggctgactcaactgaaatcatggcgtttgacagcacttggaaggtagaccggagtgaaaactatgacaagttcatggaaaaaatgggtaaagactttatttctttgtggctcattctttgctttcttacaaacatttttctttctaactcctaaatct

SEQ ID NO: 32627 - DNA, 2300 bp, Homo sapien
tttatgttgcttcagagcgcaattacactggcatggaaaaacctgcaatttgaaaattatcaacaaattaaagccttctgtggatattcattctcataataaaacctactatacatatcatgcaaaaagtttggctataacattatttatactttattttctatttttatttttattttttgagacggagtctctctctgtcacccaggctagagtgcagtggtgtgatctcggctcattgcaacctctgcctccagggttcaagtgattctccttcctcagcctcctgagtagctgagactacaggtgtgtgccactacacccagctaatttttgtatttttagtagattgggctttcaccatgttggccaggtggtctcaaactcctgacctcaagtgatccacctgcctcggcctcctaaagtgctgggattacaggcatgagccaccacgcctgacctatttttcttaaactcagaaggtaaaggccttatgtctagatactgtttctattttttcttgagcctttaggttcaggagttaaagcttctgcgcttcctttaagaaggtaagaagtttgttacagagagatgtgaatgatgtctttcttttttatgtttaggacttactccatagatttaggaaagtcataacatatagtcataaaccactattatttttctgtctttgggctgcagtgtggcatatatgaaagtcaatttctgaaggaacttagatctttttttaatgctaatgtcttttctaaaatttaccattgttcgagtaattgaaggttttttttgtggggtttctttggcttttataaaggatcaccagaattcgataacctttttttgaagtttttctccttaatttgactttcaaatatggtcctttatatagcactgtaataattcacttacaaggaaaaatgtttttctattattgacttatttgaaaagcacttgtagtgttggatatagtatttatagtgaagatagtggttcaatcccacagaataacctataattaatataaaattgcttggagttactcaaataaaaatgaaaattaaaaagttattagataatcacctattacattttccttgttagcacatatattacattctagagaaactgtctgcttataggtagagactgttgttgaactttaaattgttctaccccgtaaggaaagcagttgttatgatacttatacagtagaaaaacaggccttcagcaaaatgaggcttcttgtgatatggattgctctggggccactccttctccacaaatcactgaagcgcatgactgcttgaactaagagaacaaaaccattttcattgaatcatagcaccccctagcatcctaataatttatgggtttttgttgttgttgttgttgttgttttgttttgttttgttttgttttgtttttgagatgggatctcactctgtcacccaggatggagtgctgtggggtgatcacagattactgcagcctcgacctctcaggctcaagtgatcctcccacttcagcctcctgagtagctggcactacagttgcgtgccaccacaccaggctaatttttatattttttgtagagatgaggtcttgctgttgcccagcctggtctcaaacttctgaactcaagcaatcctcctgtattggcctcccaaagtgctgggattacaggtgtgagtcaccaggcccagccaagaatttgtgtttttagaagtcaaaggaacattttgtttatgcttataaaacaaaccatgaatcttgtaagatctgatatctcatattcttctgacgaaggagaagaggcctttgaaagattacatggaaattatggggaatgtgaagagtcatcattgttattgaaaataatttttatatttgttttctagggaatatgggggtatggacgcagataataaactatggctgaacatcttgtgtcctatgtagaagtggtcaaagagacagtgtttttccacccaagtgcctaagaatattgatgtgtgtgttgcaggtacttctcccagcagctggtctcttacagttacaggatgtgaagaagacttgtgaatttttggaatcccagcttcaccctgtcaactgcttaggaatccgggcttttgctgatatgcatgcatgtaccgaccttctgaacaaggccaacacctatgcaggcaagtggagtagacctcagctgaatttgggaggaaactgcttggtttttgatatgattctacagtggtctctggaaagtcatgtcatatttctggatctgg

SEQ ID NO: 32628 - DNA, 2300 bp, Homo sapien
agggaggagcattgccccaggaggccacggtgaggaagaggtgggcctggagagcccactgtgaggtagaggccgggcctgtagaggccgccgacaggcagggaatgggcctgttgaggccacgagaggcataagctgggcctcaacaggccagtgtgaggcaggagctgacacttgggcaggttgcaagaggcatgagttgggccgaaagaggccaccgtgagggaggagctgagcctgtacaagctgccaaaaggcaggagcagctttggactggagaggccgcagacagggaagagctgggtgtggagagtctgctgtgaggcagaggctgggcctgtacatgccctcgggaagcaggaggctgggcctggagaggccgacttgagaaagttttgctcctggagaggccactcagaggcaagagctgggtgtgaagaggctgacttgaggtcgattttggcctgtagaagccactggtagctaggagttggccctggagaggctgacctgaggacagttttggcctgtagaggccactgggagggagagcttggtctggagaggccaagtggagtaagttcagggcttggagaggatgcacaaaaggaaacgctcagcctggaaagtgtgctgtgaggcattagcttggcctacacagcacttggaggcaggagctgggcctgcagagggtgacttcaggacgattttggcctgcagaagcctttgggaggaagagcttggcctggaccggctgactggaggaagttttgggactggagtatgcatcaaaaagcaaaagttaggctaggaaaggccactttgcggcatgatcttggcctacaaaggcaactgtgaggcaggagctgggcctgtagaggctgccgaaaggcaggagcttggcctcaggaggctatgatcaggcaagtggtgggcctggagggtctactgtgtggtaagagtctgggcctgtgtaggccgacatgaggcaggagctgagttaggagaggccaacttttggagaatttgggcctgcagaggctaacaggaggcaagagctgtgcctggagagtccattttttagcataagctgggcctaaagagaccattgtgaggcagcacctgcctgggaggcaggcagattcgtggcctggggaggccaccgtgaggcaaatgctcagttttcggaggatgctgtgaggcagggagaaacttggctttcggtggccgcagtgagggaatagtttgattgctgaggctgctgggaggccgaaggtgggcctggaaaactttactttaagaagtctgtggcctacagaggctgccagcagctcagcaggagttgggccaaaggaggttgttgtgaggcaggagatgggcctgtagacgcactgggaggatgagctcgtcctggagatgccgagttaaggacattctgggcctggacaggctgcaaaaggcaaaagctgtgcctggaaaagtcgccatggggcatgagcttggcctgaagaggccactgcaaggcaggagctggccccgtagaggctgccgaaaggcaggagctttgcctgaggatgccacagtgagacaccatctgggtctgcagggtccactgtgaggcagaggctggcctgtagagtccgacagtagacacaagttgggcaaaaggctgatttgaggaagttttgggcttcaagagtcagccaggaggcaggcactaggcctggaaatggcccgacagtcatgagttgggcctaaatgggccaccgtgagggaggagctgtgcctgttgaggctgctggcaggcaggaagaaatttggcctgaggcagctgccatgaggcaagagctgggcttggaaaagcccctgggaggcaagagcaggccctgcagaggctgttctcaagtcaaagctgggcctgttcatgccaccgggaagcagaaggtgggcctggagagtatgacttgaggaagttttgggcctacattggctgccatgagctggacaggaactgggccaaaaaaggctgttgtgaggcagcagttgtgcctgtagactcagccaagaggaagagctgggcctggagaagcccccatgaggcagaggttgggcctgtagacgctgacaggaggcaggagctgggccgggagaggtcaacttgaggagattttgggccttcataggccaccaggaggcagcagttgggactagagaggctgacttgagtaagttttgggcccggagatgacgttctgggacaggagctgtgcctggagaggtcactgtgaggcatgagctgg

SEQ ID NO: 32629 - DNA, 2300 bp, Homo sapien
tgcagtgagccgagattacgccactacactccagcctggagacaaagactccatctcaggaaaaaaaaaattttaaattaaaaagttctagtatctaaaatgagcaaaatcgccaggcgcggtgggtcacacttgtaatcccagcactttgggatgcagaagtgggtggaccatccgaagtcagaggttgagaccagcctgcagtgagccgagattgcaccactgcactcctgggagacagagtgagactccatttcaaaaaaagaattagccaagcgtggtagcatgcacctgtagtcctagctaccggggacgctgacggggaaggattccttgagccagaaggtcaaggctgcagtgagccttgtttgcaccacctcactccaacctgggcaagaccccatctcaaaaaagaaaaaaaaaaaaacacaaaaacaacaaaacagaacagaacagcatcacttccttatcattagtttgaagtaaattgcctgtaaaagtttccattttcaaaaaaagtattaaaatatagtgcaaagccaggcacgatggctcattcctgtaatctcagcactttgggaggctgaaatggattgccccaggaggtcgaggctgcagccgagcgatcctcccgcctaagcccggcaagtagcggagactacaagtgcgtgccaccatgcccagctaattttttgtatttttgtagagacagggttccaccatgttgcccaaactagtctggaattcctgagctcaagcgacccacccgcttccgcctccgcctccgcctccccaaaatgctgggattatgggcgtgagccaccaggcctggcccaattactttcttcagtctgagcatgagcgctggaagaaaagcgctcacttgcatataattttttagagacagagtctccctctgttacacgggctggagtgcaatggcgcaatctcagctcactgtaacctcaacctccagtgcttgatcgcttatataatctcagctcactgtaatctcaacctcccgggctcgatcgcatatatatacacacatatatttgtttgtttagacggagtcttggtctgttgcccaggctggagtgcagtggcgcgatctccgctcactgcaacctccgcatcccgggttcaaacaattctctgcctcagcctcccgagtagctgggattacaggcacccgccaccacgcccgactaatttttgtgtttttagtagagacggggtttcagtgaaaccatgctggccaggctggtcttgaactcctgtcctcgtgatccacccgcctcgacctcccaaagtgctgggattacaggcgtgggccacctcgcccagccgaccgcttatatttttaaaaagatgttttcttcgtttcctagccccttctaccccgctacaaagtttcaaagacttaatgctattacaaagggccgtcagaggtcaagctcaggggtgcagctccctcatgccgggcagcctcagagggggccaaccctacccaggatgagcggcgccaggtagccggggacgctcccgggggtccccgggccctgcctgggggaggtgttgtggggcgcacgtacccaggctcaggtgaggcgagtgggcggccggggctgcagctggcgctggccattgaggagcttcggcgcgacagtgcgatcggttgcaccttctgcgacaggtgccggccggttggcgcgcagcgcctgctagcgcagagtctggcccttgctgcgcccggccccgaagaccgggaagtcgtaaagctcctcctcgcagcttatgtgcggcggcggccgggccgaagcctagcgacacagagctgccagctcagcagcgggttacatcccgcccggccaccggtaggcagcgtccgctcaagcgcgctcctggaagacccagcagccccgccgcgagttccgattggctccgcgtgagtggcggtcccctgcgacctcacaagagcgcgccttccgtgacgccgcaagagcgcgccttccgtggcgtcacaagagcgcgccttccgtgacgtcacaatggcgcgccttcgccgacaccatagaggtgggcctctggcgacgtcagaggcgtgggtgttcggctacgtcactggggccctacggtgcctggagctgggcagtcttctcgtcagagtggggactggtaagagcgacctccccgccaggtcctgtgtgttgccagccgaagaagggtagctgaaaaattcagacccagcacagtgtttatgttggtcaaaaatagaaaactatgtctggcgccgccga

SEQ ID NO: 32630 - DNA, 2300 bp, Homo sapien
aaagctaactcaagatggattaaggacttaaatgtaaaacccaaaactataagaaccctagaagaaaatctaggcaatactattcagaacataggcatgggcaaagactttataatgaaattgccaaaagcaattaaaacaaaagcagaaattgacaaatggaatttaattaaactaaagagcttctgcacagcaaattaaactattatcagaccagacagacagcctacagaatgggagaaaatttttgcaatctctccatctgacaaagggtgaatatcaagaatctacaaggaacataagcaaatttacaagaaaaaaaacaaccccattaaaaagtgggcaaaggatttgaacagacacttctcaaaaacagatactgcagccagcaaacatgaaaaatagctcaatatcactgatcattagacagaggcaaatcaaaaccacaatgagatactacctcacgccagtcagaatagcaatgattaaaatgtcatgaaacaacaaatgctggtgaggttgcggagaaataggaacacttttacactgttggtgggaatgtaaattagctcaaacattgtggaagacagtgtggcaattcctcaaagatttagaaccagaaatatcatttgacccagtaatcccattacagggtatatacccaaaggaatataaatcattctattgtaaagatccatgcacgcgtatgttcattgcatcactattcacaacagcaaagacgtggaatcaacccaagtgcccatcaatgatagactggataaagaaaatgtggtacatatacatcatggaatactatgaagccataaaaaggaatgagatcatgtcctttgtagggacatggacgaagctggaagctgctattctctgaaaactaatgcaggaacagaaaaccaaacaccgtaagtgggagctgaacaatgagaacacatggacacaaggaggggaacaacacacactggggcctgtcatgggagggtgctgggaggagagcattagggaaaagagctaatgcatgctgggcttaatacctaggtgatgggttgataggtgcagcaaaccaccatggcacacatttacctatgtaataaacctgcacatcctgcacatgtaccccggaacttaaaagaaaatgtagaaaaacgggtagagaagagtgatttacatacttcattttccaattagtgcatgtgaaaataattcatcttggtagtattgtccagatactatctcttcctgtttaggtccaggaacagtctgcttgtgttttttattgtcaaatgagttgttctctaatttcatctctcactgggagaaaaagaataacaatactcatactcaaaatgctgtggctgtttagaatctgtttatatgaaaataatatagatcttgcctctgcagttccctaataccattcattgatgttgtttgtattattcgtgatgctgtttcatccattgtgttgcctgtgaatattggtttccaatgactaaaggtttgttagtgtgctttgttgatggtcatcacaaatgcaagtgttccatggagtaggaagaaaaaaataggaatgataatttctggtcatgttaaatttatttttcagaattttataacttagaaacacatctttcagttatacttttcttgaactcattagatcatattcactgcattcctaaaatgtgatccctttcaatgttgacctctcttctgtcccctattcccccatacagccaccagcagaaaggagagatgagtaagaatgttctcattggcacaaggaatgtttgtccctagaatggcacagcttaagacagaaccaggaaatcacaggtttaccacattgatgagaagcaggagaaggcttgattggaaaggcccattggtgttgctgatcaacaatctagaaagcccttagaggacaggcatagttaacctcagaaaactctgtgacattagctagtgtgctttgtggagagagtcaggtaagtaaggggtttggagaacatgttcaggttcaggaacattctacacttaaatgggcttactcttaccctctgcttcaatccccatcccttctacaggttagatcttgggacagcccacatacctagacaaacttaggctttccagcttgcactggaccagggtggaaaggtaaggaaaagaaacacatccgcaacattttactgcttttttttagatcaacctcacccatttaaggagtgtggactgacggctatcacattacaaacagactgggttgaattagaggtggagaa

SEQ ID NO: 32631 - DNA, 2300 bp, Homo sapien
aaaaagaggggaaaagcaaagtaatgtgagctcctacttttaaaaaaaaaaatccttagctgtaaagttaaaacgtatgcaataagtttttaccacaaaatgtgaaccacactggggttagtggtttgcatttttataatcaacaaatgtccatcctcttattcacattttaagtctcctgttaatgccaccaaatataaaaccaaattggaatattgtttcatgaaagacctctggctacacacaaattcttaggttatattctttactctgacaactctcagcactttattataactcttaaaattgaggacctgcactattaaatattttacactttcattttccaacttacactcaacataacctcttaagaatatgtatacacacatacatatatatatcacagaaagtgttcagcctgttgccaacatcaactgtaatttaaaaactctaaccgaaaattttttaaaagtttttttagagcctcagatgatctaaattttacagtgagcatggtaaatttgagaaataggattttgatcctatgctgcttgggagaaaaagtaatgggaaaagaaatgtaactcagctctttccatttattttccattaaaatgttgctacactttcaaagtgttggtaggttctgaaaatgcagtgttcctatctatgactagtcaaaaacgaccaacaagccatccctagtttacatctttaaaagaaaaatagggaacgaagaaaggacatttatgctgatttattaaacaataactttttttctttaaactgtttataatctgcctaaagaacaggtccaatacatacttttaaaaatcggcctggttctctggccccctgatcattctatgcgctgtaattcaaggagagcagaaggctgggaatgcgcagagtgaaaggaaagtgggtgcagatggcctcagaggggcaggtgacccctgaaaactgttagtcgacagcaaccgatcattctagacctccatggccttagtgtctcacgctaaactcgcaaaaaagtgccctttcagggctatcctctgggcgctcaagatttaggattttgaaggaagaaggtgaaagcgggggaagacgattttaaaagaagggctgggttattaaattgaaaagattaatcccggagccttcccctctgtcaaaaaaccctgaaagtgactaaattgacaccaactctggatgttccttaggaaaaaaacaaaacaaaacaaaacaaaacaagattaaaaagggcccaatttaagacccttattaatacatctgcaagagagcaaagaataacaacaacaacaaaagttatacagtcaattttcaatgatacatcgtcccactggtgccaccggggcgccaccacccagcacccgagacccgccgcgcccccggaaaaagtgggaagggacgtagggggatgctgaaggaagtaccttgttttgtctccaaagggcaacatagcaaacgtgggaagttcgttttcgaactccgccgatcctggactccaggaggctccgtaggggcaacaacgcgcgcaggtgaggtgaggtgaggtcggcgactcagaaccagctccctcacggccccggcctccgcgccgccgcccgtcgcctcccgctcgccccgcgctgcgccgccccctggcggggagcgaccggcagagccgcggccgcgcgccggcgagtgggacccgggcgtcgaacccgggcgggctcctcgaccatcactgccgggcgtgtgtcaccctcccggccaagacggccagcacccgctgcccgacggccgctgcccagagcaggcggcagcggggcacggactctttctgcaaaggggcgcgtcctggagtccacgcaccccgactatgcatcaattcctcaggcttcggggcacccgcccgccaagcactctctgctccactcttcttgtccctctgctcccagtctcaattcctccccaactctcccgcgagcgtttcccacgagcgccccgactgcccgctgcgcagccgcctccaaaaggacaggctccctcctccccgccctccgcaagggccgccccggcgcttggctctggaccagaaagagctggcctctggggtctgcgctgccccttggggtccgctccaggcggcgcctcccctgcgccctttgtgtgcacgccgcaaacccctctgcagagctctacttttggcggcacagccttcggcggaaaagcgagtgaaaggaggcgcgcgggacaagcaggagactggaaggggggaaaaggcaaccgca

SEQ ID NO: 32632 - DNA, 2300 bp, Homo sapien
attggacaaaaaggctgagccatttttaatggatacttttgagggagtgttaattccaatttaattaaaatgatgcattaatttaaaattgggataactggttgccctcgactgcacctgggttgcgccagtgctctcggattaacctaattgtacagaggtgcccttgttttctaacttcatgcacaaagcattggaaattatttgtttgctttttcttttccaagtaaatctttttccagttatgcataagggaagtttgaggcaatggttaaaggcacttaagttataattattgctgttatcattaacattaagcacgggtatggctttgttgcaagttacccacctacacctgcaaatctctcttgctagcacacgccccagctctctccacccgcagtggtccgtggctggaccgctttaagtcactgagcgggctgggctctgaaggaggtcggtcccgctcctcccagacccaagcgtagggctagggaaaagctaggcgggaaggtcattgcactcccaggccccaggaaaagggcccagggtctcatcatctcttactttcgggcaaaacttcccacatcgcgaccttccctccctggggcactctgagaacacacccagtcacctagcgcgctccccagaagtcggcttggcacacagcgcaccccagcggccgcgcggcctccttccagccgccgccacttggcttccggagagctcgccgggcgctgccgctgccgccgccgccgccgcctcctgggaaccaggggactgaagagcctgcgagagcggaacactgccggaccccgggtggggggggcgcagcagctgcgcctggccccgcccaccacacctgggcgcccgtagaaccgcgcggggcggggcggggcaggaggctggcctggcgctccggccgctttgtcgaaagccggcccgactggagcaggacgaagggggagggtctcgaggccgagtcctgttcttctgagggacggaccccagctggggtggaaaagcagtaccagagagcctccgaggcgcgcggtgccaaccatggagcgggccggccccagcttcgggcagcagcgacagcagcagcagccccagcagcagaagcagcagcagagggatcaggactcggtcgaagcatggctggacgatcactgggactttaccttctcatactttgttagaaaagccaccaggtaagaagaggacccacggaagacccggggctgatttctctcccctgttgaattgtgcccttcgttcacccctgttcccaggccctttgcttttgaagtaggtcctcggtcctgttacgaggtagaaacctcaactctaagcgagcacagtcgaaaaactcaagtgtcggatttgatacaacttgctcacaaagttcaaatacaaaaatgtacttgccgacctcccaccctcacccccgaccctcttggtattccccgggaacatgattattttcatacatccgtgctcacgggccttcccctagcccctctctagccctctggttccccaaaatccaatcagcaaaacccaaacagtttctgagccccttccctgcagctccggaagcaccatttccaagtcggtcttgatggctccgctcctcccccgtcccccctcgccctggccctggctgggcggggaagctggggtgagggacgagtccacgggacagcccaaaggcaacatgacggaaccttgccaaagtgagtgcggttgccttttccccccttccagtctcctgcttgtcccgcgcgcctcctttcactcgcttttccgccgaaggctgtgccgccaaaagtagagctctgcagaggggtttgcggcgtgcacacaaagggcgcaggggaggcgccgcctggagcggaccccaaggggcagcgcagaccccagaggccagctctttctggtccagagccaagcgccggggcggcccttgcggagggcggggaggagggagcctgtccttttggaggcggctgcgcagcgggcagtcggggcgctcgtgggaaacgctcgcgggagagttggggaggaattgagactgggagcagagggacaagaagagtggagcagagagtgcttggcgggcgggtgccccgaagcctgaggaattgatgcatagtcggggtgcgtggactccaggacgcgcccctttgcagaaagagtccgtgccccgctgccgcctgctctgggcagcggccgtcgggcagcgggtgctggccgtcttggccgggagggtgacacacgcccggcagtgatggtcg

SEQ ID NO: 32633 - DNA, 2300 bp, Homo sapien
agttcatactctactgctttgattgcttttctttggttgtggctacctgcatacagcagtaaagtttcagaaaaactgaagtcgcaaaaggtcaattactcaatgaaggaaagataaaccattgcattgggggactagaagatacttttaaaagttctcagattatcaatttaatgatgtgtttctatgtagtgaataatgccttaaattcttgccaagagtatttagaaggaagttgtcagaagtatatcagctaactcatttttttttatatcactgctaatggtgtcattcacacattgtgcaacccataattccagatttaattctaccaaaaaatataggtcattgcaaaatgccatattaaaactgccaatgcatgacaggaagatggggatgcagacaaagcaaaggatgacaccaattccttttttaaagaagcaagatagggattggacaaaaaggctgagccatttttaatggatacttttgagggagtgttaattccaatttaattaaaatgatgcattaatttaaaattgggataactggttgccctcgactgcacctgggttgcgccagtgctctcggattaacctaattgtacagaggtgcccttgttttctaacttcatgcacaaagcattggaaattatttgtttgctttttcttttccaagtaaatctttttccagttatgcataagggaagtttgaggcaatggttaaaggcacttaagttataattattgctgttatcattaacattaagcacgggtatggctttgttgcaagttacccacctacacctgcaaatctctcttgctagcacacgccccagctctctccacccgcagtggtccgtggctggaccgctttaagtcactgagcgggctgggctctgaaggaggtcggtcccgctcctcccagacccaagcgtagggctagggaaaagctaggcgggaaggtcattgcactcccaggccccaggaaaagggcccagggtctcatcatctcttactttcgggcaaaacttcccacatcgcgaccttccctccctggggcactctgagaacacacccagtcacctagcgcgctccccagaagtcggcttggcacacagcgcaccccagcggccgcgcggcctccttccagccgccgccacttggcttccggagagctcgccgggcgctgccgctgccgccgccgccgccgcctcctgggaaccaggggactgaagagcctgcgagagcggaacactgccggaccccgggtggggggggcgcagcagctgcgcctggccccgcccaccacacctgggcgcccgtagaaccgcgcggggcggggcggggcaggaggctggcctggcgctccggccgctttgtcgaaagccggcccgactggagcaggacgaagggggagggtctcgaggccgagtcctgttcttctgagggacggaccccagctggggtggaaaagcagtaccagagagcctccgaggcgcgcggtgccaaccatggagcgggccggccccagcttcgggcagcagcgacagcagcagcagccccagcagcagaagcagcagcagagggatcaggactcggtcgaagcatggctggacgatcactgggactttaccttctcatactttgttagaaaagccaccaggtaagaagaggacccacggaagacccggggctgatttctctcccctgttgaattgtgcccttcgttcacccctgttcccaggccctttgcttttgaagtaggtcctcggtcctgttacgaggtagaaacctcaactctaagcgagcacagtcgaaaaactcaagtgtcggatttgatacaacttgctcacaaagttcaaatacaaaaatgtacttgccgacctcccaccctcacccccgaccctcttggtattccccgggaacatgattattttcatacatccgtgctcacgggccttcccctagcccctctctagccctctggttccccaaaatccaatcagcaaaacccaaacagtttctgagccccttccctgcagctccggaagcaccatttccaagtcggtcttgatggctccgctcctcccccgtcccccctcgccctggccctggctgggcggggaagctggggtgagggacgagtccacgggacagcccaaaggcaacatgacggaaccttgccaaagtgagtgcggttgccttttccccccttccagtctcctgcttgtcccgcgcgcctcctttcactcgcttttccgccgaaggctgtgccgccaaaagtagagctctgcagag

SEQ ID NO: 32634 - DNA, 2300 bp, Homo sapien
tttataaacaatagaaattaatttctctcagttctggaggctggaaactccaaaatcaaagtgccagcagatttggcaactggtgagggctgctctttgcttacaaaatggcaccttgttgctgcatcctcagcaagggtcagtgctgtgtcttcacatagtggaaagaatagaaggggccaactgtctcctttgggcctttttttaaaaaggcactaatgcattcacaaaggcagagccctaatggtctaatcaccacttaaaggcacctcctcttaatactgttgaattagggattaagtttcaacatgaattttggagggaatacaaacattgaaatgattatacgtgtttatttaatcaagtatccaacaaaagcaaataattcaagccccaaattcactgcatctttagtagataagcagagttttaaattacgattgatctcctgttaggaggaatgcatggatttccacaagaaaaaactgtactgaggagaaactttccacagtaatgtgccacttttcagtcaacgacagaccacatatatgagtcccataagataatactatatttttactgtaccttttctatgtttagatatgtttagacacacaaatatcattgcattacaattgcctacagtattcagtacagtaatatgctgtatagatttgtggtctaggagcaatagcctaagtgtgtagtaggctgagccatctattttgtgttagtacactgtgatgttcagagaaggatgaaattgcctaaggatacatttctcagaatgtatcctgttgttcggtgacgcatgactgtattccatgagcactataatcactatcatagtaacacattaggagagaattctcatttctaaatccaatataatttatcacccattagttcatactctactgctttgattgcttttctttggttgtggctacctgcatacagcagtaaagtttcagaaaaactgaagtcgcaaaaggtcaattactcaatgaaggaaagataaaccattgcattgggggactagaagatacttttaaaagttctcagattatcaatttaatgatgtgtttctatgtagtgaataatgccttaaattcttgccaagagtatttagaaggaagttgtcagaagtatatcagctaactcatttttttttatatcactgctaatggtgtcattcacacattgtgcaacccataattccagatttaattctaccaaaaaatataggtcattgcaaaatgccatattaaaactgccaatgcatgacaggaagatggggatgcagacaaagcaaaggatgacaccaattccttttttaaagaagcaagatagggattggacaaaaaggctgagccatttttaatggatacttttgagggagtgttaattccaatttaattaaaatgatgcattaatttaaaattgggataactggttgccctcgactgcacctgggttgcgccagtgctctcggattaacctaattgtacagaggtgcccttgttttctaacttcatgcacaaagcattggaaattatttgtttgctttttcttttccaagtaaatctttttccagttatgcataagggaagtttgaggcaatggttaaaggcacttaagttataattattgctgttatcattaacattaagcacgggtatggctttgttgcaagttacccacctacacctgcaaatctctcttgctagcacacgccccagctctctccacccgcagtggtccgtggctggaccgctttaagtcactgagcgggctgggctctgaaggaggtcggtcccgctcctcccagacccaagcgtagggctagggaaaagctaggcgggaaggtcattgcactcccaggccccaggaaaagggcccagggtctcatcatctcttactttcgggcaaaacttcccacatcgcgaccttccctccctggggcactctgagaacacacccagtcacctagcgcgctccccagaagtcggcttggcacacagcgcaccccagcggccgcgcggcctccttccagccgccgccacttggcttccggagagctcgccgggcgctgccgctgccgccgccgccgccgcctcctgggaaccaggggactgaagagcctgcgagagcggaacactgccggaccccgggtggggggggcgcagcagctgcgcctggccccgcccaccacacctgggcgcccgtagaaccgcgcggggcggggcggggcaggaggctggcctggcgctccggccgctttgtcgaaagccggcccg

SEQ ID NO: 32635 - DNA, 2300 bp, Homo sapien
taaagaaaagagatttatttggatcaaatgctgcagactgtagaagaagcacagcaccagcatctgcttctggtgagagcctctggctatttccagtcatggagaaaggtgaaggggagctagcatatgcagagatcacatggaaaggaaggaagcaagagagagtaagagggatggtgccaggctctcttaaacaaccagctcttgtgggaactaatagagtgagaactgactcgccgcccaccgctcacaaccaggaagggcattaatcaattcatgagagatctgcctccattaggactcaccttcaaaactggggatcaaatttcaacataagatttgagaggacaaatatcaaagctatagcaagctttaaaaaaggaggaaatcttgccacatacaacagtatagatgaacctcgaggacattatgctaagtaaagctagtcacagaaaggcaaatgctacatgactccaattatatgaggtttacaaaatagtcaaaattgctgggcatggtgggtacatgcctgtagttctagctactcagaaggctcaggtgggaggatcacttgaggccaggagtttgaggctgtagtcccctgtaattgcacccatgaatagccactgtactccagcctgagcaacatagcaagaccttatccctaaagtaagtaaataaatagccaaactcacagaagcagagtagaatgatagttgccatagactgggggttgagagaaatggggagttgcattcaatgggtatagtttgaattatgcaagatgagaaagtcctagatatctgctgtatgaaactgtgcttttagttaacaatactgtactatacacttaaaaacttttaagagggtatatctcatagtatacattttttaccacgataaagaaaaatacagatgaggcataaaatgtgggaaaaaaatttttgaaaaagaacaaaggcaacaaatagaaaacagttacaaacattgtagaattaatccaatgatatcagtaaccacttaaaatgtaaatatctacatataccaactaaaaagactatcagggtggttgaaaaaacaagactcaactgtctacaaaaaacccattttaaacatgtcttcacagataaacagtaaagggataagaaaaatacacggtgataacactaatcaaaagctaaggtagctgtactaatcacaaattaaactgacttcaaaactttccagagataaggaaggacattgcacaataataaagggataaactctccaaaaagatagaacaacttttaatgtatatgcatctaacaaaagcaacaaaatacgtgagtgaggcaaaaactgatagaacttcaaggagaaatagataaatccactattatagctggagctgcagatattaataagagctccctctatcaataattgacagatccaacagggagaaattcgataaggatatacttcaactggacatcaatcaactagatttaattgacatttattgaaggtttcatgcaacagcagcagattatacatttttctcaagcttgcatgtaacatgcaccaaggtcaaccacattctgggttataaaacacatctttatcttaacaaattaaaaaatagaaatcatataaaatatgctctcagagcaccttggaattaagttagagatcaataacagtaagatggctggaaaatcccaaaatatttggagattaagcaatacacttctaaagaatacatgggtcaaagaagtctcaagagaaatttaaacatattttaaagtagaataaaataaaaatacaacttatcagaatttgtggaatatagcaaaagcagcgctcataaggaaatctatagcattgaatgcatatgaagaaaagaaggaagataaaaatttaatcatctaagttactacctaatgtaactagagaaagaagaccaatgtaagccagaaatcaataaataaacaagacaataatgatgtcataattaggaagatggtgtcaatgggcaaaaatgcctagaaaagaagtcaaaagatgatgtcacaatttaataaagacacagctgttaaaagcacagcatttagaaatatgaaggaaaacatcagaagaaacaggttaaagaattagatgtggtcctcacagggaatatttggtgagatgggggtgtggaaagagaaggatagcaaatggactaggatttgagttcataatcataggagactttagtcttctctgtcacacttcaatttttatgagccacttgtagttatgtattacctaaatcatta

SEQ ID NO: 32636 - DNA, 2300 bp, Homo sapien
aaagtaatctgatagggggcttcccaggcaggcagaaaccagataaggccaaactcatgagcttccaattttcctttaaaaaaaaagtataaatatttaaaccaaagtagactacaaactcctcaaaagacacagaccattccttctaaacctcatgtcttatgtctcctcatagagtacagatatttagtacttcctctgtacatagaaaaatcgtaattgtgccagccttttaatttctagaatttccaggttatactaacaattatgtgtagcttcaggtaacttaaaaagcacatcatcatgaaactcaagaaaacctttcctaaagtgctgagttttaacataaaattccttagaaagagagggagtttttatgtggaaagacatgggcaccatggtctaccagcgtgacgccaaaattctagctctacccaagctcccagtggaaggggtgaaggatatccaactcccttgcttctttactcctcactttccctgacattgctcttcatatcaaagattgtgatttatacacacacagagattaaaggatttaaggaaaaaaattttactgggtcaagtcaacctgttacctatcacacccatgccttactcttccaactaatcgaaacatgatatatacaacgctgtacaggcagaattctaagctagttccccacattcctggcccctagagagcgcatctacataatcccctcccctggagtttgggtagaacctacaaatatgagcagatatcacttctgggactaggttcatcaaaagggagatctgactgagtcttacttaatcaggtgagcctttaaaaggggctgggggctcccgaaagccacgaagatgggaagtgttagaaggcctgtaaaaggtctagctgacacacagctggcctctggccaacagctggcgagacaaaaagggacctcagtccaacaaccacaacgaaattctgccagagggcttagaaggaccc[450 bp omitted]cagaacgcagcctggacttccggacgcagccccctaccgccccggactcgcctacccctctggcctctgaggagggccctaagcccaggacagacgtggaaaaagggcagtaaaaaggatgcagttcttctctttaatccctaacccaatttctcgggaaaagctgcgttcccacacagaaggcgaaccctgtaaagctgtggcttggctgccgcgcacgcagtcgctttacgaattcccaaagcatctagcggaagtttagaccgttcactaggggtcacatgggccacttcgcgagcagctggcgaacagttcctttcagtttgaaagtatctttgaaactcggaaattgtgctccttggtctttcagttcataagcctagagagtggctactgaaattggaatcgtcatcttcttccctcggccccaactagtagaccacgaccagaagacacatcctaacctacacctaccgtagtgtcacacccggcacagcgcgaccaggtccaccaactgcgcctgcgcgaaccggccgctcccgcgacatcacaggaaggctgagagaaagggcaggtccccgctgcgtggggctgggcttaaaggctcgtcgcgcctgcgcaaaggacctgacgacgtgctgcgtcgttacttttgaaacgcttggcggggaagtgctgttggagccgctgtggttgctgtccgcggagtggaagcgcgtgcttttgtttgtgtccctggccatggcgctgcagctctcccgggagcagggaatcaccctgcgcgggagcgccgaaatcgtggccgagttcttctgtaagttctcgcgcaggccaatatatcggggggaacggagtc

SEQ ID NO: 32637 - DNA, 2300 bp, Homo sapien
ctttaatgaaatacactgaatgtgtcaattgtaacaaaaatatctgaccaagcttcataaaatatctggaaagtttctcatcttattgatttcagatttatctttaaaattttatttatatactttcaccattttctaattagtaaagaagcctacattcagagaggggcattctcaaggctgcagccttgctccccagaaagacagcatgcaaccaaatatttgagagatatgcctaaataaggatccctaaataaggattgtttcagactaaaaccaaaaaacgttttcctctccagcgatcaaaagctgtggaaattctcgtgcccaaagagacagtggcagagcatttgactgagagccctggatggcttaagggtggctggaagcctgtgtttgacaaagagctgaatgctccaggaaaatgccagggccccaccttctggactgtgggcccagtggatctggtctggcatggtttcagccctggttctaaggaaccctggaaaacctacttagtccagttccttgtgaagcacaacaaaaagtcaagtaaattctaggctcaccatagaatttttgaacatctcagatcagcctcagaagtgactttcattcaagacatatttaatgaacacctactatttttcaaggccatggaactcccaattcccccaaaagagagtttttgtttttattgatttattttcccctagagaagttagagatcttccatgggaagtcaaaggtatcaaaactcacagagtggctaagtgttcctctccctgctgtgaaagctaaacttacatttcttagaaagaggatcatgtcatcatttactgtgttccttaaagtctccgaatattgccactacatgatttttttttcccataatgccttttgttcttgttttttaaacctttttccaaacttgaatcaaaatctacataggggccgggtgtggtagctcaagtgtgtaatcccagcacttcaggaggccaacgccgccggaggatcccttaagcccaggagttcaagatcaacctgggagacatagctagaccctgtcaaaaaaaaaaaaaaaaaaaaatctgcttaggaactatgttccaagggtttcctgcagaaacaggaatcgtttccatggtgtgtgtgtgtagtctgtaattttgtcaaacttttgtgtgtgcttttaatggtttatgagaacatcaattaagaacatcaaatggtttccgagaaaagaccctagagtagaaaattaccataaatatcaagagaaatgagtagatgaccccaggatcactttgaaggatgaaacaggcttttaaaggtcctgggcacactgcacagcctaacagcttattaaaaacactaaaacaagacttgtgactttattgcattgttgtgacaccagatgctattgtttgggtgtcccctcctgtctcccacaaatccacttccgtatgtctgaaaatccgtaatacgtctaatgattatcaagcaagggaggtctcaggaatattgtaccttgagaagtataagaacttcccagaggttatgttaccataaaatatctagtttctagtgcttaaaacattaaattgtttgcaacatatttttccgtacgttaatcaacatactttgcgatcccttattaagttctagcctctgcaacaaacgtgaaaaaaagcaaagacgcataactcaaatgtgagaagcacggaaatttcctagaccgcagggttcgttctcagtagtcggcaataagctggctttcagagtcaggaacttgataaagttgttttggaggatgccccagctgtgtgaaggtccatttcgttttgcatctgaagagaagcaagcgagactcccctacagggagtaatggttcagcggggcaaggtttgaaaacccagagctggacaaaggcgggaacgcacgccgccgcgccggggctaggggtgctgacggcccgcgcagctcgcgggcctccgggtttgaggccctggggtcagccctgctccgggcttcgcgcccgggcgcgggtcagagccgccaacttcgggccaatcagcgagcggcgtcccggcgcccgcagcgcccaggcccgcgccccccgcgcccccgcagcaggaatggcaggaacggatccgggccgagcccgacccgggacgaggaggggctgagccgcgggggatcctggaatcggcagggaggtggggattctgggaggaaaactccatttcctccttccctgccggtttctcccctctaccctggcaccccaaatttcgatg

SEQ ID NO: 32638 - DNA, 2300 bp, Homo sapien
tctattctatttcctaaatatctctagagctgtcctaacctcccaaacagcatttctgctgccttggttcagacctaatttttcctctggaaataacctcactgtgatctctcttctatttgtcttgcacagtgaaaccagaggaaaccttctaaaacacattatctaataatacttacaaaccttagaatctgtcctagcttaacacctttaacagtttcccaactactcaccacctccaggcaagttctggctccttacacccagagagccttgtgtggcttggccttgcttacttcacctgcagtctagccgcacctagtctcctagtttccaggacacaccatgtactttgacactttcctaacctcttcacttgcttctgtttgtggaatgccctcccccctccaccacatccttgttggccttgtatttcttccttgtctttcagaactctacactgaaatctctaccaagagaagcttctgaaggggagttagctgtttccttttccatgcttccacaggaccaggtacctgcacttattatagtgctaatcacattttcatttatgcctctgtctcctcaccaggcggtgagttccttaaaggcagcaccatcacctctaaatctcagcacataagacatacctggtacacagcagggacttcgtaagctttgttaatgaatgacccagggatctgctctagatcgtatctcctaagtggagatacaatgaggacttttctcacctcattgtctcatctgcaaaaaatatgcttgcacagtgatctgaaatgtccttttcagtgtttaaaaattttacaaaactattttatgtcgtgtaaacggttttataaatccatttcctgcagtgttttcatctaggaaccacaaaactttaggagctgcattggtccaccctctgtgaccaactgtttagcaaaaaagatcatagttcttaatatgaccgggataaggctgattttcatcctacctaccttaatttcattgtggcaataacagaactagtgttttcaatactgacactatatcttaataaataattatatattattagaacttatataaaaccaggtttgctggaaatcaggttctcagttgcaaaaatgagatcaccaaatcattcggtactttttttttcttggttttcctaagcccaggccaggttgctaattaggtaactttttatcataattacctagtcagccttaatggcttcacacactctgctccgtttcactggtcctgtagggccgctttttcaattgttaaaacagctgctgagtttcaaatcggaggaggctcggtctgcgccgagggggaagcgctccctgagtgaaggctgtgataggcaggcgttcgggtgaaaagtgggacatgaatgcacagtttgcacactctgctttccgcctccaaccaccaaccttctggatttaacacgtccccctccctgcccccagatcaaccccagagtttccctctattgtgcaccccggtctgcttgacagtgtgatggtcccgcgtgcgcgtctcctgggttttgcagctttgtcgggggctcggtgggcctccttcattctccccgagtggcgctaaggttaggacagcagcgtgtccctcgcgatgccgcccgcgagggtcctgtttggggagcgctgggtcgctgagcagggtggtgtgtgtgtgagagaaagagagggagggagggctacagggagagagaaaaggagggagagggtgtctgtgtgtgagtgtgtgtatgtgtatgagtgtgtgtgtgtgtgtgtgtgtgtgcgtgcgcgctggcgcgcagcgggagggagagaaggagggacggagggggaggcaacgggcagaggagggagggggcgggcgggcagcggtgaggcgggaggggttagggctgggaggggaagagactccgggcttcagcagtgacactcgggagcgaacacacactccccacttccagccgcgagagagtggagctaactgagcagcgcacccgccacggccgctgccgccccgtgcgcccggctctcccagcaccccgcgcggcgctccagccaggcgcctgtgcgactagcggcggccggcgaagcccgcgccagccccgcgggtcgctgcggcatcctcccgccgcccagcccccgcacgctccctgcagtttaaaaggacctcccgccgcttctcggcgctgccccgggattccccagccccgcgcggctccctactccacttcgcagcaacttcggcgaccgcgcgccgcccgccct

SEQ ID NO: 32639 - DNA, 2300 bp, Homo sapien
gtgccttatgacctttaccctttatgccttgcaacttgacacaccttgaaactcaaggtttcttgagttacttgaaaagtctttaagtatagttgatttaggtgctatgacttcatgaactgggcatccaaacacatgggagttaaaaagcattatcataaataaagtttgtttctaaaatgttcctgggaattaatgggtattatttggaattttatttttctgagcttaatgaatgttagaacctctttactcttcttgacagaggaagtagtgaaaagtataacaattttagcactctgtatattgtcaattttgtaattccttcttttttttttttgagacagtgttgctctgtcacccaggctggagtgcagtggcacgatctcagctcactgcagcctctgcctccagggttcaagtgattcttgtgcctcagcctcccaagtagctgggattacaggcgtgcacgaccatgcccagctaatatttgtatctttagtagagatggggtttcgccattttggccagcctggtctagaactcctatcctcaagtgatctgcccacctcagcctcccaaagtgctggaattacaggagttagccaccgtgcccagcctgtaattccttttctaattcattctgtgtactacatctttcatgttctcttgcatggtgccttctactcttctttgatacttgaagaatattgtgaccttctggaaaattattgaacgatggcagagtaatgttactatagtatacacatgggaatccctaaaatgccaacagagtaactctcaatataataatattatacagtttcatactaaataatgatatgtattttcagcataagagttacctagtaactgccactctggattcagtagtttgctttttaattaggagaaagttttgctactttttagtcattatgactgtcttctcagtgtctgttccctatagataagcgttggaatttctcttaatgcagaaaactacaaacttccccaacaaaaagccaaccacatatcatagcacttcttctgccttctaattagcagatagtcttaagatctttaaattatttgtagcctaaaatgcatctaaatattgtcctatgacgaaactataatttcttgaaaatctaaattttcaaaatggtgatattacctatttgttgagtatttattataaatcatgtgttaatcttttaaaacacattattgcaagaaaatcgtgatcagttaatggagcctaggctttgttagcataaattctgctttaaaagagctggaaaaaatatttcattataatcagtgtaagcacaaagaaaaatacgaaaaagtttgggaaaagaacctccatgcattaagaaatcttacagacaatcatcaatacttacaaatttttatcagattgtggttggattaaacaaagaaaatgaaaatccaaataactaaaaaaagttaaaagttactgataaactgttcagctgacttgtcaagatatacctgagacttactggtttttcttttcttttcttttcttttttttcttttctttccatgagatggagtctcactctgtcgcccaggatggagtgcagtggcacaatctcggctcactgcaacctccacctcctgggttcaagtgattctcctgcctcagcctccccagtagctgggactgcaggtgcatgccaccacgtccggctaagttttgtatttttagtagagacgggatgtcaccatgttgggcaggctggtcaccaactcttgacctcaagtgatcccacctgccatggcctcccagagtggtgggattacaggcgtgagccaccggacccagccagtagtttttcatatacgaaccagttataaacagtgagagtgtgttcaatttaatcatcccagcacaatcagaacttgatggaaaaaaatattgtcttcatccatggcttctaaaaccttaataagctcagaaagtaatttctttttgaccaaacttccaaatgggcagaaattctttgttgattcaccaaattttaatgatttcagctcctggaagttaaccagcaatgggatcagcaatttagaagtatgaaagagttatatgaaagaaaggtaaatacctctctctattcggtattttctttaaagccattatcctggtggggccaattgtgtgaagagtctcattcatttcagctacaaagagctttgtggatagccaactgttggaaaatgacgggaagggtgctaagtgtagtattggtctcatggcactgaaaatt

SEQ ID NO: 32640 - DNA, 2300 bp, Homo sapien
gagagggatggaggtgaagtgaacagagcatatgtaacagaaaagacccaattaattcttagggatggcatattgaaagtctcatttttctgaaaccaaacttgtggctcttcagaagagttattacttattcataaataaccatatggctctcttgagctaatagaaaatctgtttgttgtttatctgcataacagaagaggcaaaggaattgtaaagaaagaagcaaaggtatagaatttccatttaatagaagccatcacacctaacaatgtatgtgcatcaggatattttacaggggagactcaagaggcacaatgccaaggatggtatttcctggcaagaaaatgttcttcccacccacttttctaggtcaatgttaccacatccctatacaaatacaaagttaaagctgaagagaaccttacactatataaaactatggagtgtgtatgtgcatggtatgtttcagaagaaaaatattcttacaatagagttttctttttcttttctgatgagcagattttagtgttgataaagtgtcagttcaggaaatcgctgcttctgtaccctaaagtcagatcttatgtgagttataactttttactttcagaaccctgaatgaacaatttgattcctacctgtatttttggattttgccttaaagcagcgtcactccctttcactcaagcgtagacccaaacataacaagaaaccagaagaaagtaaacacacacacacacacacacacacacacacacaaactagcaaaaagttcatcgattttgtaaatcattatatagatattcattcatttattcatgtagcaaaatgtgttgaatgcctgctgtgtgccagacagctcagtgcctgggtgcgtggacacagagattaacacaagaacatggaaatatgtaatcgtaatgcatgatgaagtgctctccttagctgattagaggaagtcaagagaagatcagaaggaaagagaggcattgacttaggttttccccgtcataaggttggatggagggcccagagaggagacatctgaggtggcaagaacagcatgcacagagctcaggggcgtagaaccatctcactcatttcaggaaagggaggtcagtcaggatggttggagcacaggggagagttggagagtagggggagatattcaggagaaatgggagggccaaatgtgggacactcaatcactctcttttgaattttaggagttttaggctttatcctatatatatgtgaatatctcgtaggcaggttaatgaagttaaatgattgaccataaattcttttctctttttagttacacattctttccttttttgtattccttgcctctttccttttgttccaagtccaaaatgaggtcttctgttccatcgcagttcacttatgcagctccaagtatctgccatttccacgcttttatctgtactacccagtagtgctccattacctcaaggctcctaaaatgataacagtcaaataattaaagtgaaaatgattctccatgagaagatttcacttcaaatgagtcatggagacaatctggacttgatttatagaaaagacagacttaaacttgagacaagtttaacctttctgccaatatagaagattagatttgcaaacaatgcccattttctttacaatgaattattttcccttttatttctataagaattagtggcacttatattattatgtattatgaattatgtatgactcattaagttctaccaagctacactcacatttagaaggtattgccagaaaatctcgcctttagggaaaccgagctgtcaaaaagtcaacagttacctaattgctctgggaaatacaatgaatttataacagttaggctactgaggaaacacttggattgcccaggctttctgtggtggagaacttcctcctccagtgggagaaactgccagtaaaggaagaatgacgatttacatactatagcaaggctaatctgccccaggtcttagtcacggcctgcctatttgagacatcctgggaaatccctatttggaagagaagaaaagttaaaatcccagttgcagtgcttataactttattctgtgtaattcctatccacagtcacttctgttcatttttaatgaaaacctattgctgttattttctattatgagttaacggtgatgtgtgttttttaaattttgtatacttgctctcaccctaaaatataccttaagagacttttcccctgtttttctttctgctttccaagactccaggaaaaacagcttccatgg

SEQ ID NO: 32641 - DNA, 2300 bp, Homo sapien
gattgaaaaactcaacctagtaaatatgtcaatttctatcaaaatcccagcaaggttttttgtagacatagacaagttgattgtaaaatgtatatgaataggcacaggtcctagaatagttacaataattttgaaaaataagaatgaagtatgagaaatcatgctacctgatttcaaaacttattatatagctacagtagtcaagaatgtggaggatagacacatagatcaattcaacagaatagagagcccaaaacataaaatgtaaaactataacacttttagaaaaatacctaagagaaagtttttgagaaataggctttggtgaagttagactgaacactaaaagctatctataaaagaaaatattgataaatatgacttcactaaaactaaaagctgttctgtgaaagtccctgttaagaagataaataacaagctacagactggaagaacatatttgcaaaccgtttactaacaaaggacttgtatgtagaatataaaaagaactttcaacagcaaataaactaaaccatgcaattagaaacggacaaaacacatggaaagacatttcaccaaagaagattcaaggacggcaaataagcacatgagatgttcaatattacttgccattaggtaaatgtaaattaaggccctaaagagatatcactacagatctattagaatagcttaaaaaaaaaaagcagcaaaaccaaatgctggcaaggatgtggagaaacgtaacttctcatgcattgatggtagagatggagacttgtacagccactctgaaaagtagtcaatctctttaaaaattaaatatacacattacagattcaataatcaaaacttttggcatttcctatagaaaggaaaactatgttcacacaaaaacctgtacatgattctttatagcagctttatttttaatagctcaaaatggtaatcaaccaaaatgttctacaagaggtggatggttaaataaacggtgatacagcctcagcaataaaaagaaacagccattaatacatgcaacaacttggatggatttaaagggcattaggctgagcgaagaaaattcaatatcaaaaggcagcatattgtatgatttcccttacgtaatgttctgacaaaagttaagagagaacatattagtggttgccaggagttagagatggtggagggaggggctaggtgtgagtataaaaagcaccagggagatttttgtggtgatagaagagtttgtatcctgacggttacgggaatctacacttgagataaaaacatgcaaacactgtacctgtgtcaaattcctggttttgtattgttccgtagttaaataagatgtaatgaatgaaagaaactgggtgaagggtgggtacgcaggatctttctgtattatctttgccatttcccaagttctatattttaactatcttaattatttttcaatacagaaaataatttaaaataagccctatttgccttgggtagttgtggctcccattattacgcaagaggagaaacttgaaactgtggaaccccccaatacccagtttcacatacaagcattacctgactggggccatgccctgagaaaggcgctgggcggcagcaagttggtgagccagggaagtcttccctcgccctgagggtgcggggaagcggcgttggcgccactgaagctgggtgtgagggaggcgtcaccgagttcagccccaccctccaccgctccccaagcgggtccggcgtccgcatcgcatggccagaaggcggggagccagaggcgccaggaccctcgcgtggcgctccagcaccccagaccgtggcggcgcctcgccttagggaagagcaagggaagaactttatttgaaccgcgaacattttttggtcactgagatcgagtctcccagtgctttggcttcccgcctctttatcgtgggtttgatccctgagctgctctcctttcccgaacctcccggggtgcagcctagagccctcccgcgcggctgactccagagtagaggaagggaggcggcctccggctggtcccccgaagccctcgctgccccgcagatgcggatggccagccagtagcgggcggtggccccgcgtcccgggagcgcacagcaatgcaggcgcttaacattaccccggagcagttctctcggctgctgcgggaccacaacctgacgcgggagcagttcatcgctctgtaccggctgcgaccgctcgtctacaccccagagctgccgggacgcgccaagctggccctcgtgctcaccggcgtgctcatcttc

SEQ ID NO: 32642 - DNA, 2300 bp, Homo sapien
tcacttgccgtgtttaccccagcacctagatctgtgcctggtccagagtaggagttgaataaactgatattactggaagtgaaagaaatgctacctggagtatttcaagactctgagtccaataactcatcgattttgtcagtatttagctgcaggacatagagcaagtcactaacccatgatgagtctcatgtccctgtaaaatcaatgattgttaaatacaggatctctgaggtcctgtttaactccattaatgtgagagtagaaagtgagagaagcaaactgagttcaagtggatatgggtgagaaaaaagaatgctctaggcaagactacaggtcctgcttttggtgcagggcagagagaaagtagaaaagctggagcaacggagacagatgctcagaaaagggctgccttcagatatattaatacctgtaaagaaaacccgggggaggtgctgacttggggagagcctgaggctgagtagacagctgggctggtggagaggaggctcccagaggaaaggcaacccgccagtggggtgggggtgatggggttggcaagctccacaaattttgcaattttgcctcctttcccagagaacaaccactctgttgtgactttgtcagggctggaataggcatgtggttcacacgtgaaagcgaatgagaagttctatacaaagaaccacatttgctgtccatttaatttattcttcctcattctcaaagaagactagatcctcatctcttacccttaacctccacgttgagaagcactttgcccttcccattctagcatatgtctagaacactgcatctagtgtcgcaaacttgtcctcttgccccctctgccctggcaccttccctccccacaccagtaagtctgagaaggtccctgtgtcttctacttttccttttccagcatatggagacaaaagtgattatatcccggatgctaatccgccatgttgacctttaataaccccagtcccatgaatacctcctgattcctaggattttttttttaaactgtccttagcataagaacatgtcaaccttgatgctattgcccacattgtaggctatgaagcatacggcattctcacctgttccggagggctgcctttaattgtcttgcacagagcagtatactctttccttacggtatataaggccagggtctggggagtaacagtgcagaaatttatctgcttgccgccgcccaaggccacgcttctgtctaccacatcctccaatagcacccctattacctacagactggatttgtctgtctcgttctttggtttcttgactccttcgcgtttgggggctgctttgcatataaagccctttcacagaacacagcaccatgctagtacaatacgctgtagattctccctccctccccctctctctcatatactcatatattttatgttgaaccaatatgaggcattgctcaaatttaagtcatattaaagttctaggctagttttgaaaacagaaactgattggaagcagaggttttcaaatagcccacatacgctactagaaggctgtacatttaagagagggccatctaggaagcaataataggcattaaaacaacaacaaaacaacaaaacaaaacagaaacaaaaacaacttgggaaacggccctcctttcacgttttttctatcccatcgacaaaggcgcgctgtccttagctgcgatgattttgtctcgcctccaaaaagacgcccacgcactatgttgagcacccaagtgaggctacggttcctgcggtcacagagggcagggaggctcaagcacctccaaaaccccgagccctggacagctccccaggcccttcccgcggcgcgaggacaagaggtctccggggccctcgggggagcggcgcctcctcctggttccagcagctctgcggccgctccccacccaggcccgcgagaccagcgggacagtccgcgccgcgggagaccaactgggacgagccgcgacccacgcaggcgcgctgaggccggggcaggggcgggcccggctggcgcggccggcctgcggttggggccctggcgggggtgggacgggccaagccgggcagggccggggtggggccgctggcgtttccgttgcttggatcagtctaggtgcagctgccggatccttcagcgtctgcatctcggcgtcgccccgcgtaccgtcgcccggctctccgccgctctcccggggtttcggggcacttgggtcccacagtctgggtgagtggtcgcagcccggggagggggctccttctggagag

SEQ ID NO: 32643 - DNA, 2300 bp, Homo sapien
tccttggactcctaccctgaatagggctgacctgtgtgaccagtaggatattacagatctgatggcacgtgacttctgaagctggcggtaaagagcactgcagcctctgctttgttttctttcatcacttgttctgggggaatcccgcagctgtattggaagcacccatggaagggaactgaggcctcccaccaacaaccagccctacctggcaagcagtgagtgagccaccctggaagtggatcctccacctctacacaagcattcagctgaaggcagacctggctgacatctgaacggagcctcatgagtaacccgacaccagaatcacccagccagtgctcccacatttcggacccacagaaactgtgagagatgatcaatgtttatgctgtttgaagccactaaatttgggggtaatttgttctgcagtaatagatacactgaacagcttttaaagctgcgcgatatgggctttgggtcacgtcaaccagatacagaaaggctttagggactcaagaaacactttgagtaaacttgttttcctcttttcaccaaataaactgaatttgaggccaatatttgaaatctttgtgctatataacttctgaaatacattgtattcttaatgcgtttccaagtgacctgttgtccatagaaaagtacactcaacactgaatgtatctgctactctgaagagcaagacagctcgaactggaattcactcagacacctcatagcacgaaatcatctcatagcctttcagaccccatcttcactgccacctttcattcttttgggtctctgggccatgacatcccctgtcctttcggaaagcaggaacggagggatataacgaaataaattaattgggaacgcagcggagctagggaccctactggatgttgggggtggaacttttaaatcatttacaaaacaccagtcccgacctcccctggaagactgagctgttacctcttctggcgtccgtgcccgcggaagttcgctcctagggaagtcgctcgcgtcctcaagagcacctgagaggatctcggcgaagcggaaggctttggtgccagctgggagagtctgcgccggatttcctcagctccttggcgcgtttcctcggagccgggggaggcaaagcacggaccccggagtcggcgcccatagcgggacgccctcgcgaggggcgggagtgcgggaggtgggtgtgcgggcggcgcgctcgccctccagctgcagcccgcgccgagcgcgcagggccagcgagcgccggcgcctccagcatggagtgggaactcaacttgctgctctacctggcgctcttcttcttcctgctcttcttacttttcctcctgctcttcgtggtcatcaagcagctgaagaactccgtggccaacacggccggggcgctccagcccgggcgcctctcggtgcaccgcgagccttggggcttctcccgagagcaagcggtgtgacccgagtgcgggcactggcgggagggcaccgagctgcgcgggcgctgggctgggtctccgcctcgattctccgtcctcgcggcctcccagcttccaggtgcggggctcggcggctctgacgggtccgttccggcgtgaggcgcagggacccgcgtctccgctcctgtgggaggcccggggctcgcagcgcgttcgggtgccagggacggtgggtgtatggggtctgggctggcgctgtgctcttcgagagggaccctaagctgttccagggctgggagagatggcgaaaagagaattcgccctttggagccggaatgactttggacaactgcaagctcttttctgtccaactgcattttagttatacccaaggagtggaaaagtaaattattcggataatgcagtttagccactttcgaacaaaatcgcaggttaacctgaatatccacatttttgagaaagactgtgtgggctttgggacgggtggcaggaggaaacggggcgcacttaaagtattttaaatattgctttaaatatttttgcgctttgagagatggtaaatggggttcgtctggtggtgctggggtggggcgtgggggagagaagattcagtcgtccatttggagggaggaatcccttcctcccggtgatccttactcatattctagccaccaaccacggttagtgcttgcggattgccgtgcagggtaggtttcgaatctgggacagcggatggtgaacgttacagtgagagtcatttggaagatgccttagggttggccggtacgtgaccttttgggtgatggcatggagggccag

SEQ ID NO: 32644 - DNA, 2300 bp, Homo sapien
acaacagatgtaaataacctcaagtgcatagacagcagtgaaatgtagtactgaggttggtgcaaaagcaatcacggtttttgcttttaatgacaaaaaccgtgattgcctttttaccaacctaataaaataattagaaagtgatgagtttggagtattaattacctttgttgttaacataattgtaggtttatataatttaacttttaataatagctggaatttaaaaattggtttacaaaatttaacaatcagctcctgtgagtcattacgagccagctccagcataccactgcctatgaagtggatcaatataatgttattgagagagagacaaagagaaaatgaaagaaagattcttctcacttatgcactaagatgcttgatggagaggcctagggcctggaaattttgtacaatagcttgtagcattgggggcccttcgtaatagaataataacagtatctgacatttatatagcaaaacacatttttatttaacattttctcatttttgagcctcacaacaaatccaagggaaagataagcaaggcatgttacagatgaggggactgagagtcactgagcaaaagtgaccactgacagagctgacactagaatcgggtccatgagacttgcagttcacagactgttttcataccaccctgtctctttgaacccctgtcatccctggagcagccacttattacaatctgggatgttgtcagccctcatccccagaattcagtccaggaggcaattctgcatcttcacaaataaagaataaaataaagttaggcctacaaatgggcaatgatagctggctgtattaacagctgtcatagccgactctaagatgagccccagtgatccttactccttggcgttcgtgtccttggactcctaccctgaatagggctgacctgtgtgaccagtaggatattacagatctgatggcacgtgacttctgaagctggcggtaaagagcactgcagcctctgctttgttttctttcatcacttgttctgggggaatcccgcagctgtattggaagcacccatggaagggaactgaggcctcccaccaacaaccagccctacctggcaagcagtgagtgagccaccctggaagtggatcctccacctctacacaagcattcagctgaaggcagacctggctgacatctgaacggagcctcatgagtaacccgacaccagaatcacccagccagtgctcccacatttcggacccacagaaactgtgagagatgatcaatgtttatgctgtttgaagccactaaatttgggggtaatttgttctgcagtaatagatacactgaacagcttttaaagctgcgcgatatgggctttgggtcacgtcaaccagatacagaaaggctttagggactcaagaaacactttgagtaaacttgttttcctcttttcaccaaataaactgaatttgaggccaatatttgaaatctttgtgctatataacttctgaaatacattgtattcttaatgcgtttccaagtgacctgttgtccatagaaaagtacactcaacactgaatgtatctgctactctgaagagcaagacagctcgaactggaattcactcagacacctcatagcacgaaatcatctcatagcctttcagaccccatcttcactgccacctttcattcttttgggtctctgggccatgacatcccctgtcctttcggaaagcaggaacggagggatataacgaaataaattaattgggaacgcagcggagctagggaccctactggatgttgggggtggaacttttaaatcatttacaaaacaccagtcccgacctcccctggaagactgagctgttacctcttctggcgtccgtgcccgcggaagttcgctcctagggaagtcgctcgcgtcctcaagagcacctgagaggatctcggcgaagcggaaggctttggtgccagctgggagagtctgcgccggatttcctcagctccttggcgcgtttcctcggagccgggggaggcaaagcacggaccccggagtcggcgcccatagcgggacgccctcgcgaggggcgggagtgcgggaggtgggtgtgcgggcggcgcgctcgccctccagctgcagcccgcgccgagcgcgcagggccagcgagcgccggcgcctccagcatggagtgggaactcaacttgctgctctacctggcgctcttcttcttcctgctcttcttacttttcctcctgctcttcgtggtcatcaagcagctgaagaactccgtggccaacacggcc

SEQ ID NO: 32645 - DNA, 2300 bp, Homo sapien
aatcacaaatctttgctaaacttgtataagacttcaaatttctctcaatagtcccacgagcagtgttgtgctggttaatttaacaactgcctccctggtcctgatttgtagcatttgtccattttctcaaggcaaacccactcatcatggctaatttcaagctaccaacatgacagcactgaacacagctgggaagagatgcgcagtaacataccactatgcagcatcttcaccacacagctacaacagatgtaaataacctcaagtgcatagacagcagtgaaatgtagtactgaggttggtgcaaaagcaatcacggtttttgcttttaatgacaaaaaccgtgattgcctttttaccaacctaataaaataattagaaagtgatgagtttggagtattaattacctttgttgttaacataattgtaggtttatataatttaacttttaataatagctggaatttaaaaattggtttacaaaatttaacaatcagctcctgtgagtcattacgagccagctccagcataccactgcctatgaagtggatcaatataatgttattgagagagagacaaagagaaaatgaaagaaagattcttctcacttatgcactaagatgcttgatggagaggcctagggcctggaaattttgtacaatagcttgtagcattgggggcccttcgtaatagaataataacagtatctgacatttatatagcaaaacacatttttatttaacattttctcatttttgagcctcacaacaaatccaagggaaagataagcaaggcatgttacagatgaggggactgagagtcactgagcaaaagtgaccactgacagagctgacactagaatcgggtccatgagacttgcagttcacagactgttttcataccaccctgtctctttgaacccctgtcatccctggagcagccacttattacaatctgggatgttgtcagccctcatccccagaattcagtccaggaggcaattctgcatcttcacaaataaagaataaaataaagttaggcctacaaatgggcaatgatagctggctgtattaacagctgtcatagccgactctaagatgagccccagtgatccttactccttggcgttcgtgtccttggactcctaccctgaatagggctgacctgtgtgaccagtaggatattacagatctgatggcacgtgacttctgaagctggcggtaaagagcactgcagcctctgctttgttttctttcatcacttgttctgggggaatcccgcagctgtattggaagcacccatggaagggaactgaggcctcccaccaacaaccagccctacctggcaagcagtgagtgagccaccctggaagtggatcctccacctctacacaagcattcagctgaaggcagacctggctgacatctgaacggagcctcatgagtaacccgacaccagaatcacccagccagtgctcccacatttcggacccacagaaactgtgagagatgatcaatgtttatgctgtttgaagccactaaatttgggggtaatttgttctgcagtaatagatacactgaacagcttttaaagctgcgcgatatgggctttgggtcacgtcaaccagatacagaaaggctttagggactcaagaaacactttgagtaaacttgttttcctcttttcaccaaataaactgaatttgaggccaatatttgaaatctttgtgctatataacttctgaaatacattgtattcttaatgcgtttccaagtgacctgttgtccatagaaaagtacactcaacactgaatgtatctgctactctgaagagcaagacagctcgaactggaattcactcagacacctcatagcacgaaatcatctcatagcctttcagaccccatcttcactgccacctttcattcttttgggtctctgggccatgacatcccctgtcctttcggaaagcaggaacggagggatataacgaaataaattaattgggaacgcagcggagctagggaccctactggatgttgggggtggaacttttaaatcatttacaaaacaccagtcccgacctcccctggaagactgagctgttacctcttctggcgtccgtgcccgcggaagttcgctcctagggaagtcgctcgcgtcctcaagagcacctgagaggatctcggcgaagcggaaggctttggtgccagctgggagagtctgcgccggatttcctcagctccttggcgcgtttcctcggagccgggggaggcaaagcacggaccccggagtcggcgc

SEQ ID NO: 32646 - DNA, 2300 bp, Homo sapien
gtacatatattttaggatggtatgtagatgtaagtggagatgggtcatacacctttggattaactcgaaaataaaaagacaaaagcaagagtgtttaaattagaatataaaagtgaaagtagaaaagaacagtggaaattcaacaaaagtggaaggaaagcaaagtaatcaagcagcagtttcagaaaagcaatctgtcatgctgagtttgggcagtttcatgggaagcctttgccaacccaacaagaaaggaggaaactaacatttgaatagctatcatgtccaaaatgtttcatcagatgctttcattcagaccacttaacacagaataattgttatttccaatctgaagatacagaacccccaaatcagaaagaatatttagctcactccaagttcatttgagctgaactttatctgaagccaaagtccattctctttccattaccaagctgccttgcagtaaataacaggctatttcaacaaaggtctatttcatcgctgaagggaaaaattaccaaatggccactgaaagaactcaaggatttaaatgaagaacttatcaaccaggagttctggtatgaaactgtactataaaaatgaattcatgttgctaaagaacttaagtggttagtaccctgtaatccccttgccgattttgaaaattaatcatttctgtccactttcctccttcttcacaatttctctctccagaccatgtggagctcatctcatctcagtttttgcatatgttactctttctgcttgaaacacttttcctctccagatggcatcaagggtgctcctgctcaacaccaaagatttactttactttaatgtcaccgctacaaagtcacctgttcctgcaactacccctattaagatagcattcctattctcagagagcacttaacactgtatgaaattgttctatttgtttagggttttttgccttttccaaaaagaatataaattccttgaaaggatcttgtctaccctgtttctccagcacttaaattattcttggacagagtaggccctcttcaagtatttattgagtacatggattgcaagtggtacaaagtgagactaaaatgtatcactggtagaaaaaacttgtgagaagctaccaaagaagccagagaaagactgcgtaggagttacagtgcctaccacctctaaagcaaaaggaaacaaaataataatatgcaaacacttaaatagtgcttattccatgccaggcactgttctaaacattttatgtatatattaactcatttttattcctcagaataaataggtttctcacttcccctgctttgtttttgtttttgttttttttttgccggtgagtaatgtgaagcacacaggttaacttgcccagggttatagtagttaatgatagccttaaaatttgaaccctggcagtgaacactttttaaaactactatttgatactgcctctccaaaaaagctgagtggttggcagcatggccccgctaaggcttctctgtgaccgtaaaaaaaagtctatcgacttaaaataactggagaggggataagaaataaacggtgcatttactttcagtccacagtagtagtaacatcgttagttactacgtgcgaacattctccattctcatcaacttctcagatcccacaagatttcacctttggccacaaaaacatcccatttcaccaatttatctttctcccccaacccttatgccgcctcattccagtgtttgttcatttaatctgctccaaatcctgcatctgcggctttccagggaccaatgtcaactcatctgtgaaattgcagaagtacatgtctagtctccaccccgtgagaggactgagcaaagggtgaagtgtgcgagcggtctactgataataatttctatcactctcatggttattttaagtatccttttctcctctgcactttatgagaaaagaaacggaacttcacgttcagaaacggcctcccaaagccgcaatggcttctcgcagctcgctggccttccccaatcacgctttgagtctgcgcagtagctgcagcccaagccatttcccatttttccgccgccgcgccttgatgacgtaattttcctgcgcctcggggcgagcagcggcgcgcaaggaaagatcgggttccgtttttcccgcggattctggtgcctgtggggccggtgacccaacaccatgaaggaaacgccactctcaaactgcgaacgccgcttcctactccgtgccatcgaagagaagaaggtatggtttggtgcccgcagaattgcgcg

SEQ ID NO: 32647 - DNA, 2300 bp, Homo sapien
tttaaaggcatgatcactgatcttttcatagataaatttaagtttaaaggcaccaatgtaaaaactaaagtaccccttctattggaaattctggacagttatgaccaaaatgcattgatttcattcttcgatgcagcatgacatacaaataaggtaaagtcccaaagaagtggtctgtttaaatgaaaaatgttaaaagagaattagaagttaactgtgtatgtactttaatttcaaatgcttttttatatctaaaaatatttgagatataatggctttttaaagtaatgcttctatttcttttgacaaattgaactttctaaaactaaaagagtctttttatttttaaaacacaagtagaatgatttaaataggattttaatgaatttttggcaagtggctgttttaatttttaaattgagaagtaatatgtggaaaattaaaatatattcaaatgtattacaaggtacataaacacataaacatgtagaccgctttataggcttcaaaatgtatttttatatattaccttatttgatcttcacaactgttgtaaaatttgtcaaatcatataagaaaactgattctcagtgaaattttgtgattaagaggacatgctaatattttgtaaagctgggaccagaacccaagtactggtacttgctttgtgtcctggttactatgtatgttgccagctagtggaaataacctaccaattgttttttctaggagataggattgatttgcaactgatattccttttgcttggtagtgttttatgactctgctgcagtttgtggaaatgctggacttggctcagtgctataaattgtagccaggaaataagaagagcttacacagagtcgggggatcttaattagacatgctgtaaccagtggagctattcagcgtgcttcaagtgaagagtgcagaaatagtgatgccatcttagattttcctacactagtatcttctagatctctttttatcatatatgacattaaggctacagaagttttgtgcattaatcttaattcatatttattaatttcaagggaatattgaaaggttttaaaatggcatacagataatggaaaataagctttatgtttcaagaagggcagactcacgaattttttagaaaacagtgcttcttaatgatatgctattatacttattagttatgtgcaagctttgtatattcttatatttatatataaatataaaaatttgttaaaggcacgtatagttaagagagttttattttaataaggtcatattgtttttactatgtttaaaaaactttacttctgaaaggaacataattatatctaggtcactagaacgtcattgtgttttttgttggttgccacagcttggggaaaaatagaaaaaaattaatgactgtatttgaatattttgtaatgcactgctatttattatatatatcaacagtagttcaaggtgccatcttaaattaattgcatcttcattaggaaaaataaaaagcataaaacacaatttctggttactatgaataaacgcctaaatgttaagatgacattacagtcttgacacttgagtactgtattactatgtgagctccgtgttaaataatttatgcacattatttaatcctaacaaccatatgactgtagttattagtccctattaacacataagaaaacggagaatcggagatactgaaaaacgtgccccagattttagacctttggaaaaagtcacttaagctaactagacgtcccagagctaaaggctgggcaacccaaatgatagtcgccaaagtttaattccgtttaattccctaaaaggcttagagtcagccttcggacagcctcgctcactaggtggctcagcttaaaataatcggaagcgtcgggccctaaatcctacctctccccgccccgcgcaggcgttttctcccgccccagccagtttgtttctccctcctgccccgcccctgctcagtttcctttggtttacccttcactcgcctgcgaccctgtcgccttgaatgacgtcaaggccgcgagcgctttcattggtccatttcaatagtcgcgggatacttgaactgcaagaacagccgccgctccggcgggctgctcgctgcatctctgggcgtctttggctcgccacgctgggcagtgcctgcctgcgcctttcgcaacctcctcggccctgcgtggtctcgagctgggtgagcgagcgggcgggctggtaggctggcctgggctgcgaccggcggctacgactattctttggccgggtcggtgcga

SEQ ID NO: 32648 - DNA, 2300 bp, Homo sapien
aatagccaaagcaataataagcaaaaagaacaaatctggaggcatcacgttaccacacttcaaattatactgcaaggcaagttaccaaaacagcatggtacaggtaaaataaataaataaataaataaagacacatagaccaatggaacagaatagagaacccagaaataaagccaagtacttacagtcaactgatcttcaacaaagcatacaaaaacataaattgggaaaagggcgccctattcaataaatggtgctgggaaaactagtttagccacaggtagaagaatgaaactggattcccatctctcaccttatacaaaaatcaactcaagatgaatcaaagacttaaatctaagacctgaaaccacaaaaattttagaagataacattggaaaaactcttttggacattagccaaatgcaacaaaaacaaaaataaataaatgggacctaaataaactaaaaagcttctgcacagcaaaagaaataatcagtaaacagcccatagagtaaaagaaaatattttcaaactgtgcatctgataaaggacttgtacctagaatctacaaggaactcaaacaaatcagctagaaaaaaacaatcccatcaaaaagtgggcaaaggacatttttcaaaagaagatatacaaatagccaacaaacatgaaaagatgctcaacatcactaaatcaccagggaaatgcaaattaaaaccacagtgagataccaccttactcctgcaataatggccatgaggcaggcggatcacgaggtcaggagttcgagaccagcctggccaacatggcaaaaccctgtttctactaaaaatacaaaaatcagccaggcgtggtggcgggcacctgtaatcccagctactcgggaggctgaggcaggagaatcacttgaacccgggagccggaggttgcagtgagccgagatagtgccattgcactccagactgggggacaagagcaagactctgtctcaaaaaaaaaaaaataaacataaaaaataaaatttagaaaatatacgttggtgtcgatatggtgaaaagggaacacttttgcactgcttgggggatgtaaattaataccaccactatggaaaacagtataaagtttccttaaataaataaataaaggtggagctaccattcaatccagcaatcccactactgggtatctacccaaaggaaaaagacacatatacacgcatgtttatagcagcataagtcgcaattgcaaagatatggggccaacctaagtgcccattgactaacgagtggataaagaaaatgtagtatatatacaccattgaatactactcagccataaaaaggaacgaaataatatcttttggcagcaacttggatggaactggaggccattattctaagtgaagtaacttaggaatagaaaaccaaatactgcatgttcagttatgaggatgcaaagacatacagagcgatataatggattctgggaactccaggtagggaggagattgggagcggggtgagggataaaatactacatattgggtacagtgtacactggtgggtgacgggtacactaaaatctcggaattcgccactcaagagctcatccatgtaaccaaaacccgcctgtacacccaaaactattgaaataaaaaaaacattaaaaatgagagaaaacccacaaaaagcaaatggtctttgtgctcctcaacggtttttaagagtcttgtaaataagtcctaaggccaaaagtctaagaaccgctgctgtaagctagcacctataacggtggaacctaattctttgtaggaccctttccaatgtcagagtgaaatcggtcagaatctagcaggcttatctagttttttctacagcgataaggaaagaagtccagtattagccctgggccgcggtgagggtggagccaagactgcgtctggggtctctgtggaaaccgccctgtatgggtctcccggacctcgcctcttttgttcctctccgcctctgattggaacacgctgtcagtgggcggtgcttcgggaaaggggcgggccttcatcttcttccaggagcccctcgcagcagcgtactgacgtcacgcaggacgccactgccctgtcgccccgcctgtgcagcccaggacctaggcgcggtagctggggctggcttttgaggggcgcgggcagccttctgactgggtcggaggcctgcgggcccgaagcctctgtccctcctgttcttgtccggcgctgcttagcccctccgcgtagtcatcatggatctgattttaaaccgaatgga

SEQ ID NO: 32649 - DNA, 2300 bp, Homo sapien
ctataatatttacaagatttgtttaaaatccttgtcatagagtttggtcttgaaacaaagttctcttctatgcagttcttgtccacctaaaagtcattattataccaacacacacacacacacacacacacacacaccccacacatgtcccccaactcagacttgcacccttcccttgtctcccacacataccacacatacactctactccacactctcccctacacatcataccctactcataacagccaaacacagcacatttatttcacttcagaaagattataatgtaatggtttctaataaatacattttaacatttttgtcaaccaaggaattaaaaataaaatttttaataaataaaaatttaaaacattaattttatgttcaataaagagattcacactgtggttaaaactattcaaaatatgcaaaagggtataagtgaaaagtaaaaagtgaaagtcccccttcctgtatgacttcttagtcccagtccagatataacttcaaaatcttcatgtgttgatttctagaaattgctacaaacacatatgtgtatataaaacaaatatgtttatttaatttttaaaagttgatcacttgacactagttgagccattagaattgggtgccagtcacagcactgtgtccttgcataagtcaacaagcctctctggggacccctttagttgccatacctctatagagtcaggcttgcccggccacatttgccttagtccctatctgggagaagccagtggcttctgtgctcctctctctgtttggggccctcagagctgaaaacagaatggacactggtaggtgcctctgattcctcttgccagggaagcttcccaatttagtcatccaccccaggcacccagggaggccagtgtcctctctagttaattttcaactcctgactccacgaatacagttttttcaatggtaggaggtatttctggaatatatattctagaaataaagcattttcttttctagccgttcacttttaactttgacttatttgcttcaaaagtcagtaatgtggaagctttatctggtactttttggtacaattcatcccaccaaaaatcacagatttttaaaaggaagttatcttgaacattggaagtgggtaaggtaagatacagatttatacaatatttgtgcaacattttaatagccaccaaaatattgtacagattattgaaagattatagatagtcacgatgttaaaagtgtttatttagcattgtttttcagagactctgaatttccgaaaaagctttttattcatgaggaaaatctgagaacttcataaaattcgattttctacctggcgtaaggatgcacaaggaaatgaaattatttacctaacatcacagaaattaagatgtgaactcaaatcactgtacacatcaattgacataactttgataatgcagctaaataaatctcaactaatgtggttgtgttaggatttcagtgcgcattgatctggatgtacaattagtgcccagttgctttactcacaaagtaattctagtgatttttaaaccataatcaaaccttgtcgtttcagttccaagaggcaaatatataatactagtaattaaataattcttattacaaaggcacggttgttttcaataaaatcaatctaggttgatgctcaaattttataattgctaaatcttgtctgcatctttgaaaagataaatcctataacttggggatgggtgaatccccttaagagaaacgcataaggtggagggtgtgggggcaagtggcatgtgcctgtagtcctagctacttgggaggctgaggtggaggattgcttgagcctaagggttcagggctgcacctgtgatcttgccactgcactctagcttgggccacagagaccctgtctctaaaaaagtatttaaataaacaaaaattttaaaataaagagaaaaagatgaaactaagatcctgcaacatgatacttggcctaaatcctgtgcttttgtagggggctgagggtcaatgattttatttagttaaaaggatgcaatgacttggcaggagtgttttggcctcattctttaaaaaattaacttctcttagtcttcaagcctagtacttgaatgtcaagtacctgcaagcctcaatgtccaagacttttaagagcggaaggtacgatgagttccatctttactagggtcacaaggaaggcatgggtatatggaaatttttattattattccatctgaatatcattttctagagaataggagcttttgttctgaagg

SEQ ID NO: 32650 - DNA, 2300 bp, Homo sapien
taattataaagaaactataaacttcataaattcatccaacaaacatttatttagcttgtcctgcacatcaggtactgatctaaatagcaaggacaaaaagatgagcccctaatagctcaaaataaataagatcccacatcaccctcaagggattcatagtttagaggaaacaggcacatacagagtgaatttcagtatgatgtgatcactggtaagactgtggtatacacagtgtgggtaaggaccagagcctgtggaaaatccactgggacccaagagggctgtcagactggaggccacagctaacctagttctttaaggaaaagtcagtgtagcagatgaatgaagagagacatttcagtgacaggaatgccatagacaaaggcagagaaatgggaaagtatctagcatgtcagttgatgactgagcgttcagggtaactgcagttagaatgtgtatgaaaaaggatgggaggagagattgaaaacttggattttaacctgaaagtagtgggaagccaccagagatttttatagagaaaagtcgtgatcagactttgctttaagcatggtctttccagtagtacaaagaatgaaacagtatggggagaggtgggctgcagaaaggctggatagcagggagaagcaggggagcctgaattgaggcggtggtaccgggtggagaagggcagtcctgctttagagatattccagaggtgaaactgaataggtctgctaacctacattgtgaaaccgttaacacttgcatatgtactaacaactgaaaagcacttccaaacataaagcactatacaatatttacttgtttttgtttttcctatattagatgtataaatgctattgcttctttcaacatatagacttgccaatttaatacacaatattttatttactttttaagaattaaattcaaaggagctacattttcttgtgttttgcttaaatttgggaagaattgttcctctaaaaagtacagtataattggatacagttaaataaattttatctcatcagagcgtgtccagtatttttgtgatttttcctagttggacttgctagaaagccgtctatttgaagcaagggaaagtctggaagaacacactcttctggatctaatctaagttttctcactacccacctatcatgagtacctttttcagtctctctaggccaagggtttcttatttaaaaggaccaagagactccttgatccctaagattcctgctaagattctgtacctctttcctcccaaaagaatgactggtcttgaattctaaaatgcaatttttgtgagtgtgttttaaaaagaagactgcatttcgctgaaaaatcttccttggaaagtatataaatcttattagacgcctttgagagtcattaaaagaactgaagcatcatgcacgtttaaaacattaccaggctggatggagtacgaaggcactcaggggaaggtacttaaacctccgtaggttcaaccaagtcttaccgggagtaacccaacgaacaagtgatgctttttgagacaaatttggagagttggctgcaggaaaattaacaagccagtggatttccttttcccttccttaggaaacttgtttctgtagatgcaaaaagggccctagatcctctggaagagaaagagagtggggaggggaagtttctctttctttactccccacctgcggtctgtctgatttcctctccagctctgtctgataaggaattgattctccccctcctcttccccctcccgccctccctctccttctccctgagtaacgatgctgtcctagcaagtgatgctgtcggagacaggagacgggcgccgaggaggcatcgccgccgccgcggggctggagagcctctcccagcaccagagccccgctcggccccgggcttcctcgtcgcagccacggccgcggcagctgctcccacggtttgatggtgggcggcggcagctcggcttcggcgctagcctctaactgctggatcgcgggccgcgacgctctccgctcctgccttcccgccctgggccgcccggggccccggaagccgcgggaggtggtgaaggggcgccgcgggaagactgcactgccgcgaaggcggaggaggccggcagccggcacccccacactcggaccgcagccggcgcgatgtccaccaaggtcaggaagtgcaaagaacaagcaagggtgaccttcccggcgccggaggaggaggaagacgagggcgaggacgagggcgcggagccgcagcgccgccgccggggctggaggggc

SEQ ID NO: 32651 - DNA, 2300 bp, Homo sapien
gattaatagaagcatgacatgtaggggaaaatatgcacctaaagtaaatctctctaaggaacaaactagatagactttataaatgaaatcaaaggcagaaatattgggcctgctcaaagttaagtgaatgtgtcaaaagccaagactgaaaagaacgtggctcttaggaataagtttagccatctctgcagtgtaagtaagatatcttcacttaaatgccacctaaaattattttttagatagttgatagcagttgctaagaaaaaaagtttgtagggctgggtgtggtggctcactcctgtaatcccagcactttggaaggctgaggcgggcagatcacctgaggtcaggagctcgagaccagcctggacaacatggtgaaaccgcttctctactaaaaatacaaaaattagccaggcatgatggcgggtgtctgtaatcccatctcactgggaggctgaggtgggagaattgctggaacttgggaggtgccaggttgcagtgagctgagattgtgccattgcactccagcctgggcaacagagggagactccgtctcaaaaaaaaaccaaaaaacaaaaaacattcatagcagttgctaagaaaaaaaggtaaaaatgctggtttaacaactggtactatacagtcacagtctagagactcattagcatactgcctttctaagccacacatgagaaactgcaaaatgcccatttcatactctctcagaatattgtatgacaaaacttagcctttgttcaaacttatctaatgaacagctgctctagctgttggaatactttttccagacatgaaatctgcccctaatattctgatttcattattcctacagatgccaaatactagcccatttacgccagtcttcatcagggaagagtatatcatatagtatagaagaggggaaaagctatgtggggcaagagaatgatagcaaaacgatagaagactaaatactagtgaagtaatagtgaaatctaaagtaattttggctggctcagacttgtaagtttaaatctatattcctgtaggaatgaagttataaattacagtagattactaggtgaaaagaaaggatttttcaaccaagtgatgataaaatcagagttttgtaaactccatagttttctaaaacatctgttataaagtggaaaacatttaaatatccgtaaatgtttgaatttgttcaatagagataaaaatggatagaggttataaaaaagaggtctcagaaaacatggtagttctttcatttggtaacaaaagaaagcattgattgtggtacctttcttctgtggctctctttggttgacatgtgatgcattgttttagattatttccttagtagaaacaagtgcctcatccatcactttaaatggattcattaattactattgctatttctacttaatgtaattatgtcttttatttgagaagattgaagtccacagttcataaaacctatgttttagtgttgtgtatgtttatggaaataagtatttatgaaaaattgtagtttctgtgatgcaaaagttcaaataccaatatgatagttaaataaagcatcatactttaaacattttactgcatatattttggtataaaaatatggatatattagggtaaaggtgtacttttactctttaagtggtactttactgttcttagcataaaaatctttaaattttttcagtatataactggaatctagaaattaaagttgtttttagaatgctaaattaaaatataacagaaacatcaagttttttctttttttggccagtgttttgtatttattttattaatatgcttctctgtatcatggaattctattttaaaataaattgaattactttgggtgtataaaaatgtttgagtaaaaactttgaagttcttaaaaagttgactaaaaatttttttgtaattggtgtctttagatccaaaggcagaaaccaggttatacatcacagtcaatgactttgaatttcatgtctataatcgctcggatctttatggacgccttcaagagttgtttggtttggagccaacaataattccacctaagaaagatgatgataaaacacgggaaattggaagaacaagaacccaatcgaaaattgaaaggttcagtatcatacttgaattttattaaactctagcatttaaacatttgcctttattagaatatcattgaggctatgcacctaaacagagcctaatatttctttgcaaattaactgaaacttttagtaacataaataattatataattattttagaaa

SEQ ID NO: 32652 - DNA, 2300 bp, Homo sapien
atagggccatgaagtgtgtttgcattttttagcacttaaataaagtgtgattcttcttaaactgtatttaatttcattatgtatttttcataaattttagggtatatttacacaaaaacccaaactaaaatgcagtagagaaatgacagtgaagatagaaatttgctttaaccactcctttcagtagatttttccactgccaggagagaagagcaatgcatttctaacccggactttaaaaaaaacactcaggtttatttaaaaaagaaaaaaaaaagaaatctatttttcacatatattaaattcactaatgtgagcaatatttgtctcctcaattacatgttcaaaaggtcttatgcagccgtttcctcttctccttccctgtattgagtttctgcacaaatacaaactgtaatcagtaatgaatagtaaggacagttttcttagcagccatctattaacataaggcatacagaaagaaatctcagctgttttgctattggataattcactcagcattgtgaggagttactgacttttgaaatagcatggttttagcctatagattttataatcataacatgattttagtttctagattttggtgtcagttctactacctttacatggttgtctgaatatttaagatattattcagtttttacttcatgttttctttttatgaattttcatgacagagttgaaatacaaactgttttacaatgaaacttaatcttcagatgatgattataataatacaaaccttcctaacattgtctggcatttttttttttattgctttcacttaaagtactttcattagtattttctgacttgatccttataactcagtgagattcataggacagatgtaatgaactcattaaacttgtgcgaaaatggagacgcagagaggttcagtgatttgggcaagatagtgaagctacagcatgaagtgctgaggttcaaagcagcccttcaggtctactgcccttctcattatgtcctcctatctacccaccttgtagtcaatgatcatctaatggattctctatccttaatattcttaattttctatatttatgtgtcttaaaacatttgcagaactttattttcctttcatatattttaatttaacggtagcaagttaaagtctgtgagacttagtgtacagattttgtctggttcatctaatttttcccagtcttaatttattctaggtagcattttctgtcactgctgactcaacccttcctgttttaaagccatagactggcaccttctttgaatgtatgagtaacattatacaatactaatgttagctcatgtagaagactctgaattgaaaatatcttgggctctttcatttttgtcaaatgataaggggaggcaaaaacattagtactttagcctccaaatacctatttaccttttagaaatctattgctctttagccttttaatgatataatattgatttaaagtgattatgaaactgatagaaatagccaattcttccatgtgccatgcactgctaagtgttttccatgtgtcttaccatttaaacctctgagcctttgtatgagacaaggtatattattcctgtgttacagaagaggaagcagctcaaattttctggggaagattgagtaacttgtccaggttggaatgatgattttaattaagctatcctctgtcagttctttgtttgccatttgagcaatttatatacttgtagagagtctttagtttgtcgtagtaatcttgaatagtgcaaattttctcttatgtctcatttgataatagtatatctattgagtaatcaaggctcattgatctctggaagtgttaaatactacagaaaacagtctaattgtcaaatgtgatagcaatgataataaaaaattagaatattgattatgttcctttatcagaagtaattttgtttgaataacatgtcattattctttctacctccttaatgtagagattgtttgtggaagtttttctttccacctgactatcaagttctgaaagtttctgaaattgcacagcctgggagaccaagacagatccttgcttttgaattacgaatgaatattattgcagatgctacaattgatttgctgtttaccaaaaatagggtaattattataataatatagtagaaaatagtatttaaaattttgacattatttttcagagttttttcctggtgactagtcccatacttggattaatttatatgagctgttttcccttgaaataattttatgtattttactatcatcataattttgt

SEQ ID NO: 32653 - DNA, 2300 bp, Homo sapien
cccagctacttggcaggctgaggcaggagaatctcttgaacccgggaggcagaggttgcagtgagccaagatcgtgccactgtattccagcctggtgacagagcgagactccatctcaaaaaaaaaaaaaaaaaaaattatacttaaaaatggattagattgccatgttttttataaactgctgttgagatttgtgtgttcacttaacccaccttttgtttgtttaggtaatgtgaatggcatgaagaggaaagaatgggaaaacaaatcagtgggaatagaagtagagagaaaaactcagcaccttagtcttcaagtaccattacgatctcatagttcatcctcttcctcagaagagaacagtagttctagtgctgcacagcctttgttggctggtgaaaaggaaagtccttcatctgttgctgatgaccatttggttcaaaaagagttcttgcatgggacaaaaagagatgatggccaagcaaggtcagtattcacttagatttagaagcctgatcataaataggattataattgtttaaaattctggcaagaaaaacttcttccctctccactcccccactttagaaaattgttacctgtatatctgaacatattttgaaatgtcagtttgctgttgtctgattataaaagtcatacatacatatattcattcaagatatgaggaaagtacaggaaagtgtaatgaaagtggaagtttcttgtcatcccaccactcagagtgaatcactgttaacattcagatattatccttctagtctaatggatactttttgttcctcctcttgccaccttaatagttggccactcccttcttgaatcacagtttcctcttggtttgatagcacatttcaaaatttcgtcccacctccttggctattccttctcagtctccattgtcctgtcctccatttcttcctcctttcttttttctcttccttttatagcctgccctttgttgaacattctctcctttttctccacttactctatattatttccctagggagtctcaataactgtttggtttcaattatgttctctagctaacatcttttaaatgtaaaactccagccaaaacctttgttcctaaggcctagctaccttcttgatgtatctgcttggatgtttcatggagacttcaaactcaacatattaaaaatggccttattcttaccagttttaacttgttctgccttagtaaatggcactactacatcagttgctgaagtcagaaatactggggttatgtataacttcttcctccagtctcctttaatcagaggcacctggtgtattttgttggacaagtttttaaaggatgtgaaagaaaaaaaacctttataagtgcattagtgtccatggattatggatagaagattacattctggggtttctttaagtttttattgtgttttaagctacctcaaaattttttggaactaatgggggatgtgaacacatattgtactgttttgctactttgggtattttattataaaattgtagattttcttttacttgtaaagtacatgattaaaattactaaaaggatttttattgatatttgtttttatgcttaaattttatgatgtatagaaaatggtaatagctttgctttctgttttagtatccctacagaaatttcaggaaacagccctgtgtctcctaatactcaggataagtcagtaggtcaatctcctcttagatctcccttgaaacgacaagcctctgtctgttccacccgtcttggaagtactaagagtcttactgctgctttctatggggacaagcagcctgtaacagttggagtccagtttagtagtgatgtctctcgaagtgatgagaatgtactagactcaccaaagcagaggagaagttttggttcattcccatatacaccatcagcagactctaattcatttcatcagtatcgatcaatggattccagcatgtcaatggctgatagtgaagcctacttttctgctgctgaggaatttgagcccattagcagtgatgaaggccctggaacttatccgggtagaaaaaagaagaaaaagcaaacccagcagattgactacagtaggggttccatatatcacagtgtagaagggccacttactggacatggagaaagcattcaggattccagaactctgccattcaaaactcatccttctcaggcttcatttgtttctgcgttaggtggagaagatgatgttatagaacatctatatattgtagaaggtgagaaaacagtggagagtgaacagattact

SEQ ID NO: 32654 - DNA, 2300 bp, Homo sapien
ggaaacgagctttcatgaaaatcttccttttcctgcaaaagcacataattttcttcgataacttatactattaagattcttatgatatgtcatataaatgaagaacacaggaaatcttcttcagaagtttgttaaagaaaagatcattgcccagtgtggaacacttcatcttggggtgaaggtggtgatgtggggataacctcagaaatgtttcccttgtataatttctaaatatgtggcttagacattctcatttcaatgttgagcaattgttgtacatattcagatggtgctacgtttcatgatatgtttacataaactaagttgtagaatcaacgacatttaaatatttcatttactgttttttcccctcagatatattgaagcaatggttcattgtgctagtacccgacatccagctgcaattgtagatgatcttcatgctaaagtcctcagggaagctgtccaaaatagcaagactaccttttcagaaaatgtaagaactttttaattcaatgggcatagcaaattgaatatttatcatggttacagaatattcaaacttgaaaaattttctttacaagttaaatcagaatatttggacatgttctaaaagcgtttatatgtcattggctctgtaaaagataggacatataactgtactatagatggaatagtagtaaaaatatttatttaaaaaatatattaatagctttctttgtttcttttatttcagaagcagcttagttccaagccttttctaaagtgctttggccctaagtgaatgaatattctttaggactgacaccttgcttttctaagacagctgtttatgttttgattttcctctatgattagatgacttgtatcttaatattacttttgagattttcctcgttcacttcagtgaatcaagtcactactctcattgtatgatattctacttacattgtggttccagccacgaagccagttgcttagcagtcatatcccagtgctcttccagagcttctccatttgattttcaaatttatctggattatacttagagtagggaccagaagagagatgaaagtgagactgattattttagttaactatttatttaatatatattggcatttcatgtgatagagtagaagagtgaaaaaaagaaatttgaaaatattcctagccaaaaaggggccaattatcagaaaccaagtttgttttcaagccagaagagtttagtgatcttaaaaaatgcctgtaattactgtaccattttttctgtctgcttctctgtaggctgatttcaatttaatgtgtattacttttctcaaccatgatgctaccagtctttttcctagcttatcgaaagtttggattttaaggtgggatataaaactagaacgcagctggcacatagataggcatagaggggcagcgtgaataagtgagttgctgttgtggatgatgtggaagttatgaaaagcttgtgaaataatttcacttacgatctttttagttatcttccaaacaagacattagaggaacaaaaactgagcagtctacaataggaacgactaaccaaggacaagcacagacaaatcttacaatgaagcaagataatgtaacaattaaaggtcttcagactaatgttagcataccaaaggtaacaatttaatatttaaaaattttttcctgaaagaggagagcattttgatggtgtttgtccttttcagttaccaacgtgaataatggtagaacagtgtgtaatattaaaaaaatatgttttatttctatgatctaatgtagatctaatggaatgtaaatagtttacttaagcagaatattaggtaatagtagaatgttccacatccatccagtaaaaatttaattatgattattttatgagaatctgtattcataagctttgtcttcactgtcaaatacatagatatgccattcttaacagtagtttttcatttttgtgcatattttatgtttaagtggtaatttttcacttgtcagttctgaaattttgtgtgtgtgttaggtaaacttatgtttgttacaagcctcagtggaagaatctccaactacggctcctagtaggagtgtgactcatgtttccctagtggcattgtgttttgacagaattgctacacaggttcgcatgaacaggtaagaaatactttattaatctgagccatgattatcttgctggatgtaaaagcaagccttgatcatcttttcttttaaaaatacatttctaagaatgtaatgttaaaactcagaactggttttggaatttcaaa

SEQ ID NO: 32655 - DNA, 2300 bp, Homo sapien
ttattactgataatacagttaactttcaaggcagttacaaattcatctatgtctagcatactacataagttatagtaatttatttttttaaatgttaacacaatggtagttacctaatctttgaaggaaataattttacttcctctttgcttattgaatgttccaagtagctcaaaatgcattttgattcttcacttgggcaaaataagtaaagttgattgaatgcttcttaaggaaaattccaactttgcactccacatctagtatcatattgacctgtgctattgtgttgttttatgacacaaagatgaaacgttgtgcctagagattagattctgtagtctacattataattgaaatcctgactctcttgggtaactttgaacaaattacttaacatctaagttttaatttctttatctctaaatgagtattatgagatttgaataaatacatgcaaagcacttaaatggtaactgatattattacattagattacttctaaccacatgattattgttacagagcgatggacttcctgctttggtaactttgaagaaaggtttagttgcactggcaaggcagtggatgaagtttattgtggtgacaccagcctttaaaggagttagcttacatagaccagctcagcctctgaaacctcaaatagctatggaccatgaacatgaagatggacttggattggacaatgggggtggtcttcaaagtgataccagtgctgatggagcagaatttgagttcgatgcaggtagttttgtaagcctctattgagtactttcttacacctcacaaaactagggtgttttcttactcaacacaattactgtatgttttttgcttagatattatgcatcttttatcagtaagttaatatacctctttaaaaatgtcaagaccctttgtttttcctcacagttacaaataaattactaatataagcaattttagatattacatacttgttaatatggtacttgtgataattttaataattcatgtcccaaattggaaaatggtcatggcttaagtatacacgtatgatttttattggccaagtaagtgataatgattaggaatcttcatactgacctgattttataagttcagttttgtgaaatacagtagacttctcttgatctatccaggacaaagataatataagtagaacgttttgaatgaaacacataaacctctatttaaaacttgtatttgtctgtcatcttccctatgccacagtattttaaaggggcctttgtctttttacctgatgcctgcttgatcctgaatttatgtaaactttggggcctgcgctcagcctacaattttgtcaacaaaatggctgtgtcagaataaagatagtggatatacatttatgaaatgtacttgcataccttaagctttgccaaagattaatttttattatcatgacctatcatatttattgaaaatgcatgttatgatgttttgaaaaaaatattgaaagagtagtcttagagattttagaacattgatatataaaactttaccaagcttagttttaaaaataacttgatatttaacaaataaatgagttatgaggaatagggtagattttattacttattttagaaaatttcaaatctacacaaaagtttgaaaaccagtacactgaatatcccttccaattatctgcaaatccctctgttaatctatgagcagtctgtgctttcttgcgcttagttgaattgacttttggtccgagtatcatttgcatggaatatgtgaaagtctaataaaagccgtttgttcctttcttgaaactgagtgagaggattggggtgggggagaaaataataaatatttgtcaaggaatatgaaagttgagtgtcattatataactagaaacataggggctgatgtttcatgaaaatgtgtgataatctattgctcacttattcttttgaactgtttcagccacagtcagtgaacacacaatgctattagaaggaacagctaaccggcctccacctggtagctctggacctgtaactggagctgagataatgaggaaactttctaaaactcatacccatagtgactctgcattaaaaataaaggtatattattgctctttttggttagagttatccagacttacagagaaaacctaaaattttatctcaaatttaaatgttaggtgtccaccctaaatattcagatagcattttcgtgttgaaattaacttgatttgtaatttcagtgtaaatatttctttgaaaattgtatcatcagtaactgctgtt

SEQ ID NO: 32656 - DNA, 2300 bp, Homo sapien
tgaacctttagtatgtttgtgatggcttggaggttgccagaatatgtgtgaagtatgtgtaaaattttatgtatatacagatgctcaagttatgatgctgttctgattaacccatcacaaactgaatagcgtaagtcagtaatgcatttaatacacttaacttactgaacatcatagcttaaactagcttaccttaaatgtgctcagaacacattactcttcagttgggtaaaaccgtctaatacaaagccttttttataataaaatattgaatatctcatgtaatttattgaatgttgtactgaaagtgaaatgcagaatggttgtatgggtcctcaaagtacagtttctactgaatgtgtatcactttcgcccagcctaaattggagatcatctatattcacttttctaccaagaagtttcatagatctttgggttttcaaaaattaaagctcatacttctgtgacaaaaataaaaatatttaagttaaaacccttttttaagcattttatgcctttattttggcaccttaatttcttgccattatagttctttctgggcagatataaagtgtaattgagatataaagtcacaatagtacctttgttcaaatttttgctaagtgttacctagtttttatttaatattttattctaaaatgcagtcctaccaataggcctttgggagtatatattagcatatatactataccaaatatattagtatatattatatataataaaatatatattagcatatatactatacaaaatatagtacatatttaattaaatctgtttatcaaggaggatttaaaactacttgtatcaaaacttcagggtttagttgatcctcaattaaaatctaataatcttaagagtaaggaaacactaatggtcatctgttccaactatcttctataacagtaatgtggccaaaagagcttcagtcttacattccagaatttttagctagcttttttaaaggtctgatgaaaacagaatgaatgagggtttgagggttataaaacctttgggctgggtgcagtggctcacacctgtaatcacagcactttgggaggctgaggcgggtagatcacttgagcctggtagatcacttgagcccaggagtttgagaccagcctgggcaacacatggagaccccatctctaccaaaaaaaaataaaataaaattagcgaggcgtgattgtatgtatctgtggtcctagcaacttgggaggctgagatgggaagatggcttgagactggtaggttcaaaggctgcagtgagccataattgtaccactgcagtccagcctggacaacagagtggtctctaaaaaaacagagtgtctctaaaaaaacaaaaaccaacctttgttaattatgaacaagtttaatatgagcataaatttttttaaggttctgaactatctaaatatctaaatacagtccctccgtgtacttaggagactggctgtaggactacccctgccccctaccatgtataccgaaatccacacatactcaagtaccgcagtcagccctgaggaattactaaaaaaagagacacccctctgtatatgcgggtttttcatcccaaatactgtattttcaatccatgtttggcggaaaaaaattcatatgttaattggaccagcacagttcaaacctgtggtgttcaagggtcaactgtcttattgttctgagatggctcctcaaatatttaggtttttaaaaatgatagcattttgtttatacattttgatttttatatcatgcttctgtttaaaaagctaggacaatgaacacaaaatcttaagtatcaaatgagtaaacatgatcaatatatgtagacagaaatggaaattaaatgtaacttttgaaatccaaggtgaaatttcttaactttcctgtagatgttgtggtttatgtatgagttcaggtgatatactttatttctttctgtttaaaaaaaatgtttcttaagtttatttgaacatttcaatattatttctatttaaaacttttcttttatccagttcctagaaaccttttgctgtctgttatttttagccctcacagatcaaatttagctgtttaccagtatcaagagtagaatgcatgttaaagctgccatccctggatttggtgttttcttcaaaccgaggagaactggagactttagggactacatatcctgcagagactttatcccctggaggtaatgctactcagagtggaacaaagacttctgctagcaaaactggaataccaggtatagataatgttcttttatt

SEQ ID NO: 32657 - DNA, 2300 bp, Homo sapien
gaacatttaattggtttaagtggatggagccagaaatagagaggctagaggtaaagctgataaaataggacctgattgtggagggactcatatcatatgccatgataaagaattgggttctgattatttcggcactgagaagccattagaagttaagaaatgggttgatgcttcagaatggtgttttagaaagagagttgagggtagcctgaaagacaggaaagaaaagatgcttgaggaggctgctgaagtagaccatgcaatagtagatgagagcatgaactgtggcagtaaaaaaaggagaaaagggaatgaggagtgggttcaagagagatagaagagaatccataaacttaagtataagttgtattaggggcaacagaggagacaagaatgcctcaaacttttagcttagatgactgaaggagcagtgaagccattaacttagaaaataaagaaggaaatgtctataggacatttaggtggaaggttctggtagacaactgacttagcgggtatcgctatgtaggtatgggctcagacaaaaacagaaattttagctgtgggagtcattggcatgtaaaccctatagaaactatggtagaagaatagaagagcacatacaacaggagtagaagaatgctccagagcagaactctggaagaaggccatcaaaatgttttttgtctaaagtcactgctattagtctgataggaaaatagtagtccctgccacacagctatttggtttacaattccttttgagaaaatttgtataccagctcatcctgatgattcattttccataatagaaaagactgctgtgttaaaattgaaagctggctatcagactgatctttagaacttctctgaggatttcatgataaagtgataatagaattccaacttgccatcacctcaaaaaagggaagtggtactaacagtgttagaatgtgctgtttttgtaatttgtggaagaatgtaacactaatcataatatgtaacttaagtataattcagctgtgtaataaccctgtcttatacctaccatgtgaaaacattaaaggttttagaaatctgtactaacaaatgttatttatgtatcagctgtttgtgatatagggtctgcctcctttaaatatgatatgcgccgactcagtgaaattctggcatttccaagagcatggtatagaagaagtattgcaagacgtctattccttggagaccaaactataaatttgccaagtaagcttgttatgtaattttaattttggttactgtagcagcaagacctacaattgataacacaaacgtgatcttacttggcagggtgtaccatgtgatgcgttcagtcattcaagaaatgtccattgggcccctctaatatgccaaccacaagggatatattagcactgaggatatatcagagaaccaaaaagacaaaaagttttgtcttctttgagattacattctggctgaataaatatagtttattctataactatcctaacaaattagtaaatttataagttagttaatttgttagtaaatttattctataatgattactctgtaatccttttaaatatccaagttaatcatggttagcgaagcatgggaaacagaagatgctggggacatgttactagcttgcctgcatttgtctgctggatttagatattgttgtaggtaatgaaatcaagagatttttggaaatgaaaactagagtcagttacatagaggtaaatttgagaaaccctaagtctgagtgtattccctcacctgtaaactgagaccagaggtcctgttttgctcttttcatggagtttaaacaaaacactggcatgttctttgcaaactgtaaattgctgtacagctgctaaatagagaactagaaggaatatgtaatgtgattagaaatgatggatgggtgaacttattttataacatagggattttaccctgttactttggattttttgtttgttttgtttgttttctactagcatctggcccagggacacctgattccattgaaggggtaagccaacacctttcccctgaatcatcaagaaaagcttactgcaagacctgggagcagccaagtcagtcagcctccttcacccacatgcctcagtcacctaatgtgttcaatgagcatatgacaaacagcaccatgtcaccagggacagtaggacagagcctaaaatccccagcttccataagatcaaggagtgtatctgattcttcagttcctcgaagaggtaacactgctctttttgttatcagtagccctacagt

SEQ ID NO: 32658 - DNA, 2300 bp, Homo sapien
gaacaaacttggcttgaggatcattaaggttgccactgtggctggaacagaaatgagcaaggacgaaaatgccggacatgaattcacagaggtctactacaggtaagatttttaatatgatggttagctatcagagagttttaaacagatttgatatcggatttatcttttcaaaaaatactcccttttaaagttcactctggctactgtgtgaagaacagactataggcagttaagaatggaaggaaaccattgcaataattaccattatcattgttatgtacatagttacatcattattgtaaggaagccattgcaagagtccaggcaagaaatggtggctttcactaggatgatagaggtgtaagtggtgagaaacagtcagaatgaggatagctttttaataactttattatcacagaagtaatacgtatacattgaaaaaaactagaaaacacaagagaagcaaaaaataaaaccatcacattccactcagaaatcactgtgaacaccttagagcatacacctccagatatttttctgtgtatctgtatatatgcgtacattttaagaaaatatcaaaattcataccattttgtaggtcaacaatctccaactttccattttgctaattatctcctttagctttcaaaacacattcaaatttccatgattgatctaaaaatgtcctctataatggttttgtccaaaccagtttatccaatccaaagtcacaggttaaatatggttatgttcctttgccttcttttaatttagcacagttcattttttatatgaactgacttattgaagagatgtagccaactgtcctaaagaattccctaccttctagatctttttcagttacttctttgtggtgtcatttatgtttttcctgtagtccatgtatttcctttaaactaaaatttatattaggcatataaaaattgagggatgttctgcaaaatgcctggcctggattcttcaaaaaaactcctcgtcacaaaaaacaaacataaaggcttagggaattgtttaaaggaaaacataataaatgaatacaattcatgatctttggttggattatgggtgagaggtatggaaaacagccaaaaggaacattattggaataaatggaaaataaacgttgtatgtttgattagtgcttctcaaacttaacatgcatctgaaacccctggagatgttattaaaataaagattttgatatagtaggtacaggtgggcttaagagtcggcatttctcacaagctcccaggcaatgctgattctgctggccctctgacctttgagtagcaaaggaatatgagtttaaaagcagtacttaaaataagggggtctgcatttgatttctaggtcttccagttactggttcacttaacctctttgttcttctgcttattcacttgaaatcagtcaagatgaaatatctagtttacaaagttataatgagaattgagaattacataaaattccatgcaagtactttgtaactcattaatcattacagacatattaggttttggtttttcttttttttttttttttttttttgagacaggttctcactctgtcatccaggctggagtgcagtggcacgatctcagctcactacaacctctgcctcctgggttcaagcaattctcctgccttaacctcccaagtagctgggactacaggcgtgctccaccgcacccagctaattttggtatttttagtagagacagggtttcaccatgttggccaggctggtctcgaactcctgacctcaaatgatccacccgctacggcttccaaaagtgctgggtttacaggcgtgagccacagcacccagcctcagacatattagttttaattatttttagcaagttactactttccttagctatatccatcctcatgcagcatcttttcctagaatgtctctttattagctattgcttaatgtttaacaggcactggacactgttttcatccctcacctgagactgtagaaagtagccacttgctgcctcactctaccctatccaagggtactcattaggcacttcaggatatgtgttttttggttttcttgcagtacttgatgcagcacatcatcgacactggcctggagtattgaaggtggtatcaggatgccacatatccttatttcagattccattaccagaagatggaatgcaatttggaggatcaatgagcttacatggaaatcatatgacactggcatgttttcatggtccaaattttcgttcaaaatcttgggccctttttcatttaga

SEQ ID NO: 32659 - DNA, 2300 bp, Homo sapien
tacaattcatgatctttggttggattatgggtgagaggtatggaaaacagccaaaaggaacattattggaataaatggaaaataaacgttgtatgtttgattagtgcttctcaaacttaacatgcatctgaaacccctggagatgttattaaaataaagattttgatatagtaggtacaggtgggcttaagagtcggcatttctcacaagctcccaggcaatgctgattctgctggccctctgacctttgagtagcaaaggaatatgagtttaaaagcagtacttaaaataagggggtctgcatttgatttctaggtcttccagttactggttcacttaacctctttgttcttctgcttattcacttgaaatcagtcaagatgaaatatctagtttacaaagttataatgagaattgagaattacataaaattccatgcaagtactttgtaactcattaatcattacagacatattaggttttggtttttcttttttttttttttttttttttgagacaggttctcactctgtcatccaggctggagtgcagtggcacgatctcagctcactacaacctctgcctcctgggttcaagcaattctcctgccttaacctcccaagtagctgggactacaggcgtgctccaccgcacccagctaattttggtatttttagtagagacagggtttcaccatgttggccaggctggtctcgaactcctgacctcaaatgatccacccgctacggcttccaaaagtgctgggtttacaggcgtgagccacagcacccagcctcagacatattagttttaattatttttagcaagttactactttccttagctatatccatcctcatgcagcatcttttcctagaatgtctctttattagctattgcttaatgtttaacaggcactggacactgttttcatccctcacctgagactgtagaaagtagccacttgctgcctcactctaccctatccaagggtactcattaggcacttcaggatatgtgttttttggttttcttgcagtacttgatgcagcacatcatcgacactggcctggagtattgaaggtggtatcaggatgccacatatccttatttcagattccattaccagaagatggaatgcaatttggaggatcaatgagcttacatggaaatcatatgacactggcatgttttcatggtccaaattttcgttcaaaatcttgggccctttttcatttagaagaaccaaatattgctttttggactgaagctcagaaaatctgggaagatggtaaactgacacatttccagcttttactttctcctatcttctgttatgactataaatgacaattgtatttctgaagtccatctctgtttgttatcatgtatctgacatgttaaggagttcactaccaataagtcaatatttataatgtctggaacatgttaatttctgaacttgccatcttactccatgtttcttacttaggcaattaaagtttctgctgctgtggctaaacataagtcatggtaatagttactgtaatctttcttataaaaacatgaagtgaaggcaacatagtggtagtgtgaggaaattatttgccagtcaagactatattataaaatatataggcaaggctgtgcttttatctctacagtgataaacccatttcctttgagctttacttttctacttggtggtttctacattgagggaaaaaaatgtttgatgtttgatgctttcttcatcttactagggacaaatccaattaccactaatagaagaattatttgtgaattatttggtttttatcctcatttattcttcatttttatagccttcctatatatgacaactgaatttatagctctgaggccacaattatcatcttgaatctaaatatggtttattactttaaaaaagtatttttattttgttgtaggctccagtgatcattctacatatattgtacaaacactagattttcacctgggtcataatactatggttaccaaaccatgtggtgctttggaaagtcctatggcaacaataaccaagataacaaggcgtcgccatgaaaatccaccccatggagtagcaagtgtgaaagaatggttcaattatgttacagctacaaggaatgaaggttaaaattttgagtctttggagagatttattttgttttttccattttggattctgttgactgtgtttagaatttaaatggagatggtgttttcatttccttaaacaattttcattttaatcttgctggctgacacaagtaataatt

SEQ ID NO: 32660 - DNA, 2300 bp, Homo sapien
gagggccattctacaaaacacctgaccagctctcttcaaaattacctaggtcatgaaaaataaagaagggctgaaaaactatcacagaccatgggatacttaggagatatgaccactaaatgcaatatggcaacctgaatcctggaacagaaaatggacattggttgaaaaactggtgaaatccaaataaagtgtgttgtatagtcagtagtgttgtactaatgttaatttattagtttccatcaatgtgccacagttacatgagacaaagtagcaaacatctgcctctggccagccagagtccactcttgctgtgatgaagccatgtttgctcactctgcttgtgagcataacttcacaactccctgactcagtgactgagtgcagccagaaggaatatcctgaagatgataagcaggaaagcaggatagagaacaggttcccatgtctcttgcctgaatcactgcatttctagaaaagaagttcaatgatcctagcctttgtcttttcctgtacatgagataatgtctgacaggaataattattatgcctctgtaatctataaccaatgtactcctctcccacccaaactttgatgagatgttgctctactgtaacttctgagcacatgctgaacatccacatcacgtgacatataagctatgggctgaaacatggctttggtgcagtgaaacagaaatcctctgaaagactctcctgggttgcaatcctaagactgaacaaaactaactttaattctttaaaagcctgatttctttgtctttagttgacagttatgtaagataatattggggaaagtggatggaaggaatggaaagactatactatctttacaattcctttgtaaatctaaaattacttcaaaataaaacataatttatatatttgtgtatgcagtagggaaatttgtacctcattcctttcactcgagcttttatttccattgcatgtctctcctcaaatttgatcctaatgtacttagaagttgtattatcatccttttacttcttgacatttgaattttttaatttcctgtaaccagaagtctctaaatgttaattaaaaattctaggccgggcgcggtggctcacgcctgtaatcccagcactttgggaggccgaggcgggcggatcacgaggtcaggagatcgagaccatcccggctaaaacggtgaaaccccgtctctactaaaaatacaaaaaattagccgggcgtagtggcgggcgcctgtagtcccagctacttgggaggctgaggcaggagaatggcgtgaacccgggaggcggagcttgcagtgagccgagatcccgccactgcactccagcctgggcgacagagcgagactccgtctcaaaaaaaaaaaaaaaaaaaaaaaaaaaaaaaaaaaaaaaattctagattatcattgagatcattaatgggcacttgatcgaagcaacataatgaacacacattttaataaccactaaagaaaaatatttttattgaaaatgcactgcttaacgagggggatgggacttttcttccaataagcccatctacttccggatgcaaattacgtctatttgttcttttcctttttctttttctttcttttttaaagagatggcagtctcactaatgttgcccaggctggacttgatctcctgggctcaattggtcctcctgcctcagcctctccagtatctgggaataccagtgcccaccaccatgcctggcttccttcttttttttaaaaaaaaagatttacatctgacttaattactgagaaaacttatccctataaaaaggtagatggacactgaaattttgttataacaaagttactccatcctttggattactttttgtttacatgccgaaatttgttgggtgacttagtattcttattttccacgaactatcacctaacacctcgagtagggcctccttcaacctttaggagagcaaagaattgaaaacatccacactggatttgtcatccggatagcagagccatttgctctcaaagactccatctgttttcatgattgttcgctcactggccaagcttcaggacgtgtgaggtagtttttctgtaaacaggaaggccacagtggaggccaagccttccccatgggcaccttctcagattgcgattgtggatgaaatgagggattttcttgaaacaaccctcacgcaggtaccccttgggcagccttcaaccgctctggggaaggaggccccaggcatagacaactgcagtataaataatcatccctacagtgctctgtcagggc

SEQ ID NO: 32661 - DNA, 2300 bp, Homo sapien
agttcaatgatcctagcctttgtcttttcctgtacatgagataatgtctgacaggaataattattatgcctctgtaatctataaccaatgtactcctctcccacccaaactttgatgagatgttgctctactgtaacttctgagcacatgctgaacatccacatcacgtgacatataagctatgggctgaaacatggctttggtgcagtgaaacagaaatcctctgaaagactctcctgggttgcaatcctaagactgaacaaaactaactttaattctttaaaagcctgatttctttgtctttagttgacagttatgtaagataatattggggaaagtggatggaaggaatggaaagactatactatctttacaattcctttgtaaatctaaaattacttcaaaataaaacataatttatatatttgtgtatgcagtagggaaatttgtacctcattcctttcactcgagcttttatttccattgcatgtctctcctcaaatttgatcctaatgtacttagaagttgtattatcatccttttacttcttgacatttgaattttttaatttcctgtaaccagaagtctctaaatgttaattaaaaattctaggccgggcgcggtggctcacgcctgtaatcccagcactttgggaggccgaggcgggcggatcacgaggtcaggagatcgagaccatcccggctaaaacggtgaaaccccgtctctactaaaaatacaaaaaattagccgggcgtagtggcgggcgcctgtagtcccagctacttgggaggctgaggcaggagaatggcgtgaacccgggaggcggagcttgcagtgagccgagatcccgccactgcactccagcctgggcgacagagcgagactccgtctcaaaaaaaaaaaaaaaaaaaaaaaaaaaaaaaaaaaaaaaattctagattatcattgagatcattaatgggcacttgatcgaagcaacataatgaacacacattttaataaccactaaagaaaaatatttttattgaaaatgcactgcttaacgagggggatgggacttttcttccaataagcccatctacttccggatgcaaattacgtctatttgttcttttcctttttctttttctttcttttttaaagagatggcagtctcactaatgttgcccaggctggacttgatctcctgggctcaattggtcctcctgcctcagcctctccagtatctgggaataccagtgcccaccaccatgcctggcttccttcttttttttaaaaaaaaagatttacatctgacttaattactgagaaaacttatccctataaaaaggtagatggacactgaaattttgttataacaaagttactccatcctttggattactttttgtttacatgccgaaatttgttgggtgacttagtattcttattttccacgaactatcacctaacacctcgagtagggcctccttcaacctttaggagagcaaagaattgaaaacatccacactggatttgtcatccggatagcagagccatttgctctcaaagactccatctgttttcatgattgttcgctcactggccaagcttcaggacgtgtgaggtagtttttctgtaaacaggaaggccacagtggaggccaagccttccccatgggcaccttctcagattgcgattgtggatgaaatgagggattttcttgaaacaaccctcacgcaggtaccccttgggcagccttcaaccgctctggggaaggaggccccaggcatagacaactgcagtataaataatcatccctacagtgctctgtcagggctgtaggggggcacgggacagtaagggaggaggctgaactgcgcgattttacctggcttctccagaagggtaaggcggccagttggacccggtccttgtgttcggagaacagagtcacccaggcctcgaacgcctgcgatggtcggcgtctcttccctaggtgacgcaagacgcggagctcggctgcacgacgctggcgcaagcgcgggggcaagagcgccggcctccgagacggttagtgattggacgaagcagggcgcgggggcgcaagcccgggtcctgcaggggcgacgcgaggcctcttttgaaagatgcggccctgaccctgtgaacctcgcgcagagcggcctgaagcgagaggttgaggctgggaggtgggagcaacggcggcggcggccgcctgcgagcccccggcctgaggcgcagcagcagctgcccgtcttcccacatagagggcaggaaggacaactttggtgggtagg

SEQ ID NO: 32662 - DNA, 2300 bp, Homo sapien
agtaaaattctgcatagtaaaaggagaagcagggggtatgacacacgtggtagttagcagtctactagtgactttactgccacaaccagaaaagccagctgatgtgtcagacgtgagaaagcgaaagtatgtcacagcgaatgtagcttttccacacgtatttcaagaaagaaatgaaaaagccaacttctataatggtgcctactgtgcattaacagagataaactaggggtctaagaactcagttttctacagggtcccagaagtatagccatatattgccccattctctaatggaaatagccagagaaatagaaatatcaagactggagaacatcaaatacctcattggaaaagcccccacataggaaaatgtgtgggcttgaattcttccattctggaagggtaaaggcctgagtgatgatgctgggattagacactgaaactctttagagaagcaaaacaagtataataaagctgtactttattatattaaataaataacacacagactaccaaatagcctgccccttataacagcgttaatgtgattttgatctgaaatgtatagagacattttgcattttttcgtataaaaagttcatgagatttggccctaatctgaccttttcttcatttttttttctacttgagggactataatctttatttttaaatttgttttatattctccgaacattacctaacgcatagaaaactcttattgaaccatttttctctgttctttgtaaaatattacatttgactgttccttagactgctttaatcattcctgcctatgcaccctcctcaaaatccagtttaaattaattgttccttattcaagattccttatatccacctcccttggggcagcaatcacctatcacccaggactacacttgtgtatgtacatatcttccctattacaaatcaggttctttgaaaaaatacaaatggtaagagagtggatttttggagtcagaacattctcttttcaaatccttcttctgccccttactggcaataagggctgagtgacctagagcaaattacttaacttctctgagcctcagttttctaatctgcaaaataggagccatcacttcacaagtctgtaagacttatattagactaagtgcctgcctgtacactgttctcttttctctctttctatatacctgaaggcattataggtgctagatgtctgtttaaagaccagacaatattgtcttaaaaaaacaaacaaaaacacagacaataccatctttaaaaaaaaaaaaaaagtccaggtaagaaataaataaggccatagaatggaagctttacaaggactctctctgagacaggatctcctcaagtgtccccaggttaaattagaagtatatatccgtacaattgttcagccagtttgtgcactgtactgaggatgaatgaacacctatcctaaatatcctagtcttctgactaaaaacaagatcatatttcataacgattattgttacattcatagtgtcccaggtgatttagaggataaataaaaatccattaaagaggtaaagacataaaaacgagaaacatggactggtttacacataacacatacaaagtctattataaaactagcatcagtatccttgaatgcaaacctttttctgagtatttaacaatcgcaccctttaaaaaatgtacaatagacattaagagacttaaacagatatataatcattttaaattaaaatagcgttaaacagtacctcaagctcaataagcattttaagtattctaatcttagtatttctctagctgacatgtaagaagcaatctatcttattgtatgcaattagctcattgtgtggataaaaaggtaaaaccattctgaaacaggaaaccaatacacttcctgttttatcaacaaatctaaacatttattcttttcatctgtttactcttgctcttgtccaccacaatatgctattcacatgttcagtgtagttttatgacaaagaaaattttctgagttacttttgtatccccacccccttaaagaaaggaggaaaaactgtttcatacagaaggcgttaattgcatgaattagagctatcacctaagtgtgggctaatgtaacaaagagggatttcacctacatccattcagtcagtctttgggggtttaaagaaattccaaagagtcatcagaagaggaaaaatgaaggtaatgttttttcagacaggtaaagtctttgaaaatatgtgtaatatgtaaaacattttgacacccccataatatttttccagaat

SEQ ID NO: 32663 - DNA, 2300 bp, Homo sapien
tttcatttcactatgcatatggaagctactaccttataaccagaagcctcaatccctcccagtccctacaaaggcaggcctatacgtaacaatattacctgaatcttcttatggacaatcagctgaacacagcatctggcctgctttgcattttccaacccatatgcttacccaatatgaatgtagattaataatatgcatctctaagacacaaacctatcaggtttgctttgcatatatagccacaagccgagaagcagcttatctggtttccttatatcaaggcagattgcctctcataagggcaaggtggtgtcctttccatatgtttgccaaaatgcttatttaatagaaactatttataaatgttcaatatagcacttttttttccttgaaaaccacacgttcatgtttgttgaagttttttcttttctcttctttttgaccacaaccggcttaacttactggaaaaaataatattcatatttaaagaggtaaattttccagctgaaactgaaaatactgactgcttcatccgtgatgatctgaaaaaccagcatttctcacagaggctcattttgctgagttaacatttacatgtgtatgctgaaagaaaattaggttccaaagaagtagaggggccctgccagccaaatgaactcccttgagataatattgccaggaatggtcagtaccggtactcaaagcactgaaattgtaaaactacaatttcagttgtaaaaacaactgaaaatcttttctgaaagcctttgaatggtacctggacactgacgcccatattgatggggctgtgcttcctctcccacccttccttgtttacctctgttaacagacaatggggttttgttttcttctgttctgcaagcagcagagctgtgtctggcaatatgtggtccaggataaataactgcgggaattggctttatatgcacatcaaaggcagcctcaaaagaggaaaagaagtagagggctgtcgccactaaactgccttaaggatgtattgagaaggagagtgaaaagattaaccttgatttaggcagcctcaggtgccctatcactcaggagtctacaggatgccaactccatatttagcactgtctggaagcatgaacattgctttcctttgctatgccttggtgacaacagactccaaaggcaagactttgtttccctcatgctttaacatatgagaacatgaggagttttctgctgctacattgttttgcagactagaaggagcggtagtaaagtcaaacgcaagaattaacaaaccattcctcttcagctgaagaacaagtcaagtgctgcttttgccaggagtcacacttggctttgttgttttgcaattgaatttttgaaattttttacctccttagggcttttttttttttcttttgtagaaacaggatgtctcactattttgcccaggttgttctcaaactcttgacctcaagcaatcctccaaacttggcttcccaaaaggattacaggcattgggattacaggcaggagccacttcacccagctgaggcctatttttacatttttttccttttgcaaagaaagccctggccattcacactaagaagtcttgctaattgggcaagactacctttgtcctggctgggtgcagtggctcacgcctgtcatcccagcactttgggaggccaaggcaggtggatcacggggtcaagagattgagaccatcctggccaacatggtgaaaccccgtctctactaaaaaatacaaaaattagctgggtgtggtggcgtgcgcctgtagtcccagctactcgggaggctgaggcaggagaatcgcttgaacctgggaggcagaggttgcagtgagctgagatcgcaccactgcactccagcctagcaacatatcgagactccgtctcaaaaaaaaaaaaaaaaaaaaaaaaaaaggattacctttgtcctacacacaaactaggtttatatcagggtttctcaacggtgataccactgacatttggggctagataattctttgttgtcagggctgtcttgtgcattctagaatgtttagtacctggcttctacctactagatgccagtagcacccccattctacctccaagtgtgacaaccagaaatttttccagccaatgccaaatgttttctggggcacaaaaatcaccaccggttgagaaccactggttatatgattagacggaaagaaaaagagaaaaagaaagatgcctggctaggccaattagagatcttagataattactatatgcatgcaacattag

SEQ ID NO: 32664 - DNA, 2300 bp, Homo sapien
tatccaaaaattcttaacaactgatgtgccacttaaggtagaaattctgactttcagaaagccctctggtcatagtgctggagcaagactctgagacccctgatgtactggtggatggattatggagagggctaggatgtctcagggagggactgggttgtctaacatagtggtgaggcactccagggccaggagcaatggttctctctaggcagtatgaaagatatttgacttttttattttttgttaaaccaccagtacaaccacacaagtgtattctggctgaacactgatctgtccattctcctccttctctgatcagtttagcctcccctaggcttcttaaagttctccccttcaccctcatccacgatcagcatgcaaacctcccgggatgttatgtgctgtacttagcccttttacttggaatgtctcatttaagccttatcacaaccctatgagtagattctgtacttgccttccttttgcaattacacacacaggatcatatgtgctattaattgttaggaccttgatttgaactcaagctttagaaattgacctcctaaccaccgtggttagtgtcttcaaggagatgcacatctgtttaggtggataaggagtgcatgtacaaagaccatacaggcaatgtggaggcaccaagtggcaacccttagtccacatgcattcataagttgcacagaatcttgtcatatagaatttaactattacagggaggaattcttgatcatgttgtatgaactcttatctactgtataaggccaaacctgtatactcttgaatagatattccataataaaaagattacagtcaacttcagagcaaatcaagtgaaaactccaatttatgttggctacgtaacagtctagaataaagtatggtattctaaagtatgtaatgaaatgaatgaatgaatgaatgaatgaataaaatctatagtcaagagtttcacttataagacctatggtcttatatagtacatgactctctagctagaatattatattcaactttctcaaatgggttaaaagagtctcagggacaagagaagcagaagaaaggaggatgataaaaccatttctgggctttggatctttaattaacctctacccggtcacagatgcagttagaaatgtgttgctcacacccagaggaaatagtatctaacagaaataagtaacactaccctaagagaaaacgaatcatttatgggtatattttattttgctgtttggaaacattttttggtttggacaagaatgagcattagcaagtttgactcatttaattgatgtattatatagaagagatggacattagataatttttaaaatgatggtagagtgagatcttgattgggaaggatagattttctatcaactcccttagaatcatttgtgatattaataaatcagattgttaaataacatgacagaagccaaaataaatgcttagtaaagatgctttggtgaacagttggaagcaaattctattttaaacccttgaaacttggtaagaacctaaaatattcttgctaatttggaaaatacctctttatttaaaatttcctaaaaggtagcctctcctcctacttttatgatggaatactggatgattttagtcaaaagacatagttattaccataagaaaaagtcctgcatgaaagcacatgttgccatcttactcattatcaaagtgcccttatgactgtcagagagaacaggtaagatgccaggggaggccgagaaaaagagatcaaagtgtttttgtttacttttttgaagtcttgtagtacctactgtttattatacatacttcttgattcatgctgaaaattggaattcacccattctctctttttcctgtcaaagatgcagatggggcacatttcgttgactccatcaatccctgcccccacacattagcacatgcacacgtatacctagccagtggaaaagaaaaaagagttactcacattcatccattttacaaagatttccaggctgcaatgggagggctttacctctccctgaaggatgaataaataggtagcttaactgacaacctgttctcagtcaagctgaagtgaaaacgagaccaaggtctagctctactgttggtacttatgagatccagtcctggcaacatggagaggattgtcatctgtctgatggtcatcttcttggggacactggtccacaaatcaagctcccaaggtcaagatcgccacatgattagaatgcgtcaacttatagatattgttgatcagctgaaaaatt

SEQ ID NO: 32665 - DNA, 2300 bp, Homo sapien
catctctatcatgatcagcttcatcaagcatttcctgtaaaacaaaatgtaaatatatgaaatacatttaaaatgacataaatgaagtcaaacacatattcaaaaccaaattttattttaaatgcataagtgcaactaaagttagaattataatcctaaattatcacataagttataattacatataaattataattataaaaataagcaaaatctacctgaagttcatcatgttaaattttcccctggtttcttagcaaacctcttgataccggttagtattatacttccagtatcatcatcatcaaataatttgaaagtcttcaatatttcttctttttcatcttttttactcttttaaaaaagaagcaactatccagtctttcatttatttattttatcaagctggacttaattagatctttggggtctaaagcagcaatgtgccaagtagctgtgttctgattttatttattggtcttttaacaattatgtactcacacctgccctcaaggtgcttaaaggtagagcttgctaaggtggagaaggcacagggtggtccagaatgcatctcttattaaacctcataattcagatccgttaccaaaaatgtaagcttcaaaatggaaggttgtatctttcaatgctccttagaatagtgcctggcaaaaataggcattcaatatatgttgctgaattaaaggcttccaaattctggccccattctctctatcctgcaatatagcctcattatttcctgacaaaaacctcttctccacatcatagtcttctcattactaccctgaaaacatatttaatcttgctcttcctatctcccatccttaaaaacctagttctaattgcttctctataaaacttctgattgctccagccctaaaatgtagcaggttattgctagtatttctttgaaaaataaaatcataactatatcatttttatactcataatggcaaaaaaaaatcttcaaaactaatggtgccaattccttctttatcaacttcagctaccattttttaaatttcttctttctttggttcaaatcctaaggcccacactgcaatctgaaataggaagaaaaggaattataatatgccatgatttctttctaagctttttaactccctattaagagcttctctcttttctattatggactgagcataaacagaaaattaggtcagcaggcctgtgtttcagtcctactgtgccatcatgtacatcactgttacaccctgggcttttgcctactcatttataaaacacaattaaaatgcttaacaagatatcgttttgctaatgcagggcaggcatatgcactgaagagactttatattaagctttcagaagactacttttaaagaaagccttaaagattgccacaaataatatggtttttaaaatgatttagaattagaaataatttcagaaccttcttttacatcgatggttccagacccatcaatatcaaataaattaaaggcgtctttaatttcttgcttttgggattcattcagttcaatttttgctgctcttttcttccattggtctgaacttgtatggtagttagatgcctgtaatacacacacatatgggtgaaagataaattatataactggaatagttagcagaaccagaataattgatgataaactatattaaagtacctatttcctactataaaatgaatctcaacaggagtaaggaaggagtgcagttgctgccaggggcagccttccttgctctggcggaaaaacttcggccccggccccagcagaaggttacagcttcacactcaccaggtccccagccggcagccggcgctctcagccgggacctcccggcgtcacctcccgcagccccgcccaacccaagtcttcacagctcactggcggttgctaaggccgctctcaccgacctctctcagccccgcccacccagcctgagttattgacatccagttcatccaatggacagaaaaaaaggcctttaaaccagccctttctctctactccctaccaatagcgtgacgtccccgcctttcgcagcccggcgttaagcggaacttctctctccagctgtgtctcttagcaactaagcccccggctcctccagaagcccctcttcgcacatgcgcaaactgcggacggggaactgggctccctagccctggcgtttttggtgttgctgtcccagccagaatcgcgtctggccggtgggaagccgggaactccagccccctgtaggagaggagaaaggagcgaggttagtagtgaggtgct

SEQ ID NO: 32666 - DNA, 2300 bp, Homo sapien
atcttcaatgaagatgaaacaaatccattttggagagagatgttagagaactgatggcgttcaggacatgctacccaaaaataatggtaccttggcacttaagaaaagagcagaagcaagagggttactttcactttccccagatcttctcttctgaggcagaccataagaccttcattccagaggtgccttccctatacctggaggaaacagacatccttatctctgaagacacacggacagggaaaagaatctgagcaaataggccttgctaagtaagtccccccagtttattaccattagatcacagatttgtccaatcatacttctccatgacttccacttctttatcaatcctagccttaaaaatacacaggcttccctcttaactttgggtcttaatttctgaagtctcctgttttgtgtaaaactcacataaataagttagtatgtttttctcttgttaatgtgtcttttgttacaggggcttcagccataaacctagtaatgaatggggaaattttttttttcctcctctatagaacatataccaactgcaagaagaaagaagaatatgcctggttttgggcctggcgcggtggctcacgcctgtaatcccagtactatgggaggctgaggcgggcagatcacctgaggttgggagttcgagaccagcctgaccaacatggagaaaccccgtctctactaaaaatacaaaaaattagccctgcgtggtggtggcgcatgcctgtaatcccagctattcggtaggctgaagtaggagaatcgcttgaacccaggaggtggaggttgcggtgagccgagatcgtgccattgatctccagcctgggcaacaagagcaaaactctgtctaaaaaaaataaataaataataaaaataaaaacagtatgcctggttttaaagcttcaaagaatttactcattctcctgtatgtaacattctagaaatgcatctggagttaaagccttcttggagacttaagaacaaatgcacttatgcatggccttttgaaacctaatgtttctacaaggaggcacgtccatacttgcaactccttctagaagcttccccaaatctcctgcctccccacgctgagttatccgatgtctgaaatgtcacagcacttagtcttactcttctatggcctactttctactgctatttgtgttactcatgctacccatcttatctccctcagtgtgtgagacgctggcatcagatttggcatctcccacacactcaacattatgtgttgcacacagtaggtactcaatacatgcaagttttctgaatagatattttcctagtcatctgtggcacctgctatatcctactgaaaattaccaaaatgcaattaacttcaattttacatttgggatttacagaaaataactctctctccaagaaatgcataacaatttagctagggcaaatgccaggtccgagttaagacattaatgcgcttcgatcgcgataaggatttatccttatccccatcctcatctttctgcgtcgtctaattcaagataggtcagtaaaggaaaccttttcgttttagcaacccaatctgctccccttctctggcctctttctctccttttgttggtagacgacttcagcctctgtcctttaattttaaagtttatgccccacttgtacccctcgtcttttggtgatttagagattttcaaagcctgctctgacacagactcttccttggattgcaacttctctactttggggtggaaacggcttctccgttttgaaacgctagcggggaaaaaatgggggagaaagttgagtttaaacttttaaaagttgagtcacggctggttgcgcagcaaaagccccgcagtgtggagaaagcctaaacgtggtttgggtggtgcgggggttgggcgggggtgacttttgggggataaggggcggtggagcccagggaatgccaaagccctgccgcggcctccgacgcgcgccccccgcccctcgcctctcccccgcccccgactgaggccgggctccccgccggactgatgtcgcgcgcttgcgtgttgtggccgaaccgccgaactcagaggccggccccagaaaacccgagcgagtagggggcggcgcgcaggagggaggagaactgggggcgcgggaggctggtgggtgtggggggtggagatgtagaagatgtgacgccgcggcccggcgggtgccagattagcggacgcggtgcccgcggttgcaacgggatcccgggcgctgcagcttgggaggcggctctccccagg

SEQ ID NO: 32667 - DNA, 2300 bp, Homo sapien
tttccatagttgaatttgcatgctatgccttcaattagattataaaaccctcagaggccgtttgaaaaactgctgcaccactaaatcgacttcttccaaagtgaaggctcctccatccaagctttcttatcattgggctcaaggttgaaagccagtaaaaagttttcttattgaagactgaaaccacccaccaccgtccctggttaatcataaaagaagcgttattctaaaaaactccagttctcgctgagacagctgttgacccaatttgtatacaaatgtgacactctgaacctctctggtttagtatttgatagcccaacagggtgactatattcaataaagattcaggctgggtgcagtggctcctgcctgtaatcccagcactttgaggggccaaggcgggagaatcagttgagcccgggagactgagaccagcctgggcaacacagtgagacaccgtttctagaaaaaatagaaaaaagccagatgcgcgcctgtagtcctagctacccaggaggctgaggtgggaggattgcttgagctcaggggttggaggctgcagtgaaccctgatcctaccactgcactctagcctgggagacagaatgataccctctctcaaaaaaaaaaaaaaaaaaaaaaacaaactgtacatttaaaaataactaagagtaactggattatggttgaatgcttgtggtgatgagtatctcatttaccctgatgtaattattacacatttatacctctatcaaaatagctcatataccccataaacatacacacctactatggacccacaaaaattaaaaataaaaaagaaaagcctctttggtccactcagtccaccacccgtattagaatgtaagagtttttttccttgggaaaagtgtccgacagaaccaaggctcggtaaaggatactaataatgtaataatataatattaacaaacatctactgagctttaaatacgtggcaggcactgtgctgtgcactttatgtgcattatccaaattaactctcagtaattccaggagttcttatcaccggggtctgtggaagaggaaatggtggtttacggcaatttccgaatgtcgcacagtagaaagtggaccagcaaccagggttgcagatcccaaagtccgggatcttcaccatttcacccaaccgccttagagacctcccagcaaaaggtctaagcacgaatgctccagaaaacaggtccaggtcacgcgtgccttctccctttccctctgggctcgacagtggtgcacagagcgactagggagtgggggccgcggttatttcattagaaaagctctggagccccgggagcccttcgtcccaggcgcacttgccctgcaagcccttctggaaggcggcagcgtccaggcggtccagcgcatcgagccgcgccaggcgcaccgagatgcccccgaatctgtccagctcgccctgcagatcgcacgctccaactggcggattccgcacgtaaccctgtgcgcccgaggcccagcggtaacccgccgaaggcccggggccgtaggttcgggcaagcatcgcgcgccagcggccccagctcagtggctgccgcatctccacgccgcttaattcgtccgttgcccaaatgacccctccgcgctccagagcggagatcgcggccgtacattttagaagagtgccatcaataccctcagagttgagctggggttaccactctgcagagctatgccaaggagaccgcgaagtggtccaccagcccttctcagcaatttgccccgctccagttaagcggggaaaacctcctcccccaccgccactcacttattttgtttggtagtttaattcaacagacgttggtttagggatggggaagccgggaggagatgcaaaaacgtcctgtttttcaggaatttacaatctaagtggcagttccgttcctggaacctatcttctttcacagatgccgttacagctgtttcaaagactgctggttttgaaaacgctcagtccctcccaccacgctgtgcactgctgcgctccactcaggggattacggcgcaggggcggaccctcgctgacttctgccccggaagtttttctctcagttgaagcgcgcacattgagtcggcttttctactgcttcggctagggtaccttgtgaccatgtcttccaagaagaatagaaagcggttgaaccaaagcgcggaaaatggttcgtccttgccctctgctgcttcctcttgtgcggaggcacgggctccttctgctggatcagacttcgcggcaacctccgg

SEQ ID NO: 32668 - DNA, 2300 bp, Homo sapien
tctgacactgaagagactatagatgggaaactctgggcactggatgaacttgccaaggagacaggatttattgagaggaaaaaaaaggttttggactaagaattgacgaacttcaacatttaatggtcaagggaagaggacgagcctgcaaagaaaaatgatgaaacatcaacaaagatgaagaaaaccaggcaagtttgacaacacataagaagttaagtgtttcgagaaggagggaatggtcaacaataccaaaagttgctgtggtcacgtaaggtttatcaacacggagatgctcggagaccacaccaggaacagtttccatggaatgatggggtggaagtcaaagaggaataggctagggagagtatgtaagtggtgaggcggcagagaccactccatttaagaagcttggcaatggatagagagacggttgcaggaagaaaatgtggagcttttgttctgatttaagatggaagagaaatgagcatgtttacatgtcaatgggaaggatctagttcaaaaacaagttgaaccttcaggacagaacaagttgtcctctgatacctaaggcagagtgaaaataccatgtgaactctaaattgtctttaaggtctgattagacataaaagtttttgccactagtctggtccatttttcaaagctattacacatcaaatataaattttcaatttttaattcaatttataagacttttcagtataaatacgttctcccaaatcaaaggagctgtcatctaggaatggcttttaagtcaaacacatctggactcaaatatcggctctgccacttagcacctgtgtagcctgaatggaatcacgttaactttcctccctctataaaactgtcattactatacccatcggtcacggcttctgtagaaattagatgagctatatatactgctaacactagtgtgcagttactagcagttattaaatatcataacctgcgtagtactggaagaaaatgctatcatcactcctaaaggcagagtgatccacatttttactgaattggttatttagttttttaggataagtatcccatgttcgctagttatgaacaattttgcaattaaatgtgtcgttaatgttaaatgagacaaagcgtttcaagtgcaacttaaaaattcaaaataatttacaaaagagaaaccttggacacggataaaccatttcagcctaacttctccagtgcaggcgcggctacgtttgcatgcttcttacatacagaagtcttacacgcttctgtgccgctctcagacccatgccacgcccaactttcaaaagtctctgcaccccaagtcagtatcactgagtctcccgcccctcaggttgcgccccctcggcctctagtctcccacccggaattctttacccttttctaataagttggtcaccgtcagagtcccggaggttgccgcgaagtctgatccagcagaaggagcccgtgcctccgcacaagaggaagcagcagagggcaaggacgaaccattttccgcgctttggttcaaccgctttctattcttcttggaagacatggtcacaaggtaccctagccgaagcagtagaaaagccgactcaatgtgcgcgcttcaactgagagaaaaacttccggggcagaagtcagcgagggtccgcccctgcgccgtaatcccctgagtggagcgcagcagtgcacagcgtggtgggagggactgagcgttttcaaaaccagcagtctttgaaacagctgtaacggcatctgtgaaagaagataggttccaggaacggaactgccacttagattgtaaattcctgaaaaacaggacgtttttgcatctcctcccggcttccccatccctaaaccaacgtctgttgaattaaactaccaaacaaaataagtgagtggcggtgggggaggaggttttccccgcttaactggagcggggcaaattgctgagaagggctggtggaccacttcgcggtctccttggcatagctctgcagagtggtaaccccagctcaactctgagggtattgatggcactcttctaaaatgtacggccgcgatctccgctctggagcgcggaggggtcatttgggcaacggacgaattaagcggcgtggagatgcggcagccactgagctggggccgctggcgcgcgatgcttgcccgaacctacggccccgggccttcggcgggttaccgctgggcctcgggcgcacagggttacgtgcggaatccgccagttggagcgtgcgatctgcagggcgagctggacagattcgggggca

SEQ ID NO: 32669 - DNA, 2300 bp, Homo sapien
ttggaggaaataacgggctcatgaagttagtcctgaagtatctttgggacactcatgagaagagttattgtacagtgctattcaaaatatgacccacaacgatttgttactgcttcatgacaagtacaaaacaggagaataagtatatagaagcttttattgaaatttacagagtaatttcacatctgtttaataaaaatttttccttatttttctagaaaatcatttttactgtattttagaaaagtgctgatctgtgacctattataaattttaaagtcttcaccacagagagcttgagaagcatttggctaaaaggcaaccacatcaaggcgcaaaaacaaaagatttacaaatataaatctgacactgaagagactatagatgggaaactctgggcactggatgaacttgccaaggagacaggatttattgagaggaaaaaaaaggttttggactaagaattgacgaacttcaacatttaatggtcaagggaagaggacgagcctgcaaagaaaaatgatgaaacatcaacaaagatgaagaaaaccaggcaagtttgacaacacataagaagttaagtgtttcgagaaggagggaatggtcaacaataccaaaagttgctgtggtcacgtaaggtttatcaacacggagatgctcggagaccacaccaggaacagtttccatggaatgatggggtggaagtcaaagaggaataggctagggagagtatgtaagtggtgaggcggcagagaccactccatttaagaagcttggcaatggatagagagacggttgcaggaagaaaatgtggagcttttgttctgatttaagatggaagagaaatgagcatgtttacatgtcaatgggaaggatctagttcaaaaacaagttgaaccttcaggacagaacaagttgtcctctgatacctaaggcagagtgaaaataccatgtgaactctaaattgtctttaaggtctgattagacataaaagtttttgccactagtctggtccatttttcaaagctattacacatcaaatataaattttcaatttttaattcaatttataagacttttcagtataaatacgttctcccaaatcaaaggagctgtcatctaggaatggcttttaagtcaaacacatctggactcaaatatcggctctgccacttagcacctgtgtagcctgaatggaatcacgttaactttcctccctctataaaactgtcattactatacccatcggtcacggcttctgtagaaattagatgagctatatatactgctaacactagtgtgcagttactagcagttattaaatatcataacctgcgtagtactggaagaaaatgctatcatcactcctaaaggcagagtgatccacatttttactgaattggttatttagttttttaggataagtatcccatgttcgctagttatgaacaattttgcaattaaatgtgtcgttaatgttaaatgagacaaagcgtttcaagtgcaacttaaaaattcaaaataatttacaaaagagaaaccttggacacggataaaccatttcagcctaacttctccagtgcaggcgcggctacgtttgcatgcttcttacatacagaagtcttacacgcttctgtgccgctctcagacccatgccacgcccaactttcaaaagtctctgcaccccaagtcagtatcactgagtctcccgcccctcaggttgcgccccctcggcctctagtctcccacccggaattctttacccttttctaataagttggtcaccgtcagagtcccggaggttgccgcgaagtctgatccagcagaaggagcccgtgcctccgcacaagaggaagcagcagagggcaaggacgaaccattttccgcgctttggttcaaccgctttctattcttcttggaagacatggtcacaaggtaccctagccgaagcagtagaaaagccgactcaatgtgcgcgcttcaactgagagaaaaacttccggggcagaagtcagcgagggtccgcccctgcgccgtaatcccctgagtggagcgcagcagtgcacagcgtggtgggagggactgagcgttttcaaaaccagcagtctttgaaacagctgtaacggcatctgtgaaagaagataggttccaggaacggaactgccacttagattgtaaattcctgaaaaacaggacgtttttgcatctcctcccggcttccccatccctaaaccaacgtctgttgaattaaactaccaaacaaaataagtgagtggcggtgggggaggaggttttccccg

SEQ ID NO: 32670 - DNA, 2300 bp, Homo sapien
aagatttttcccattgatatttgcattgtttttcatttttggaaaaatttcatacttccgttatccatttttagtcaagttacaatgtaattaaacttaccaagtgaaaaacaatgtatactttaagctaaaaatttagaatttctacaaagtcttatagttgcggggaatcaggagaggcaagtttcattcaatgtcttttagaaccaaggtgacagagctatacgtacatttatttgtaatgtaatatttagagaaaaacatattaatgcattttagtgctaaatgacatggagggttattgatcaactctgtacagcatatttaatttcttaatacaacatgacccatggtgatggtgttttagataaaaatctcatggatttgattattataatttaaaaatacttgatctaatgaaaattattttaatacatttctggttgaaatagagtgtatttgcaatagaaatctttcaaatatattttgtaggatttatgaaggtagaatgttcagtgctccctctccaggttttatcatattggtgaactgacctctcagctcacaactgtggtaatagttttgaagaaccaaataagatactctgataggatagtctatttttgatttgtctattccaaatacattcacaagaaacctatccatcactagtaaaatttcattacatccccaaatctaatgagatctatgaaaaaaatacaatgaaatcaattttattcttttaaatagcctattttaatacaattcataatattaagagtgaatatgtagctttttggcttgattcttattctatgctattttctaatgatgcttttttattgttattcatgttcttaacaatgctctgtgttcttcagaggcaattccaaacacaactttaatttttgaaagtgctcagacatttgaaagtcctgtgtgtgtgcgtgtgtgttatgtatgtatatatttatagtttcaacagaaccacttgctattgtaaatgagactaaaaatgtactttgaactaaaaatttccatacttatatgtttatatgatttagattctagagttttgttattgtttgctttgttttgccagactttaagctactcctgatatatagtacctggaaaaatatttcctttccactaagtttttggtctttaggtggcttttaaaagtttctacggaaccttcaattccacaaaaagttatcctcactgcagcatgaaaaggcacaactttgataataaatgcctaaaatcccatagtttgtaagaaagtagaaatcaagtttcctacttaaagtgttttttttccagtcatatcagctattactaagaattataaaacttcttgataaattttttctattctaattaattgacttttagctaattaaaaaatatacgggtttgtattttttgcaaaattatacaactatattacaaaattgaaagaatttggttttttctccatgtgcttgatttttgggaaatcatataacaagccaaggtaaagcaattatttaaaaaacccacagcagaaaatttcacctttattacatatgcttatattacatttgcagtaaggagtgccaccttttgaactttaggtttcacatattctgaactttgttgtaaataggaactgtaatgttatataatcatctttttgtgtcaatatacgttttccctctagttggtcagaagtgatggcttggcatacaacttttttcattttcttttattcttcacaattcttttctaattcaacttaagagtagagtccaccaatccttttaattgagatcgacaactgaagattgctaactaaatccgaatgtattcctctatgacaaactgcatttgcagaatttttagaggcactcccgaagttttaagaggatgtttattacacgagtctgtagggcaacatttccaagttggtacacataaacgaaagaggaaacgatagttaaggaaatcctgttccaggttttcgggcagcccgagtgattgacacatgatatcaccggaggcgtgtcctggagtggaggtggaggtggaggcaaggagctgaaattctgcgtagccggagtgagaccgctctgcaaaccactgcgtgctttgcagagtgattatcagcacagttccctgccctggataaggaacagctacagtcgctgttaaatgtgcctgaaaagcaatttgcaatctttgcattaggtaagtaccgtttccttccgtagacattttaggaaagataaggtgagaaatgttgacttttgcaagga

SEQ ID NO: 32671 - DNA, 2300 bp, Homo sapien
cggcaaaaacgtgcaggactgcatgttactttggttcgcggctgacacgccgactgtgcgccggcctgtcaatcaccgggagcagcaacagggagcacatggcaacgggctgcgggcgagctggccagcggcccgcccggggtcccagcccttcgaagaaagggacattcacgagcttctatctctaattctctgtcgcaggcatttcggccgtggaaccccaggctcggaggactgggtgtgagcgctgcccgggagaggctgacctgccgggaccggagtgcccggggacgctgtgcccccacttgcccaacgtgcggaatcggctaagcgcgtcggcctgcgcggggcacaagggacgacgcccgcctttctctctccgagaaggatccccaaacctcactctcttcactcctccccgctaaaaaaaaaaaaaaaaagaaaagggtaaaaaaatccccctccccctcccggccgcggcagcctctgcctggcaggcgcgtgctccgaggtttcgccggggtactgcgcggctccgtgacccacccgccgacggcggttcgggccccgacccgggcgctgcggagtctcgaacgcccgtgacgtggatttttcgctcgtcaggaagccgccatcccttccttcgttccttgcgaggagcgactagaacccgagttctctgagcacaccgtgccgtcagctggcccgtcacgcactcgactccgccactcccctacttgtttttctgagacttgggaagccttcctgaaaggatttgtaaaaactggttcttggaaaggggctgcagaagacctcccgaggtggatgttactgagccgcccggcgagcaccagccgtgacaggtccgggcccggccgcgcggagccgcgggagaactgccctccgcagccggaagggggccgcggggagcgctcctggccggtggcggcgggggcgggggaggccgcgagccgaggcgctccaactccggcgatgccgcctcgccctccccgccgcggttgatgcggcacgtgcacgccgccgcccgcaccaggacctgggccgggtcgcacggcttggcccccggccaccgcttcggcctaggtgagtgtgtgcggcggccgccctcggcccgctgggctgtaggcgcgcgggcggggctcgctcggcgcggcaggtgcggactcggcggcgctgctgcccgagccaggactccgggagaggaggggaggggagggacgacctcgctcggcgcggcccctcccgccgctccctgccccctgggggccgcggcttctgggggctcaaggttgggtggcggggtgggcgacggtctgcggctgcggaacgtaacaggacagggtctcctccatccccgattacccggagcggcggcgcggtggcccaggttgtcctctcggagagcccttcacgcccaagggggatttcaggcggctctggggatgtccccggaggccctctttggaggagtgtgcctcaagcagggggacgacaaaggctgtgtgtgtgcgtgtgtgtgtgtaggcacatccccggaattcgccgattaccccctcgatagaattaggcagccccaaagccagccgcaactttcttctggtttggagcacagtgcaaagacaggggaagggagagggcactgccactttaaaagtggggaagtcggctgggcgcggtggctcacgcctgtaatcccagcacttgggggggccgaggcgcgctgatcacctgaggtcaggagttcgagaccagcccgaccaactgatgaaaccccgtctttactaaaaatgcaaaaattagccggccgtggtgacgcgcgactgtagtcacagctactcgagagactgaggcgggagacccgcttgaacccgggaggcggaggttgcagtgagccaaggtcgcgccactgcactccagcctgggagacaaagtgagactccggctcaaaaaaaaaaagtggggaagtccgccctcctgagctcatggtaacctcagcctcctcccctcctcctaccacagagagagggagaaagaacttgttttcattcataactttttccttttccttcttccgtcaactatttattcagtgcggattgcagagggcgcagctccaccgtggtaacttgcaatgtggccgcccctgcgctggcttctttctcctcggccctcggtgaacccagcttttcctttaaagcatagacaaatccttgcttagggtcagccagaccgtgggcttgctttgggctcccgcgtggacgctgaaggctcttcatgat

SEQ ID NO: 32672 - DNA, 2300 bp, Homo sapien
aagacctgtgcctctcccaggcttcccagtgagtcttgtgaagcggccctgtcaatactggtcttttccaaggggaaaatccaggagatcacactcacccatttctagctattttcttatatagctctagtttactaagaaagacattcagagacatttagtgtaattattgttactaccttttctgccattaaaaattattttatatgacttaaaagtgtatactgtgtaaataaaacttttttccacatgtctacggtacctggcaagtctcagttcattatttgttgaaatgttcaccttaagcattaggaaatctgcatatttcttgctatttatccttaaaacagaacaaaacctcaattaaaaaaaaaaattagctgggtgtggtatctcatgcctgtaatcccaggctgaggcaggcatatcacttgaacccaggagttctagaccagcctgggcaacatagtgagaccctgtctctacaaaaaaatacaaaaaattacccaggcatggtggcatttgcctgtaatcctagttacctgggagattgagatgggaagatcacttgagcctgggaggttgaggcagcagtgagccatgattgcactgccaatgggagaccctatctcaaaaaaactgaaaaggatttagacgtgtgtgaagttcattctacaattcagtgtgacacttttataaccaaatgagtaccaatacccttatgaacacacatatataaaggaaagaaaataaagagagaaagaaaaagaagaaaaagaaatgtggttagaactccttgtttcattttactctgacttgattatttcccaggcccaaatctagaactggaaggtggtagcttattgtatcagaggttaagcttgtggcttttatttcctgctccatctagaaccaagatgtccaaagagtatgtttggaaggacttttttttttttttaaatgatttctagctctgtctctagtcagagaatatggaggagtttgggccaactccagaaaacaacttcaatgtagaaaaccatggagcgcaaggtcctgcttccatatatttattttcgtggagcaggtggcaagttctcaaaataattttgtctgtgagatacagatatttctgggacattttcataaccagcttcctgcagtaattagcttcagagctggagtatgctagaaactactgggccctgggcagtggttaaattaggtgtgaacgtaagctgggctgatctccattgtgtagttaaaaaccaaaggtgggcacagagagagtatttgttctgccctttcttcacccactgcattttcatttcccctttctctactccagaggcctaataaaggactctaatgtacgatactcaacacagctttaaaacatccacgcagagtacaaaattgtagtaggaatttgggttttgtttttcttttgagtttaatatgacttcctaggttcagcgtattttgtaatatatttcttaaaccgcaggatcatgagggcaaattcccttgggggaaagtggctctgtgagttgattagcaccgtttgcctgcttcctaaccctcttctgctcaggtattagttgttcagacagctgagcttcagctcagctctccaggtcctgcgctccattttaatgcaagccagtgatgcaaagtccccggcttggcttgtcagaacttgatagctctgtaaacactgaaatccttgttgccataacaccaggaaaaataatatgggctcctgcatataaatataacgaaggccttggggaatgggagcatttctaaatgacttgaagctctgtcacggcataatctcttataaataaatgtcagtgtagtcactgaatgcagactggatttttgcctgactacggtgctcagccttctagacaatagttatgctaagggattatcttttaacattgtgcagttatctcctttgtttgttttcttttttcattattcacataagccaagggaaatgaaaagcatcttatttcaggcaaaaaggcctgtgaatgattaactctggttccatgcgttgggactttgcatagcaaccccgtggcttgcaacgacaaaaaagctcaaggcaggaacagcagcccagggacctgagaccagcgttctcaaatgaaggtggtgagaaacagattaagtataagcattgtgtttatgggtagaattctctgtagctggcccatttaatttggcattcgttttactgcacttttcttggtgaagatgtgttttgctgacctttactcttgcttttt

SEQ ID NO: 32673 - DNA, 2300 bp, Homo sapien
aattttgtggtttttcttaacgccatttgttactcacctagatctgccatttggtaaacgttcaatattgggccacttactaaccattttgtgcctcagttttgtcatctaaaacatgggaaaaataaatgccttgtaatgttgttctgagtattaaatgagctaatacaggtaaaacttttagaacagtacctaacatacagcaagtgctgaataggtgttagctctcatttctcgtcatattgaacagagatgagcaattgaaaatctgtgctggaattttgtgtcaacaaatttattattcttcttctaccatttcaccagtgttttggttttactacctttgaacacacaggctcaagagcagatataatctcaagccattaaaagcatttattagacatccgttatccatattatataaccaaggggttctaaactgtggcctggtttagaagtggggtggtgagtatgacctcccagtaggtgtgtttccctggctgtacacacgcatgggggcactcagggctatttccagataaaatttacatctatgtgcctaatggtcccaggtggacatatagagatgaatgtgttgaatgagtctcctggtttctggagcttgaaagctccctgttagaagggactgatgattctttccatcccaccttatggaatgtgagccttacccagacctaaatgaatgtcagtgctctgtgagcaccaccattatcaagctgtggagtgacgttggcagtggagggcatgcacctgacatagagaaatttacacccttggcgtaatcctggaggtaacggcgcttccagagtcacatagtccctaaagtgacactagagggcgcagtatggacatagctgtgaattgcgctctggacttgtgagtgacttagccaatccaaggctgggctcgatagctctttgaggaggtgagggaactgaagaaaagcaagagggactggggaatctagaaaggagcattctttgagagaaataatagtgatgatagctaccatttattgagcacttattaaaggtatgatttaaatacattgtctcatttgatcttcacaattattcagtgcagggctatactgtcttcataaaacagaggagaacgcctggggcgatggctcacacctgtaatcccagcactttgggaggccgaagggggcggatcatgaggtcaggagttcaagaccagcctggccaacatagtgaaacccagtctttactaaaaatacaataaaaattagccgggtgtggtggcaggcgccgatagtctcagctgtttgggaggctgatgcaggacaattgcttgaacccgggaggtggaggttgcagtgagccgagatcgcaccactgcactccagcctgggtgatagagtgagactccttctcaaaacaacaacaactaaacaaaaacaaaaaactgaggaggaaatggaggcttagaggaactcacccaaggtcacacagcctttaagtggaggaactggtgtttaatccagagctatctgaattcaaagactatctgtattcttaaatcttaaccctaatattctcagtgaggaaggactgaggttatatctgaaaaagagcaacaaataacagcttcagggctgctgaggtgggtttcaaaagtcacacaactctgaagtatatttcagacctcctgttcttggtgatttgagcaaaaggtttattgcaaattattatccggaaactatgtttgtagactgagaaatgggtttctgtgaaacagcattcatccagaaaagaagttttttttctgcaagaaagcagttaaaacaaaaacctgggggaatttgactctgatttttttatcactgagttttcatagattctggtagcattggatgtgcatatgttggtgaatacagttccagacttgcgataatagaagttgtatcatacatgttcacccaagagccattgcttgacagaggcatctccaggtctgagatctcaggggagaggccttcacccatggctgtgagagttgccatggttgagaacaccagaattctctcattgtgttgcttgcctgccatgaagcctctggaaggatatggtggctgaaataaggcatgaggcacagatacagatttcctgactcaacttctggtgcagataacattgttatactacacatatttataatgcccttttgggtaagttttcatagagatcattttcattttttaccgatgccattaagctcagttaagactattggcaacctttctcatcctcctctcc

SEQ ID NO: 32674 - DNA, 2300 bp, Homo sapien
ttcactttctgtatacaccttatatgtacaactgtttcttcagtagtctcaaatgcatgttacaatgtaagctcttagcaacttttacttttggcgaaaagcttggtaaattccagattttaatcatgtactaggtgtggagcctagcctaggacacaccaggcagaagaacagatatggctgactccagcacagctagggggcatggctaactccattatgtccccaggccttatctagaatctaatgtctccaaggtagaattgaacaattttcaaaagacaaagaagcagtttatgaccttaaagcatttagtaaacttaatatttgacctgcctaatttagaccaaatgtctttactttactaataatctttaaaactgtttttatttcccaaaggctacttaactcacatgaactaaaagtcattccactttttacttttctgacaaaatatttgatttcagcacttattattattaaaccaattaaacaaagctcttttatattacacacacataatacatataaatacatagacagaagataaaggactcattcattccctatgccaggaattggaccctaaacccaggccaccactgcgaaaagggaaagcatgatcacatggttacaaggtcaagctcccaaggacatgattgaccagagggaaacctcatccttttcacacacacacacacacacacacacacacacacacacacacacacacacatggagagagacagagaaagagagagatagagaccagaagtctgactggtaagaaattcttaccctttgctgtcatgccaggcttctgggttccctttccctgagcggccctagtgacctggcttgctgcgccacagccttgggggccaagccacagcacaaaggaaaattacctctttccattctggccagagtaaaatacatgtggcaagacatagacattaaccactctgcttagcacccaattgaaaactgccaaggctcaaacttccccacatcatcattaatccaacttccaaccaggagtttcaacatgtggtctctgggcaagatggctgccctgagtaataaaaaagataaaaaacggaaaggagaaagagaaaatcattgcctgtggcagggtggggaaggcaaaatgctcagggaggccagagaatgacccaaccatgttgcagcgacactgaaaaattcaggcggctgctgtcgtgaagagattttcttcaagcagtcccatcagctgtcaagtttcctcttttggggcaggaaaaagctccccatgtcccatgatcctgtaaatgcctaatcatgttacccattaccgtcagcaacgactgcaaggcagcttaatccaaagagaatagcagttaacatactgtggtgccaaacccattcttagccaagaggcactttactgagaagggtctctaaccccctaaatcttagaagggactctagtcctcctaagttgggcctctaacccaaggtcagtcaagtgtccttgccttttattgagaggagcctttaactctctctgtgctaggagagattctaactcccctaagttgggcctctaacccaatctcatcctttacccagatatgtgcaccccacttacccaaagtcatccaatcagtgctgcagtctatttcgtgtgggaagagaggtctcctcagtattgtcccttcagggtttgccagaaagatgttactggatcccaccacttacccaaagttagcatttgggtcaggggcttctgcactatagtcccttcatggttgccaaaaagatgttacaggaaaggggtcccaatgcagactgcaaaagagggttattggatcttgcacaagaaataattcagagtagtccatagagtaaagtgaaagcaaatttattaagaaagtaaaggaatgaaagagtgtctattccatagacagagcagccaagggctgctggttgccaatttttataattatttattgatgatatactaaacaaagggtggattattcacgtctcccccttttagaccatacaggataacttcctgatgttgccatggcatttgtaaactgtcattctgctggtgggatagtagcagtgaggatgagcagaggtcactctcgtcaccttcttggttttggtgggttttagccagcttctttactgcaatctagttgatcagcaaggtttttatgacctgtatcttgtgttgacctcctatctcattctgtgacttagaatgccttaactgtctgggaatgcagcccagtaggtctcagcctcat

SEQ ID NO: 32675 - DNA, 2300 bp, Homo sapien
agtcttgacttgctccagttcttctttagatgttagaatattccttcaaaatgcaaatctggtcatgttagagacttggtaagttcattcacttagcagttttttgttctgtaagatgaatacacaattgtctaataagttcatatctgtatatcatgatgtcatctgcctttagacagtgaaattatggcttcctttaaagaacttaaaatgagtttaaaatagctatagctagtatatttttaggttggtttaaatcttattatttattttacagtgctgaagttttttgaccataatttagccaaaaagttggatcttaattggttcaagctatttattgatggtctgagatttagttattttagtttgataaaatgtacagtaatgtagtttaaagacaatgactggatattctaattggatgtaaatattcagtcacataattaaggctagtgtatattcaagtgtataggtgaaaatatataaattatttatatggaagagattttgtaaaaagaaaccttacttgttatgtctcctgcaactttttttcccaatcacttgggagttcagatgatgttaactgggtacttttatggttatgtaagactgtctgcttcttaattagtatctattacaatggagttgagagaggcaccaagctactaaaggaataagtagttcaatttgtaggtaggaaaatgaaatttttctgccatcagtgtgtttttgcagaaagaaaagaaaactgatttacatactaataggtattaattgatctgcttattagtattaatttattaattgatttatttattatatgttgacattctctttgaagatatggtacttctataatccttttcaactgattacatctacttttttatctcttctttaggttttcgaaaaataagtttagatgaccttcggaaggcatatatcgtcaaggatgttcagcagtacattcttcatcgtttagatcaagaagaagctttgcgacaacacctcacaaaagaaactgcagagatgttaaatcaactgcacattaaaagcagtggatgctttctttacctagaacgagttttagatggagttgtagaaaattttattatgttaagagaaattcgtgacatcccaggaactctaaatggtttatatctctggctgtgccaaagactttttgtaagaaaacaatttgcaaaggttcagcctattttgaatgtgattcttgcagcctgccgacctttgaccataacggaattatatcacgcagtatggaccaaaaacatgtcgttaactttggaagattttcaacgcaagttagatatcctctccaaacttcttgttgatggactaggaaatacaaaaatactgtttcattatagttttgccgagtggcttctggatgtgaaacactgtactcagaagtatttatgtaatgcagcagaaggacacagaatgttggctatgagttatacctgtcaagccaagaatttaacaccattggaagcacaagaatttgcattgcacttaattaactcaaacttacaattagagacagcggagttagctctgtggatgatatggaatggtacacctgtcagagattccctttctactttgatacccaaggaacaagaagtgctacagctgttggttaaagctggggctcatgtcaacagtgaagacgatcgcacatcatgcatagttcgacaagccttagaaagagaggattccattcggacattattagataatggagcttcagtaaatcagtgtgattcaaatgggagaacattattggctaatgctgcatatagtggcagtcttgatgtagtcaatttacttgtctctaggggagcagatttagagatagaagatgctcatggacatacaccactcactctagcggctagacagggacataccaaggtggttaattgtttgattgggtgtggagcaaatattaatcatactgatcaagatggttggacagcattaagatctgctgcttggggtggccatactgaggtagtttctgcactactttatgctggcgtaaaagtggattgtgcagatgctgatagccgaacagctttgagagcagcagcatggggaggacacgaggatattgtactgaatttgctacaacatggcgctgaagtgaacaaagctgataatgaaggtagaactgctttgatagcagcagcatacatgggacatagagagattgtggaacacctactggaccatggagcagaagtaaatcatgaggatgttgatggcaggactgc
